United States Patent Application Publication US 2009/0181380 A1 - sequence listing, part 4

SEQ ID NO: 5662 - DNA, 2902 bp, Homo sapiens
ccggcgcagacctggggtggggtcggaaaagctgtttcatcgcccgctcccgggccctccgctccctccctccctccctctctccctggcaggactccccgccaggcctccccgccactctccgcggcgcattccgggaggcagcggccgcagcggcctcgccatgtcccagcccggccagaagcccgccgcctccccgcggccccggcgagcagccgccgcccgccgcacccatgagcatgtcagtgaaaaaaccagtgaatcgccttccaaaccaggagaaaagaaaggatcagatgaggtgtcagcttcctctggtgcaaccagcaagtcttccagtatgaatcccacagaaaccaaggctgtaaaaacagaacctgagaagaagtcacagtcaaccaagctgtctgtggttcatgagaaaaaatcccaagaaggaaagccaaaagaacacacagagccaaaaagcctacccaagcaggcatcagatacaggaagtaacgatgctcacaataaaaaagcagtttccagatcagctgaacagcagccatcagagaaatcaacagaaccaaagactaaaccacaagacatgatttctgctggtggagagagtgttgctggtatcactgcaatatctggcaagccgggtgacaagaaaaaagaaaagaaatcattaaccccagctgtgccagttgaatctaaaccggataaaccatcgggaaagtcaggcatggatgctgctttggatgacttaatagatactttaggaggacctgaagaaactgaagaagaaaatacaacgtatactggaccagaagtttcagatccaatgagttccacctacatagaggaattgggtaaaagagaagtcacaattcctccaaaatatagggaactattggctaaaaaggaagggatcacagggcctcctgcagactcttcgaaacccatagggccagatgctcagtcagcagggacagtcagaagtgctgctccaccccaagagaagaaaagaaaggtggagaaggatacaatgagtgatcaagcactcgaggctctgtcggcttcactgggcacccggcaagcagaacctgagctcgacctccgctcaattaaggaagtcgatgagggaaggggagtctccctgacttccagcaacaatccttgagtctgggactgccctggcctaagatgggccagtttctatcttcgactttcttggagggctcaccggccacagtgtggcacgataagctttgtgacggtgaacgcagaggagcaagagaagcagttcgtatcttccaggaccaagcaaaagctaaagaagaaaaactagagaagtgtggtgaggatgatgaaacaatcccatctgagtacagattaaaaccagccacggataaagatggaaaaccactattgccagagcctgaagaaaaacccaagcctcggagtgaatcagaactcattgatgaactttcagaagattttgaccggtctgaatgtaaagagaaaccatctaagccaactgaaaagacagaagaatctaaggccgctgctccagctcctgtgtcggaggctgtgtgtcggacctccatgtgtagtatacagtcagcaccccctgagccggctaccttgaagggcacagtgccagatgatgctgtagaagccttggctgatagcctggggaaaaaggaagcagatccagaagatggaaaacctgtgatggataaagtcaaggagaaggccaaagaagaagaccgtgaaaagcttggtgaaaaagaagaaacaattcctcctgattatagattagaagaggtcaaggataaagatggaaagccactcctgccaaaagagtctaaggaacagcttccacccatgagtgaagacttccttctggatgctttgtctgaggacttctctggtccacaaaatgcttcatctcttaaatttgaagatgctaaacttgctgctgccatctctgaagtggtttcccaaaccccagcttcaacgacccaagctggagccccaccccgtgatacctcgcagagtgacaaagacctcgatgatgccttggataaactctctgacagtctaggacaaaggcagcctgacccagatgagaacaaaccaatggaagataaagtaaaggaaaaagctaaagctgaacatagagacaagcttggagaaagagatgacactatcccacctgaatacagacatctcctggatgataatggacaggacaaaccagtgaagccacctacaaagaaatcagaggattcaaagaaacctgcagatgaccaagaccccattgatgctctctcaggagatctggacagctgtccctccactacagaaacctcacagaacacagcaaaggataagtgcaagaaggctgcttccagctccaaagcacctaagaatggaggtaaagcgaaggattcagcaaagacaacagaggaaacttccaagccaaaagatgactaaagaaatacaagttaaggtatctggtatctgcatgtaaaatcttcagctggtggatggtgacttttgaagaacaaaaggctttggcaacagaaaacaattgttctgggtgatttctagaatggtttttgttgagtctctgaacatcctaaatattggtttgttattcttttccagaaagaaaatgaatttgactggttcacctgtgtactgagtattgataaactttgaatttttttaattgccttcaattgggagagaaagctttatatttgtgtgaggacttctgcatcttacagtcagcacagaacacactgagacttgaatcaagtcagcaacagagcaaaataaaggttagataagtccttgtgtagcaaatttcgagcataagaaataaaatctaattaattcttagggt

SEQ ID NO: 5663 - protein, 431 aa, Homo sapiens; identical to SEQ ID NO: 5611

SEQ ID NO: 5664 - DNA, 3137 bp, Homo sapiens
ccggcgcagacctggggtggggtcggaaaagctgtttcatcgcccgctcccgggccctccgctccctccctccctccctctctccctggcaggactccccgccaggcctccccgccactctccgcggcgcattccgggaggcagcggccgcagcggcctcgccatgtcccagcccggccagaagcccgccgcctccccgcggccccggcgagcagccgccgcccgccgcacccatgagcatgtcagtgaaaaaaccagtgaatcgccttccaaaccaggagaaaagaaaggatcagatgagaaaaaagcagcaagcctcggcagcagtcaatcctccagaacctatgctggtggaacagcctcggccaccaaggtgtcagcttcctctggtgcaaccagcaagtcttccagtatgaatcccacagaaaccaagataaaataaaattatacctggggctgtgctcttatattaggccattccagtcagccaacagatggaaggaccacatcttcctaacaagaaaaaacacaaaaaacaggctgtaaaaacagaacctgagaagaagtcacagtcaaccaagctgtctgtggttcatgagaaaaaatcccaagaaggaaagccaaaagaacacacagagccaaaaagcctacccaagcaggcatcagatacaggaagtaacgatgctcacaataaaaaagcagtttccagatcagctgaacagcagccatcagagaaatcaacagaaccaaagactaaaccacaagacatgatttctgctggtggagagagtgttgctggtatcactgcaatatctggcaagccgggtgacaagaaaaaagaaaagaaatcattaaccccagctgtgccagttgaatctaaaccggataaaccatcgggaaagtcaggcatggatgctgctttggatgacttaatagatactttaggaggacctgaagaaactgaagaagaaaatacaacgtatactggaccagaagtttcagatccaatgagttccacctacatagaggaattgggtaaaagagaagtcacaattcctccaaaatatagggaactattggctaaacccatagggccagatgatgctatagacgccttgtcatctgacttcacctgtgggtcgcctacagctgctggaaagaaaactgaaaaagaggaatctacagaagttttaaaagctcagtcagcagggacagtcagaagtgctgctccaccccaagagaagaaaagaaaggtggagaaggatacaatgagtgatcaagcactcgaggctctgtcggcttcactgggcacccggcaagcagaacctgagctcgacctccgctcaattaaggaagtcgatgagggaaggggagtctccctgacttccagcaacaatccttgagtctgggactgccctggcctaagatgggccagtttctatcttcgactttcttggagggctcaccggccacagtgtggcacgataagctttgtgacggtgaacgcagaggagcaagagaagcagttcgtatcttccaggaccaagcaaaagctaaagaagaaaaactagagaagtgtggtgaggatgatgaaacaatcccatctgagtacagattaaaaccagccacggataaagatggaaaaccactattgccagagcctgaagaaaaacccaagcctcggagtgaatcagaactcattgatgaactttcagaagattttgaccggtctgaatgtaaagagaaaccatctaagccaactgaaaagacagaagaatctaaggccgctgctccagctcctgtgtcggaggctgtgtgtcggacctccatgtgtagtatacagtcagcaccccctgagccggctaccttgaagggcacagtgccagatgatgctgtagaagccttggctgatagcctggggaaaaaggaagcagatccagaagatggaaaacctgtgatggataaagtcaaggagaaggccaaagaagaagaccgtgaaaagcttggtgaaaaagaagaaacaattcctcctgattatagattagaagaggtcaaggataaagatggaaagccactcctgccaaaagagtctaaggaacagcttccacccatgagtgaagacttccttctggatgctttgtctgaggacttctctggtccacaaaatgcttcatctcttaaatttgaagatgctaaacttgctgctgccatctctgaagtggtttcccaaaccccagcttcaacgacccaagctggagccccaccccgtgatacctcgcagagtgacaaagacctcgatgatgccttggataaactctctgacagtctaggacaaaggcagcctgacccagatgagaacaaaccaatggaagataaagtaaaggaaaaagctaaagctgaacatagagacaagcttggagaaagagatgacactatcccacctgaatacagacatctcctggatgataatggacaggacaaaccagtgaagccacctacaaagaaatcagaggattcaaagaaacctgcagatgaccaagaccccattgatgctctctcaggagatctggacagctgtccctccactacagaaacctcacagaacacagcaaaggataagtgcaagaaggctgcttccagctccaaagcacctaagaatggaggtaaagcgaaggattcagcaaagacaacagaggaaacttccaagccaaaagatgactaaagaaatacaagttaaggtatctggtatctgcatgtaaaatcttcagctggtggatggtgacttttgaagaacaaaaggctttggcaacagaaaacaattgttctgggtgatttctagaatggtttttgttgagtctctgaacatcctaaatattggtttgttattcttttccagaaagaaaatgaatttgactggttcacctgtgtactgagtattgataaactttgaatttttttaattgccttcaattgggagagaaagctttatatttgtgtgaggacttctgcatcttacagtcagcacagaacacactgagacttgaatcaagtcagcaacagagcaaaataaaggttagataagtccttgtgtagcaaatttcgagcataagaaataaaatctaattaattcttagggt

SEQ ID NO: 5665 - protein, 431 aa, Homo sapiens; identical to SEQ ID NO: 5611

SEQ ID NO: 5666 - DNA, 2983 bp, Homo sapiens
ccggcgcagacctggggtggggtcggaaaagctgtttcatcgcccgctcccgggccctccgctccctccctccctccctctctccctggcaggactccccgccaggcctccccgccactctccgcggcgcattccgggaggcagcggccgcagcggcctcgccatgtcccagcccggccagaagcccgccgcctccccgcggccccggcgagcagccgccgcccgccgcacccatgagcatgtcagtgaaaaaaccagtgaatcgccttccaaaccaggagaaaagaaaggatcagatgagaaaaaagcagcaagcctcggcagcagtcaatcctccagaacctatgctggtggaacagcctcggccaccaaggtgtcagcttcctctggtgcaaccagcaagtcttccagtatgaatcccacagaaaccaaggccattccagtcagccaacagatggaaggaccacatcttcctaacaagaaaaaacacaaaaaacaggctgtaaaaacagaacctgagaagaagtcacagtcaaccaagccaaaaagcctacccaagcaggcatcagatacaggaagtaacgatgctcacaataaaaaagcagtttccagatcagctgaacagcagccatcagagaaatcaacagaaccaaagactaaaccacaagacatgatttctgctggtggagagagtgttgctggtatcactgcaatatctggcaagccgggtgacaagaaaaaagaaaagaaatcattaaccccagctgtgccagttgaatctaaaccggataaaccatcgggaaagtcaggcatggatgctgctttggatgacttaatagatactttaggaggacctgaagaaactgaagaagaaaatacaacgtatactggaccagaagtttcagatccaatgagttccacctacatagaggaattgggtaaaagagaagtcacaattcctccaaaatatagggaactattggctaaaaaggaagggatcacagggcctcctgcagactcttcgaaacccatagggccagatgctcagtcagcagggacagtcagaagtgctgctccaccccaagagaagaaaagaaaggtggagaaggatacaatgagtgatcaagcactcgaggctctgtcggcttcactgggcacccggcaagcagaacctgagctcgacctccgctcaattaaggaagtcgatgagggaaggggagtctccctgacttccagcaacaatccttgagtctgggactgccctggcctaagatgggccagtttctatcttcgactttcttggagggctcaccggccacagtgtggcacgataagctttgtgacggtgaacgcagaggagcaagagaagcagttcgtatcttccaggaccaagcaaaagctaaagaagaaaaactagagaagtgtggtgaggatgatgaaacaatcccatctgagtacagattaaaaccagccacggataaagatggaaaaccactattgccagagcctgaagaaaaacccaagcctcggagtgaatcagaactcattgatgaactttcagaagattttgaccggtctgaatgtaaagagaaaccatctaagccaactgaaaagacagaagaatctaaggccgctgctccagctcctgtgtcggaggctgtgtgtcggacctccatgtgtagtatacagtcagcaccccctgagccggctaccttgaagggcacagtgccagatgatgctgtagaagccttggctgatagcctggggaaaaaggaagcagatccagaagatggaaaacctgtgatggataaagtcaaggagaaggccaaagaagaagaccgtgaaaagcttggtgaaaaagaagaaacaattcctcctgattatagattagaagaggtcaaggataaagatggaaagccactcctgccaaaagagtctaaggaacagcttccacccatgagtgaagacttccttctggatgctttgtctgaggacttctctggtccacaaaatgcttcatctcttaaatttgaagatgctaaacttgctgctgccatctctgaagtggtttcccaaaccccagcttcaacgacccaagctggagccccaccccgtgatacctcgcagagtgacaaagacctcgatgatgccttggataaactctctgacagtctaggacaaaggcagcctgacccagatgagaacaaaccaatggaagataaagtaaaggaaaaagctaaagctgaacatagagacaagcttggagaaagagatgacactatcccacctgaatacagacatctcctggatgataatggacaggacaaaccagtgaagccacctacaaagaaatcagaggattcaaagaaacctgcagatgaccaagaccccattgatgctctctcaggagatctggacagctgtccctccactacagaaacctcacagaacacagcaaaggataagtgcaagaaggctgcttccagctccaaagcacctaagaatggaggtaaagcgaaggattcagcaaagacaacagaggaaacttccaagccaaaagatgactaaagaaatacaagttaaggtatctggtatctgcatgtaaaatcttcagctggtggatggtgacttttgaagaacaaaaggctttggcaacagaaaacaattgttctgggtgatttctagaatggtttttgttgagtctctgaacatcctaaatattggtttgttattcttttccagaaagaaaatgaatttgactggttcacctgtgtactgagtattgataaactttgaatttttttaattgccttcaattgggagagaaagctttatatttgtgtgaggacttctgcatcttacagtcagcacagaacacactgagacttgaatcaagtcagcaacagagcaaaataaaggttagataagtccttgtgtagcaaatttcgagcataagaaataaaatctaattaattcttagggt

SEQ ID NO: 5667 - protein, 431 aa, Homo sapiens; identical to SEQ ID NO: 5611

SEQ ID NO: 5668 - DNA, 3013 bp, Homo sapiens
ccggcgcagacctggggtggggtcggaaaagctgtttcatcgcccgctcccgggccctccgctccctccctccctccctctctccctggcaggactccccgccaggcctccccgccactctccgcggcgcattccgggaggcagcggccgcagcggcctcgccatgtcccagcccggccagaagcccgccgcctccccgcggccccggcgagcagccgccgcccgccgcacccatgagcatgtcagtgaaaaaaccagtgaatcgccttccaaaccaggagaaaagaaaggatcagatgagaaaaaagcagcaagcctcggcagcagtcaatcctccagaacctatgctggtggaacagcctcggccaccaaggtgtcagcttcctctggtgcaaccagcaagtcttccagtatgaatcccacagaaaccaaggctgtaaaaacagaacctgagaagaagtcacagtcaaccaagccaaaaagcctacccaagcaggcatcagatacaggaagtaacgatgctcacaataaaaaagcagtttccagatcagctgaacagcagccatcagagaaatcaacagaaccaaagactaaaccacaagacatgatttctgctggtggagagagtgttgctggtatcactgcaatatctggcaagccgggtgacaagaaaaaagaaaagaaatcattaaccccagctgtgccagttgaatctaaaccggataaaccatcgggaaagtcaggcatggatgctgctttggatgacttaatagatactttaggaggacctgaagaaactgaagaagaaaatacaacgtatactggaccagaagtttcagatccaatgagttccacctacatagaggaattgggtaaaagagaagtcacaattcctccaaaatatagggaactattggctaaaaaggaagggatcacagggcctcctgcagactcttcgaaacccatagggccagatgatgctatagacgccttgtcatctgacttcacctgtgggtcgcctacagctgctggaaagaaaactgaaaaagaggaatctacagaagttttaaaagctcagtcagcagggacagtcagaagtgctgctccaccccaagagaagaaaagaaaggtggagaaggatacaatgagtgatcaagcactcgaggctctgtcggcttcactgggcacccggcaagcagaacctgagctcgacctccgctcaattaaggaagtcgatgagggaaggggagtctccctgacttccagcaacaatccttgagtctgggactgccctggcctaagatgggccagtttctatcttcgactttcttggagggctcaccggccacagtgtggcacgataagctttgtgacggtgaacgcagaggagcaagagaagcagttcgtatcttccaggaccaagcaaaagctaaagaagaaaaactagagaagtgtggtgaggatgatgaaacaatcccatctgagtacagattaaaaccagccacggataaagatggaaaaccactattgccagagcctgaagaaaaacccaagcctcggagtgaatcagaactcattgatgaactttcagaagattttgaccggtctgaatgtaaagagaaaccatctaagccaactgaaaagacagaagaatctaaggccgctgctccagctcctgtgtcggaggctgtgtgtcggacctccatgtgtagtatacagtcagcaccccctgagccggctaccttgaagggcacagtgccagatgatgctgtagaagccttggctgatagcctggggaaaaaggaagcagatccagaagatggaaaacctgtgatggataaagtcaaggagaaggccaaagaagaagaccgtgaaaagcttggtgaaaaagaagaaacaattcctcctgattatagattagaagaggtcaaggataaagatggaaagccactcctgccaaaagagtctaaggaacagcttccacccatgagtgaagacttccttctggatgctttgtctgaggacttctctggtccacaaaatgcttcatctcttaaatttgaagatgctaaacttgctgctgccatctctgaagtggtttcccaaaccccagcttcaacgacccaagctggagccccaccccgtgatacctcgcagagtgacaaagacctcgatgatgccttggataaactctctgacagtctaggacaaaggcagcctgacccagatgagaacaaaccaatggaagataaagtaaaggaaaaagctaaagctgaacatagagacaagcttggagaaagagatgacactatcccacctgaatacagacatctcctggatgataatggacaggacaaaccagtgaagccacctacaaagaaatcagaggattcaaagaaacctgcagatgaccaagaccccattgatgctctctcaggagatctggacagctgtccctccactacagaaacctcacagaacacagcaaaggataagtgcaagaaggctgcttccagctccaaagcacctaagaatggaggtaaagcgaaggattcagcaaagacaacagaggaaacttccaagccaaaagatgactaaagaaatacaagttaaggtatctggtatctgcatgtaaaatcttcagctggtggatggtgacttttgaagaacaaaaggctttggcaacagaaaacaattgttctgggtgatttctagaatggtttttgttgagtctctgaacatcctaaatattggtttgttattcttttccagaaagaaaatgaatttgactggttcacctgtgtactgagtattgataaactttgaatttttttaattgccttcaattgggagagaaagctttatatttgtgtgaggacttctgcatcttacagtcagcacagaacacactgagacttgaatcaagtcagcaacagagcaaaataaaggttagataagtccttgtgtagcaaatttcgagcataagaaataaaatctaattaattcttagggt

SEQ ID NO: 5669 - protein, 431 aa, Homo sapiens; identical to SEQ ID NO: 5611

SEQ ID NO: 5670 - DNA, 2974 bp, Homo sapiens
ccggcgcagacctggggtggggtcggaaaagctgtttcatcgcccgctcccgggccctccgctccctccctccctccctctctccctggcaggactccccgccaggcctccccgccactctccgcggcgcattccgggaggcagcggccgcagcggcctcgccatgtcccagcccggccagaagcccgccgcctccccgcggccccggcgagcagccgccgcccgccgcacccatgagcatgtcagtgaaaaaaccagtgaatcgccttccaaaccaggagaaaagaaaggatcagatgagaaaaaagcagcaagcctcggcagcagtcaatcctccagaacctatgctggtggaacagcctcggccaccaaggtgtcagcttcctctggtgcaaccagcaagtcttccagtatgaatcccacagaaaccaaggctgtaaaaacagaacctgagaagaagtcacagtcaaccaagccaaaaagcctacccaagcaggcatcagatacaggaagtaacgatgctcacaataaaaaagcagtttccagatcagctgaacagcagccatcagagaaatcaacagaaccaaagactaaaccacaagacatgatttctgctggtggagagagtgttgctggtatcactgcaatatctggcaagccgggtgacaagaaaaaagaaaagaaatcattaaccccagctgtgccagttgaatctaaaccggataaaccatcgggaaagtcaggcatggatgctgctttggatgacttaatagatactttaggaggacctgaagaaactgaagaagaaaatacaacgtatactggaccagaagtttcagatccaatgagttccacctacatagaggaattgggtaaaagagaagtcacaattcctccaaaatatagggaactattggctaaacccatagggccagatgatgctatagacgccttgtcatctgacttcacctgtgggtcgcctacagctgctggaaagaaaactgaaaaagaggaatctacagaagttttaaaagctcagtcagcagggacagtcagaagtgctgctccaccccaagagaagaaaagaaaggtggagaaggatacaatgagtgatcaagcactcgaggctctgtcggcttcactgggcacccggcaagcagaacctgagctcgacctccgctcaattaaggaagtcgatgagggaaggggagtctccctgacttccagcaacaatccttgagtctgggactgccctggcctaagatgggccagtttctatcttcgactttcttggagggctcaccggccacagtgtggcacgataagctttgtgacggtgaacgcagaggagcaagagaagcagttcgtatcttccaggaccaagcaaaagctaaagaagaaaaactagagaagtgtggtgaggatgatgaaacaatcccatctgagtacagattaaaaccagccacggataaagatggaaaaccactattgccagagcctgaagaaaaacccaagcctcggagtgaatcagaactcattgatgaactttcagaagattttgaccggtctgaatgtaaagagaaaccatctaagccaactgaaaagacagaagaatctaaggccgctgctccagctcctgtgtcggaggctgtgtgtcggacctccatgtgtagtatacagtcagcaccccctgagccggctaccttgaagggcacagtgccagatgatgctgtagaagccttggctgatagcctggggaaaaaggaagcagatccagaagatggaaaacctgtgatggataaagtcaaggagaaggccaaagaagaagaccgtgaaaagcttggtgaaaaagaagaaacaattcctcctgattatagattagaagaggtcaaggataaagatggaaagccactcctgccaaaagagtctaaggaacagcttccacccatgagtgaagacttccttctggatgctttgtctgaggacttctctggtccacaaaatgcttcatctcttaaatttgaagatgctaaacttgctgctgccatctctgaagtggtttcccaaaccccagcttcaacgacccaagctggagccccaccccgtgatacctcgcagagtgacaaagacctcgatgatgccttggataaactctctgacagtctaggacaaaggcagcctgacccagatgagaacaaaccaatggaagataaagtaaaggaaaaagctaaagctgaacatagagacaagcttggagaaagagatgacactatcccacctgaatacagacatctcctggatgataatggacaggacaaaccagtgaagccacctacaaagaaatcagaggattcaaagaaacctgcagatgaccaagaccccattgatgctctctcaggagatctggacagctgtccctccactacagaaacctcacagaacacagcaaaggataagtgcaagaaggctgcttccagctccaaagcacctaagaatggaggtaaagcgaaggattcagcaaagacaacagaggaaacttccaagccaaaagatgactaaagaaatacaagttaaggtatctggtatctgcatgtaaaatcttcagctggtggatggtgacttttgaagaacaaaaggctttggcaacagaaaacaattgttctgggtgatttctagaatggtttttgttgagtctctgaacatcctaaatattggtttgttattcttttccagaaagaaaatgaatttgactggttcacctgtgtactgagtattgataaactttgaatttttttaattgccttcaattgggagagaaagctttatatttgtgtgaggacttctgcatcttacagtcagcacagaacacactgagacttgaatcaagtcagcaacagagcaaaataaaggttagataagtccttgtgtagcaaatttcgagcataagaaataaaatctaattaattcttagggt

SEQ ID NO: 5671 - protein, 431 aa, Homo sapiens; identical to SEQ ID NO: 5611

SEQ ID NO: 5672 - DNA, 2917 bp, Homo sapiens
ccggcgcagacctggggtggggtcggaaaagctgtttcatcgcccgctcccgggccctccgctccctccctccctccctctctccctggcaggactccccgccaggcctccccgccactctccgcggcgcattccgggaggcagcggccgcagcggcctcgccatgtcccagcccggccagaagcccgccgcctccccgcggccccggcgagcagccgccgcccgccgcacccatgagcatgtcagtgaaaaaaccagtgaatcgccttccaaaccaggagaaaagaaaggatcagatgagaaaaaagcagcaagcctcggcagcagtcaatcctccagaacctatgctggtggaacagcctcggccaccaaggtgtcagcttcctctggtgcaaccagcaagtcttccagtatgaatcccacagaaaccaaggctgtaaaaacagaacctgagaagaagtcacagtcaaccaagccaaaaagcctacccaagcaggcatcagatacaggaagtaacgatgctcacaataaaaaagcagtttccagatcagctgaacagcagccatcagagaaatcaacagaaccaaagactaaaccacaagacatgatttctgctggtggagagagtgttgctggtatcactgcaatatctggcaagccgggtgacaagaaaaaagaaaagaaatcattaaccccagctgtgccagttgaatctaaaccggataaaccatcgggaaagtcaggcatggatgctgctttggatgacttaatagatactttaggaggacctgaagaaactgaagaagaaaatacaacgtatactggaccagaagtttcagatccaatgagttccacctacatagaggaattgggtaaaagagaagtcacaattcctccaaaatatagggaactattggctaaaaaggaagggatcacagggcctcctgcagactcttcgaaacccatagggccagatgctcagtcagcagggacagtcagaagtgctgctccaccccaagagaagaaaagaaaggtggagaaggatacaatgagtgatcaagcactcgaggctctgtcggcttcactgggcacccggcaagcagaacctgagctcgacctccgctcaattaaggaagtcgatgagggaaggggagtctccctgacttccagcaacaatccttgagtctgggactgccctggcctaagatgggccagtttctatcttcgactttcttggagggctcaccggccacagtgtggcacgataagctttgtgacggtgaacgcagaggagcaagagaagcagttcgtatcttccaggaccaagcaaaagctaaagaagaaaaactagagaagtgtggtgaggatgatgaaacaatcccatctgagtacagattaaaaccagccacggataaagatggaaaaccactattgccagagcctgaagaaaaacccaagcctcggagtgaatcagaactcattgatgaactttcagaagattttgaccggtctgaatgtaaagagaaaccatctaagccaactgaaaagacagaagaatctaaggccgctgctccagctcctgtgtcggaggctgtgtgtcggacctccatgtgtagtatacagtcagcaccccctgagccggctaccttgaagggcacagtgccagatgatgctgtagaagccttggctgatagcctggggaaaaaggaagcagatccagaagatggaaaacctgtgatggataaagtcaaggagaaggccaaagaagaagaccgtgaaaagcttggtgaaaaagaagaaacaattcctcctgattatagattagaagaggtcaaggataaagatggaaagccactcctgccaaaagagtctaaggaacagcttccacccatgagtgaagacttccttctggatgctttgtctgaggacttctctggtccacaaaatgcttcatctcttaaatttgaagatgctaaacttgctgctgccatctctgaagtggtttcccaaaccccagcttcaacgacccaagctggagccccaccccgtgatacctcgcagagtgacaaagacctcgatgatgccttggataaactctctgacagtctaggacaaaggcagcctgacccagatgagaacaaaccaatggaagataaagtaaaggaaaaagctaaagctgaacatagagacaagcttggagaaagagatgacactatcccacctgaatacagacatctcctggatgataatggacaggacaaaccagtgaagccacctacaaagaaatcagaggattcaaagaaacctgcagatgaccaagaccccattgatgctctctcaggagatctggacagctgtccctccactacagaaacctcacagaacacagcaaaggataagtgcaagaaggctgcttccagctccaaagcacctaagaatggaggtaaagcgaaggattcagcaaagacaacagaggaaacttccaagccaaaagatgactaaagaaatacaagttaaggtatctggtatctgcatgtaaaatcttcagctggtggatggtgacttttgaagaacaaaaggctttggcaacagaaaacaattgttctgggtgatttctagaatggtttttgttgagtctctgaacatcctaaatattggtttgttattcttttccagaaagaaaatgaatttgactggttcacctgtgtactgagtattgataaactttgaatttttttaattgccttcaattgggagagaaagctttatatttgtgtgaggacttctgcatcttacagtcagcacagaacacactgagacttgaatcaagtcagcaacagagcaaaataaaggttagataagtccttgtgtagcaaatttcgagcataagaaataaaatctaattaattcttagggt

SEQ ID NO: 5673 - protein, 431 aa, Homo sapiens; identical to SEQ ID NO: 5611

SEQ ID NO: 5674 - DNA, 649 bp, Homo sapiens
tttcatcgcccgctcccgggccctccgctccctccctccctccctctctccctggcaggactccccgccaggcctccccgccactctccgcggcgcattccgggaggcagcggccgcagcggcctcgccatgtcccagcccggccagaagcccgccgcctccccgcggccccggcgagcagccgccgcccgccgcacccatgagcatgtcagtgaaaaaaccagtgaatcgccttccaaaccaggagaaaagaaaggatcagatgagaaaaaagcagcaagcctcggcagcagtcaatcctccagaacctatgctggtggaacagcctcggccaccaaggtgtcagcttcctctggtgcaaccagcaagtcttccagtatgaatcccacagaaaccaagctgtctgtggttcatgagaaaaaatcccaagaaggaaagccaaaagaacacacagagccaaaaagcctacccaagcaggcatcagatacaggaagtaacgatgctcacaataaaaaagcagtttccagatcagctgaacagcagccatcagagaaatcaacagaaccaaagactaaaccacaagacatgatttctgctggtggagagagtgttgctggtatcactgcaatatctggcaagccgggtgaca

SEQ ID NO: 5675 - protein, 172 aa, Homo sapiens
MSQPGQKPAASPRPRRAAAARRTHEHVSEKTSESPSKPGEKKGSDEKKAASLGSSQSSRTYAGGTASATKVSASSGATSKSSSMNPTETKLSVVHEKKSQEGKPKEHTEPKSLPKQASDTGSNDAHNKKAVSRSAEQQPSEKSTEPKTKPQDMISAGGESVAGITAISGKPG

SEQ ID NO: 5676 - DNA, 2898 bp, Homo sapiens
tttcatcgcccgctcccgggccctccgctccctccctccctccctctctccctggcaggactccccgccaggcctccccgccactctccgcggcgcattccgggaggcagcggccgcagcggcctcgccatgtcccagcccggccagaagcccgccgcctccccgcggccccggcgagcagccgccgcccgccgcacccatgagcatgtcagtgaaaaaaccagtgaatcgccttccaaaccaggagaaaagaaaggatcagatgagaaaaaagcagcaagcctcggcagcagtcaatcctccagaacctatgctggtggaacagcctcggccaccaaggtgtcagcttcctctggtgcaaccagcaagtcttccagtatgaatcccacagaaaccaagccaaaaagcctacccaagcaggcatcagatacaggaagtaacgatgctcacaataaaaaagcagtttccagatcagctgaacagcagccatcagagaaatcaacagaaccaaagactaaaccacaagacatgatttctgctggtggagagagtgttgctggtatcactgcaatatctggcaagccgggtgacaagaaaaaagaaaagaaatcattaaccccagctgtgccagttgaatctaaaccggataaaccatcgggaaagtcaggcatggatgctgctttggatgacttaatagatactttaggaggacctgaagaaactgaagaagaaaatacaacgtatactggaccagaagtttcagatccaatgagttccacctacatagaggaattgggtaaaagagaagtcacaattcctccaaaatatagggaactattggctaaacccatagggccagatgatgctatagacgccttgtcatctgacttcacctgtgggtcgcctacagctgctggaaagaaaactgaaaaagaggaatctacagaagttttaaaagctcagtcagcagggacagtcagaagtgctgctccaccccaagagaagaaaagaaaggtggagaaggatacaatgagtgatcaagcactcgaggctctgtcggcttcactgggcacccggcaagcagaacctgagctcgacctccgctcaattaaggaagtcgatgagggaaggggagtctccctgacttccagcaacaatccttgagtctgggactgccctggcctaagatgggccagtttctatcttcgactttcttggagggctcaccggccacagtgtggcacgataagctttgtgacggtgaacgcagaggagcaagagaagcagttcgtatcttccaggaccaagcaaaagctaaagaagaaaaactagagaagtgtggtgaggatgatgaaacaatcccatctgagtacagattaaaaccagccacggataaagatggaaaaccactattgccagagcctgaagaaaaacccaagcctcggagtgaatcagaactcattgatgaactttcagaagattttgaccggtctgaatgtaaagagaaaccatctaagccaactgaaaagacagaagaatctaaggccgctgctccagctcctgtgtcggaggctgtgtgtcggacctccatgtgtagtatacagtcagcaccccctgagccggctaccttgaagggcacagtgccagatgatgctgtagaagccttggctgatagcctggggaaaaaggaagcagatccagaagatggaaaacctgtgatggataaagtcaaggagaaggccaaagaagaagaccgtgaaaagcttggtgaaaaagaagaaacaattcctcctgattatagattagaagaggtcaaggataaagatggaaagccactcctgccaaaagagtctaaggaacagcttccacccatgagtgaagacttccttctggatgctttgtctgaggacttctctggtccacaaaatgcttcatctcttaaatttgaagatgctaaacttgctgctgccatctctgaagtggtttcccaaaccccagcttcaacgacccaagctggagccccaccccgtgatacctcgcagagtgacaaagacctcgatgatgccttggataaactctctgacagtctaggacaaaggcagcctgacccagatgagaacaaaccaatggaagataaagtaaaggaaaaagctaaagctgaacatagagacaagcttggagaaagagatgacactatcccacctgaatacagacatctcctggatgataatggacaggacaaaccagtgaagccacctacaaagaaatcagaggattcaaagaaacctgcagatgaccaagaccccattgatgctctctcaggagatctggacagctgtccctccactacagaaacctcacagaacacagcaaaggataagtgcaagaaggctgcttccagctccaaagcacctaagaatggaggtaaagcgaaggattcagcaaagacaacagaggaaacttccaagccaaaagatgactaaagaaatacaagttaaggtatctggtatctgcatgtaaaatcttcagctggtggatggtgacttttgaagaacaaaaggctttggcaacagaaaacaattgttctgggtgatttctagaatggtttttgttgagtctctgaacatcctaaatattggtttgttattcttttccagaaagaaaatgaatttgactggttcacctgtgtactgagtattgataaactttgaatttttttaattgccttcaattgggagagaaagctttatatttgtgtgaggacttctgcatcttacagtcagcacagaacacactgagacttgaatcaagtcagcaacagagcaaaataaaggttagataagtccttgtgtagcaaatttcgagcataagaaataaaatctaattaattcttagggt

SEQ ID NO: 5677 - protein, 431 aa, Homo sapiens; identical to SEQ ID NO: 5611

SEQ ID NO: 5678 - DNA, 2994 bp, Homo sapiens
tttcatcgcccgctcccgggccctccgctccctccctccctccctctctccctggcaggactccccgccaggcctccccgccactctccgcggcgcattccgggaggcagcggccgcagcggcctcgccatgtcccagcccggccagaagcccgccgcctccccgcggccccggcgagcagccgccgcccgccgcacccatgagcatgtcagtgaaaaaaccagtgaatcgccttccaaaccaggagaaaagaaaggatcagatgagaaaaaagcagcaagcctcggcagcagtcaatcctccagaacctatgctggtggaacagcctcggccaccaaggtgtcagcttcctctggtgcaaccagcaagtcttccagtatgaatcccacagaaaccaagctgtctgtggttcatgagaaaaaatcccaagaaggaaagccaaaagaacacacagagccaaaaagcctacccaagcaggcatcagatacaggaagtaacgatgctcacaataaaaaagcagtttccagatcagctgaacagcagccatcagagaaatcaacagaaccaaagactaaaccacaagacatgatttctgctggtggagagagtgttgctggtatcactgcaatatctggcaagccgggtgacaagaaaaaagaaaagaaatcattaaccccagctgtgccagttgaatctaaaccggataaaccatcgggaaagtcaggcatggatgctgctttggatgacttaatagatactttaggaggacctgaagaaactgaagaagaaaatacaacgtatactggaccagaagtttcagatccaatgagttccacctacatagaggaattgggtaaaagagaagtcacaattcctccaaaatatagggaactattggctaaaaaggaagggatcacagggcctcctgcagactcttcgaaacccatagggccagatgatgctatagacgccttgtcatctgacttcacctgtgggtcgcctacagctgctggaaagaaaactgaaaaagaggaatctacagaagttttaaaagctcagtcagcagggacagtcagaagtgctgctccaccccaagagaagaaaagaaaggtggagaaggatacaatgagtgatcaagcactcgaggctctgtcggcttcactgggcacccggcaagcagaacctgagctcgacctccgctcaattaaggaagtcgatgagggaaggggagtctccctgacttccagcaacaatccttgagtctgggactgccctggcctaagatgggccagtttctatcttcgactttcttggagggctcaccggccacagtgtggcacgataagctttgtgacggtgaacgcagaggagcaagagaagcagttcgtatcttccaggaccaagcaaaagctaaagaagaaaaactagagaagtgtggtgaggatgatgaaacaatcccatctgagtacagattaaaaccagccacggataaagatggaaaaccactattgccagagcctgaagaaaaacccaagcctcggagtgaatcagaactcattgatgaactttcagaagattttgaccggtctgaatgtaaagagaaaccatctaagccaactgaaaagacagaagaatctaaggccgctgctccagctcctgtgtcggaggctgtgtgtcggacctccatgtgtagtatacagtcagcaccccctgagccggctaccttgaagggcacagtgccagatgatgctgtagaagccttggctgatagcctggggaaaaaggaagcagatccagaagatggaaaacctgtgatggataaagtcaaggagaaggccaaagaagaagaccgtgaaaagcttggtgaaaaagaagaaacaattcctcctgattatagattagaagaggtcaaggataaagatggaaagccactcctgccaaaagagtctaaggaacagcttccacccatgagtgaagacttccttctggatgctttgtctgaggacttctctggtccacaaaatgcttcatctcttaaatttgaagatgctaaacttgctgctgccatctctgaagtggtttcccaaaccccagcttcaacgacccaagctggagccccaccccgtgatacctcgcagagtgacaaagacctcgatgatgccttggataaactctctgacagtctaggacaaaggcagcctgacccagatgagaacaaaccaatggaagataaagtaaaggaaaaagctaaagctgaacatagagacaagcttggagaaagagatgacactatcccacctgaatacagacatctcctggatgataatggacaggacaaaccagtgaagccacctacaaagaaatcagaggattcaaagaaacctgcagatgaccaagaccccattgatgctctctcaggagatctggacagctgtccctccactacagaaacctcacagaacacagcaaaggataagtgcaagaaggctgcttccagctccaaagcacctaagaatggaggtaaagcgaaggattcagcaaagacaacagaggaaacttccaagccaaaagatgactaaagaaatacaagttaaggtatctggtatctgcatgtaaaatcttcagctggtggatggtgacttttgaagaacaaaaggctttggcaacagaaaacaattgttctgggtgatttctagaatggtttttgttgagtctctgaacatcctaaatattggtttgttattcttttccagaaagaaaatgaatttgactggttcacctgtgtactgagtattgataaactttgaatttttttaattgccttcaattgggagagaaagctttatatttgtgtgaggacttctgcatcttacagtcagcacagaacacactgagacttgaatcaagtcagcaacagagcaaaataaaggttagataagtccttgtgtagcaaatttcgagcataagaaataaaatctaattaattcttagggt

SEQ ID NO: 5679 - protein, 431 aa, Homo sapiens; identical to SEQ ID NO: 5611

SEQ ID NO: 5680 - DNA, 2937 bp, Homo sapiens
tttcatcgcccgctcccgggccctccgctccctccctccctccctctctccctggcaggactccccgccaggcctccccgccactctccgcggcgcattccgggaggcagcggccgcagcggcctcgccatgtcccagcccggccagaagcccgccgcctccccgcggccccggcgagcagccgccgcccgccgcacccatgagcatgtcagtgaaaaaaccagtgaatcgccttccaaaccaggagaaaagaaaggatcagatgagaaaaaagcagcaagcctcggcagcagtcaatcctccagaacctatgctggtggaacagcctcggccaccaaggtgtcagcttcctctggtgcaaccagcaagtcttccagtatgaatcccacagaaaccaagccaaaaagcctacccaagcaggcatcagatacaggaagtaacgatgctcacaataaaaaagcagtttccagatcagctgaacagcagccatcagagaaatcaacagaaccaaagactaaaccacaagacatgatttctgctggtggagagagtgttgctggtatcactgcaatatctggcaagccgggtgacaagaaaaaagaaaagaaatcattaaccccagctgtgccagttgaatctaaaccggataaaccatcgggaaagtcaggcatggatgctgctttggatgacttaatagatactttaggaggacctgaagaaactgaagaagaaaatacaacgtatactggaccagaagtttcagatccaatgagttccacctacatagaggaattgggtaaaagagaagtcacaattcctccaaaatatagggaactattggctaaaaaggaagggatcacagggcctcctgcagactcttcgaaacccatagggccagatgatgctatagacgccttgtcatctgacttcacctgtgggtcgcctacagctgctggaaagaaaactgaaaaagaggaatctacagaagttttaaaagctcagtcagcagggacagtcagaagtgctgctccaccccaagagaagaaaagaaaggtggagaaggatacaatgagtgatcaagcactcgaggctctgtcggcttcactgggcacccggcaagcagaacctgagctcgacctccgctcaattaaggaagtcgatgagggaaggggagtctccctgacttccagcaacaatccttgagtctgggactgccctggcctaagatgggccagtttctatcttcgactttcttggagggctcaccggccacagtgtggcacgataagctttgtgacggtgaacgcagaggagcaagagaagcagttcgtatcttccaggaccaagcaaaagctaaagaagaaaaactagagaagtgtggtgaggatgatgaaacaatcccatctgagtacagattaaaaccagccacggataaagatggaaaaccactattgccagagcctgaagaaaaacccaagcctcggagtgaatcagaactcattgatgaactttcagaagattttgaccggtctgaatgtaaagagaaaccatctaagccaactgaaaagacagaagaatctaaggccgctgctccagctcctgtgtcggaggctgtgtgtcggacctccatgtgtagtatacagtcagcaccccctgagccggctaccttgaagggcacagtgccagatgatgctgtagaagccttggctgatagcctggggaaaaaggaagcagatccagaagatggaaaacctgtgatggataaagtcaaggagaaggccaaagaagaagaccgtgaaaagcttggtgaaaaagaagaaacaattcctcctgattatagattagaagaggtcaaggataaagatggaaagccactcctgccaaaagagtctaaggaacagcttccacccatgagtgaagacttccttctggatgctttgtctgaggacttctctggtccacaaaatgcttcatctcttaaatttgaagatgctaaacttgctgctgccatctctgaagtggtttcccaaaccccagcttcaacgacccaagctggagccccaccccgtgatacctcgcagagtgacaaagacctcgatgatgccttggataaactctctgacagtctaggacaaaggcagcctgacccagatgagaacaaaccaatggaagataaagtaaaggaaaaagctaaagctgaacatagagacaagcttggagaaagagatgacactatcccacctgaatacagacatctcctggatgataatggacaggacaaaccagtgaagccacctacaaagaaatcagaggattcaaagaaacctgcagatgaccaagaccccattgatgctctctcaggagatctggacagctgtccctccactacagaaacctcacagaacacagcaaaggataagtgcaagaaggctgcttccagctccaaagcacctaagaatggaggtaaagcgaaggattcagcaaagacaacagaggaaacttccaagccaaaagatgactaaagaaatacaagttaaggtatctggtatctgcatgtaaaatcttcagctggtggatggtgacttttgaagaacaaaaggctttggcaacagaaaacaattgttctgggtgatttctagaatggtttttgttgagtctctgaacatcctaaatattggtttgttattcttttccagaaagaaaatgaatttgactggttcacctgtgtactgagtattgataaactttgaatttttttaattgccttcaattgggagagaaagctttatatttgtgtgaggacttctgcatcttacagtcagcacagaacacactgagacttgaatcaagtcagcaacagagcaaaataaaggttagataagtccttgtgtagcaaatttcgagcataagaaataaaatctaattaattcttagggt

SEQ ID NO: 5681 - protein, 431 aa, Homo sapiens; identical to SEQ ID NO: 5611

SEQ ID NO: 5682 - DNA, 2955 bp, Homo sapiens
tttcatcgcccgctcccgggccctccgctccctccctccctccctctctccctggcaggactccccgccaggcctccccgccactctccgcggcgcattccgggaggcagcggccgcagcggcctcgccatgtcccagcccggccagaagcccgccgcctccccgcggccccggcgagcagccgccgcccgccgcacccatgagcatgtcagtgaaaaaaccagtgaatcgccttccaaaccaggagaaaagaaaggatcagatgagaaaaaagcagcaagcctcggcagcagtcaatcctccagaacctatgctggtggaacagcctcggccaccaaggtgtcagcttcctctggtgcaaccagcaagtcttccagtatgaatcccacagaaaccaagctgtctgtggttcatgagaaaaaatcccaagaaggaaagccaaaagaacacacagagccaaaaagcctacccaagcaggcatcagatacaggaagtaacgatgctcacaataaaaaagcagtttccagatcagctgaacagcagccatcagagaaatcaacagaaccaaagactaaaccacaagacatgatttctgctggtggagagagtgttgctggtatcactgcaatatctggcaagccgggtgacaagaaaaaagaaaagaaatcattaaccccagctgtgccagttgaatctaaaccggataaaccatcgggaaagtcaggcatggatgctgctttggatgacttaatagatactttaggaggacctgaagaaactgaagaagaaaatacaacgtatactggaccagaagtttcagatccaatgagttccacctacatagaggaattgggtaaaagagaagtcacaattcctccaaaatatagggaactattggctaaacccatagggccagatgatgctatagacgccttgtcatctgacttcacctgtgggtcgcctacagctgctggaaagaaaactgaaaaagaggaatctacagaagttttaaaagctcagtcagcagggacagtcagaagtgctgctccaccccaagagaagaaaagaaaggtggagaaggatacaatgagtgatcaagcactcgaggctctgtcggcttcactgggcacccggcaagcagaacctgagctcgacctccgctcaattaaggaagtcgatgagggaaggggagtctccctgacttccagcaacaatccttgagtctgggactgccctggcctaagatgggccagtttctatcttcgactttcttggagggctcaccggccacagtgtggcacgataagctttgtgacggtgaacgcagaggagcaagagaagcagttcgtatcttccaggaccaagcaaaagctaaagaagaaaaactagagaagtgtggtgaggatgatgaaacaatcccatctgagtacagattaaaaccagccacggataaagatggaaaaccactattgccagagcctgaagaaaaacccaagcctcggagtgaatcagaactcattgatgaactttcagaagattttgaccggtctgaatgtaaagagaaaccatctaagccaactgaaaagacagaagaatctaaggccgctgctccagctcctgtgtcggaggctgtgtgtcggacctccatgtgtagtatacagtcagcaccccctgagccggctaccttgaagggcacagtgccagatgatgctgtagaagccttggctgatagcctggggaaaaaggaagcagatccagaagatggaaaacctgtgatggataaagtcaaggagaaggccaaagaagaagaccgtgaaaagcttggtgaaaaagaagaaacaattcctcctgattatagattagaagaggtcaaggataaagatggaaagccactcctgccaaaagagtctaaggaacagcttccacccatgagtgaagacttccttctggatgctttgtctgaggacttctctggtccacaaaatgcttcatctcttaaatttgaagatgctaaacttgctgctgccatctctgaagtggtttcccaaaccccagcttcaacgacccaagctggagccccaccccgtgatacctcgcagagtgacaaagacctcgatgatgccttggataaactctctgacagtctaggacaaaggcagcctgacccagatgagaacaaaccaatggaagataaagtaaaggaaaaagctaaagctgaacatagagacaagcttggagaaagagatgacactatcccacctgaatacagacatctcctggatgataatggacaggacaaaccagtgaagccacctacaaagaaatcagaggattcaaagaaacctgcagatgaccaagaccccattgatgctctctcaggagatctggacagctgtccctccactacagaaacctcacagaacacagcaaaggataagtgcaagaaggctgcttccagctccaaagcacctaagaatggaggtaaagcgaaggattcagcaaagacaacagaggaaacttccaagccaaaagatgactaaagaaatacaagttaaggtatctggtatctgcatgtaaaatcttcagctggtggatggtgacttttgaagaacaaaaggctttggcaacagaaaacaattgttctgggtgatttctagaatggtttttgttgagtctctgaacatcctaaatattggtttgttattcttttccagaaagaaaatgaatttgactggttcacctgtgtactgagtattgataaactttgaatttttttaattgccttcaattgggagagaaagctttatatttgtgtgaggacttctgcatcttacagtcagcacagaacacactgagacttgaatcaagtcagcaacagagcaaaataaaggttagataagtccttgtgtagcaaatttcgagcataagaaataaaatctaattaattcttagggt

SEQ ID NO: 5683 - protein, 431 aa, Homo sapiens; identical to SEQ ID NO: 5611

SEQ ID NO: 5684 - DNA, 2898 bp, Homo sapiens
tttcatcgcccgctcccgggccctccgctccctccctccctccctctctccctggcaggactccccgccaggcctccccgccactctccgcggcgcattccgggaggcagcggccgcagcggcctcgccatgtcccagcccggccagaagcccgccgcctccccgcggccccggcgagcagccgccgcccgccgcacccatgagcatgtcagtgaaaaaaccagtgaatcgccttccaaaccaggagaaaagaaaggatcagatgagaaaaaagcagcaagcctcggcagcagtcaatcctccagaacctatgctggtggaacagcctcggccaccaaggtgtcagcttcctctggtgcaaccagcaagtcttccagtatgaatcccacagaaaccaagctgtctgtggttcatgagaaaaaatcccaagaaggaaagccaaaagaacacacagagccaaaaagcctacccaagcaggcatcagatacaggaagtaacgatgctcacaataaaaaagcagtttccagatcagctgaacagcagccatcagagaaatcaacagaaccaaagactaaaccacaagacatgatttctgctggtggagagagtgttgctggtatcactgcaatatctggcaagccgggtgacaagaaaaaagaaaagaaatcattaaccccagctgtgccagttgaatctaaaccggataaaccatcgggaaagtcaggcatggatgctgctttggatgacttaatagatactttaggaggacctgaagaaactgaagaagaaaatacaacgtatactggaccagaagtttcagatccaatgagttccacctacatagaggaattgggtaaaagagaagtcacaattcctccaaaatatagggaactattggctaaaaaggaagggatcacagggcctcctgcagactcttcgaaacccatagggccagatgctcagtcagcagggacagtcagaagtgctgctccaccccaagagaagaaaagaaaggtggagaaggatacaatgagtgatcaagcactcgaggctctgtcggcttcactgggcacccggcaagcagaacctgagctcgacctccgctcaattaaggaagtcgatgagggaaggggagtctccctgacttccagcaacaatccttgagtctgggactgccctggcctaagatgggccagtttctatcttcgactttcttggagggctcaccggccacagtgtggcacgataagctttgtgacggtgaacgcagaggagcaagagaagcagttcgtatcttccaggaccaagcaaaagctaaagaagaaaaactagagaagtgtggtgaggatgatgaaacaatcccatctgagtacagattaaaaccagccacggataaagatggaaaaccactattgccagagcctgaagaaaaacccaagcctcggagtgaatcagaactcattgatgaactttcagaagattttgaccggtctgaatgtaaagagaaaccatctaagccaactgaaaagacagaagaatctaaggccgctgctccagctcctgtgtcggaggctgtgtgtcggacctccatgtgtagtatacagtcagcaccccctgagccggctaccttgaagggcacagtgccagatgatgctgtagaagccttggctgatagcctggggaaaaaggaagcagatccagaagatggaaaacctgtgatggataaagtcaaggagaaggccaaagaagaagaccgtgaaaagcttggtgaaaaagaagaaacaattcctcctgattatagattagaagaggtcaaggataaagatggaaagccactcctgccaaaagagtctaaggaacagcttccacccatgagtgaagacttccttctggatgctttgtctgaggacttctctggtccacaaaatgcttcatctcttaaatttgaagatgctaaacttgctgctgccatctctgaagtggtttcccaaaccccagcttcaacgacccaagctggagccccaccccgtgatacctcgcagagtgacaaagacctcgatgatgccttggataaactctctgacagtctaggacaaaggcagcctgacccagatgagaacaaaccaatggaagataaagtaaaggaaaaagctaaagctgaacatagagacaagcttggagaaagagatgacactatcccacctgaatacagacatctcctggatgataatggacaggacaaaccagtgaagccacctacaaagaaatcagaggattcaaagaaacctgcagatgaccaagaccccattgatgctctctcaggagatctggacagctgtccctccactacagaaacctcacagaacacagcaaaggataagtgcaagaaggctgcttccagctccaaagcacctaagaatggaggtaaagcgaaggattcagcaaagacaacagaggaaacttccaagccaaaagatgactaaagaaatacaagttaaggtatctggtatctgcatgtaaaatcttcagctggtggatggtgacttttgaagaacaaaaggctttggcaacagaaaacaattgttctgggtgatttctagaatggtttttgttgagtctctgaacatcctaaatattggtttgttattcttttccagaaagaaaatgaatttgactggttcacctgtgtactgagtattgataaactttgaatttttttaattgccttcaattgggagagaaagctttatatttgtgtgaggacttctgcatcttacagtcagcacagaacacactgagacttgaatcaagtcagcaacagagcaaaataaaggttagataagtccttgtgtagcaaatttcgagcataagaaataaaatctaattaattcttagggt

SEQ ID NO: 5685 - protein, 431 aa, Homo sapiens; identical to SEQ ID NO: 5611

SEQ ID NO: 5686 - DNA, 2841 bp, Homo sapiens
tttcatcgcccgctcccgggccctccgctccctccctccctccctctctccctggcaggactccccgccaggcctccccgccactctccgcggcgcattccgggaggcagcggccgcagcggcctcgccatgtcccagcccggccagaagcccgccgcctccccgcggccccggcgagcagccgccgcccgccgcacccatgagcatgtcagtgaaaaaaccagtgaatcgccttccaaaccaggagaaaagaaaggatcagatgagaaaaaagcagcaagcctcggcagcagtcaatcctccagaacctatgctggtggaacagcctcggccaccaaggtgtcagcttcctctggtgcaaccagcaagtcttccagtatgaatcccacagaaaccaagccaaaaagcctacccaagcaggcatcagatacaggaagtaacgatgctcacaataaaaaagcagtttccagatcagctgaacagcagccatcagagaaatcaacagaaccaaagactaaaccacaagacatgatttctgctggtggagagagtgttgctggtatcactgcaatatctggcaagccgggtgacaagaaaaaagaaaagaaatcattaaccccagctgtgccagttgaatctaaaccggataaaccatcgggaaagtcaggcatggatgctgctttggatgacttaatagatactttaggaggacctgaagaaactgaagaagaaaatacaacgtatactggaccagaagtttcagatccaatgagttccacctacatagaggaattgggtaaaagagaagtcacaattcctccaaaatatagggaactattggctaaaaaggaagggatcacagggcctcctgcagactcttcgaaacccatagggccagatgctcagtcagcagggacagtcagaagtgctgctccaccccaagagaagaaaagaaaggtggagaaggatacaatgagtgatcaagcactcgaggctctgtcggcttcactgggcacccggcaagcagaacctgagctcgacctccgctcaattaaggaagtcgatgagggaaggggagtctccctgacttccagcaacaatccttgagtctgggactgccctggcctaagatgggccagtttctatcttcgactttcttggagggctcaccggccacagtgtggcacgataagctttgtgacggtgaacgcagaggagcaagagaagcagttcgtatcttccaggaccaagcaaaagctaaagaagaaaaactagagaagtgtggtgaggatgatgaaacaatcccatctgagtacagattaaaaccagccacggataaagatggaaaaccactattgccagagcctgaagaaaaacccaagcctcggagtgaatcagaactcattgatgaactttcagaagattttgaccggtctgaatgtaaagagaaaccatctaagccaactgaaaagacagaagaatctaaggccgctgctccagctcctgtgtcggaggctgtgtgtcggacctccatgtgtagtatacagtcagcaccccctgagccggctaccttgaagggcacagtgccagatgatgctgtagaagccttggctgatagcctggggaaaaaggaagcagatccagaagatggaaaacctgtgatggataaagtcaaggagaaggccaaagaagaagaccgtgaaaagcttggtgaaaaagaagaaacaattcctcctgattatagattagaagaggtcaaggataaagatggaaagccactcctgccaaaagagtctaaggaacagcttccacccatgagtgaagacttccttctggatgctttgtctgaggacttctctggtccacaaaatgcttcatctcttaaatttgaagatgctaaacttgctgctgccatctctgaagtggtttcccaaaccccagcttcaacgacccaagctggagccccaccccgtgatacctcgcagagtgacaaagacctcgatgatgccttggataaactctctgacagtctaggacaaaggcagcctgacccagatgagaacaaaccaatggaagataaagtaaaggaaaaagctaaagctgaacatagagacaagcttggagaaagagatgacactatcccacctgaatacagacatctcctggatgataatggacaggacaaaccagtgaagccacctacaaagaaatcagaggattcaaagaaacctgcagatgaccaagaccccattgatgctctctcaggagatctggacagctgtccctccactacagaaacctcacagaacacagcaaaggataagtgcaagaaggctgcttccagctccaaagcacctaagaatggaggtaaagcgaaggattcagcaaagacaacagaggaaacttccaagccaaaagatgactaaagaaatacaagttaaggtatctggtatctgcatgtaaaatcttcagctggtggatggtgacttttgaagaacaaaaggctttggcaacagaaaacaattgttctgggtgatttctagaatggtttttgttgagtctctgaacatcctaaatattggtttgttattcttttccagaaagaaaatgaatttgactggttcacctgtgtactgagtattgataaactttgaatttttttaattgccttcaattgggagagaaagctttatatttgtgtgaggacttctgcatcttacagtcagcacagaacacactgagacttgaatcaagtcagcaacagagcaaaataaaggttagataagtccttgtgtagcaaatttcgagcataagaaataaaatctaattaattcttagggt

SEQ ID NO: 5687 - protein, 431 aa, Homo sapiens; identical to SEQ ID NO: 5611

SEQ ID NO: 5688 - DNA, 3010 bp, Homo sapiens
gcccacctggcagccgccttgggatgtgcggagctcagtgccagcccggtcccggccaagcggagtgtgagcccggcgcctccaacgcaacaccccgcgccctcgccggctcccccgccgtgcggatcggagccagccggttgttgccatggcattcgccagctggtggtacaagacgcatgtcagtgaaaaaaccagtgaatcgccttccaaaccaggagaaaagaaaggatcagatgagaaaaaagcagcaagcctcggcagcagtcaatcctccagaacctatgctggtggaacagcctcggccaccaaggtgtcagcttcctctggtgcaaccagcaagtcttccagtatgaatcccacagaaaccaaggctgtaaaaacagaacctgagaagaagtcacagtcaaccaagctgtctgtggttcatgagaaaaaatcccaagaaggaaagccaaaagaacacacagagccaaaaagcctacccaagcaggcatcagatacaggaagtaacgatgctcacaataaaaaagcagtttccagatcagctgaacagcagccatcagagaaatcaacagaaccaaagactaaaccacaagacatgatttctgctggtggagagagtgttgctggtatcactgcaatatctggcaagccgggtgacaagaaaaaagaaaagaaatcattaaccccagctgtgccagttgaatctaaaccggataaaccatcgggaaagtcaggcatggatgctgctttggatgacttaatagatactttaggaggacctgaagaaactgaagaagaaaatacaacgtatactggaccagaagtttcagatccaatgagttccacctacatagaggaattgggtaaaagagaagtcacaattcctccaaaatatagggaactattggctaaaaaggaagggatcacagggcctcctgcagactcttcgaaacccatagggccagatgatgctatagacgccttgtcatctgacttcacctgtgggtcgcctacagctgctggaaagaaaactgaaaaagaggaatctacagaagttttaaaagctcagtcagcagggacagtcagaagtgctgctccaccccaagagaagaaaagaaaggtggagaaggatacaatgagtgatcaagcactcgaggctctgtcggcttcactgggcacccggcaagcagaacctgagctcgacctccgctcaattaaggaagtcgatgagggaaggggagtctccctgacttccagcaacaatccttgagtctgggactgccctggcctaagatgggccagtttctatcttcgactttcttggagggctcaccggccacagtgtggcacgataagctttgtgacggtgaacgcagaggagcaagagaagcagttcgtatcttccaggaccaagcaaaagctaaagaagaaaaactagagaagtgtggtgaggatgatgaaacaatcccatctgagtacagattaaaaccagccacggataaagatggaaaaccactattgccagagcctgaagaaaaacccaagcctcggagtgaatcagaactcattgatgaactttcagaagattttgaccggtctgaatgtaaagagaaaccatctaagccaactgaaaagacagaagaatctaaggccgctgctccagctcctgtgtcggaggctgtgtgtcggacctccatgtgtagtatacagtcagcaccccctgagccggctaccttgaagggcacagtgccagatgatgctgtagaagccttggctgatagcctggggaaaaaggaagcagatccagaagatggaaaacctgtgatggataaagtcaaggagaaggccaaagaagaagaccgtgaaaagcttggtgaaaaagaagaaacaattcctcctgattatagattagaagaggtcaaggataaagatggaaagccactcctgccaaaagagtctaaggaacagcttccacccatgagtgaagacttccttctggatgctttgtctgaggacttctctggtccacaaaatgcttcatctcttaaatttgaagatgctaaacttgctgctgccatctctgaagtggtttcccaaaccccagcttcaacgacccaagctggagccccaccccgtgatacctcgcagagtgacaaagacctcgatgatgccttggataaactctctgacagtctaggacaaaggcagcctgacccagatgagaacaaaccaatggaagataaagtaaaggaaaaagctaaagctgaacatagagacaagcttggagaaagagatgacactatcccacctgaatacagacatctcctggatgataatggacaggacaaaccagtgaagccacctacaaagaaatcagaggattcaaagaaacctgcagatgaccaagaccccattgatgctctctcaggagatctggacagctgtccctccactacagaaacctcacagaacacagcaaaggataagtgcaagaaggctgcttccagctccaaagcacctaagaatggaggtaaagcgaaggattcagcaaagacaacagaggaaacttccaagccaaaagatgactaaagaaatacaagttaaggtatctggtatctgcatgtaaaatcttcagctggtggatggtgacttttgaagaacaaaaggctttggcaacagaaaacaattgttctgggtgatttctagaatggtttttgttgagtctctgaacatcctaaatattggtttgttattcttttccagaaagaaaatgaatttgactggttcacctgtgtactgagtattgataaactttgaatttttttaattgccttcaattgggagagaaagctttatatttgtgtgaggacttctgcatcttacagtcagcacagaacacactgagacttgaatcaagtcagcaacagagcaaaataaaggttagataagtccttgtgtagcaaatttcgagcataagaaataaaatctaattaattcttagggt

SEQ ID NO: 5689 - protein, 431 aa, Homo sapiens; identical to SEQ ID NO: 5611

SEQ ID NO: 5690 - DNA, 2971 bp, Homo sapiens
gcccacctggcagccgccttgggatgtgcggagctcagtgccagcccggtcccggccaagcggagtgtgagcccggcgcctccaacgcaacaccccgcgccctcgccggctcccccgccgtgcggatcggagccagccggttgttgccatggcattcgccagctggtggtacaagacgcatgtcagtgaaaaaaccagtgaatcgccttccaaaccaggagaaaagaaaggatcagatgagaaaaaagcagcaagcctcggcagcagtcaatcctccagaacctatgctggtggaacagcctcggccaccaaggtgtcagcttcctctggtgcaaccagcaagtcttccagtatgaatcccacagaaaccaaggctgtaaaaacagaacctgagaagaagtcacagtcaaccaagctgtctgtggttcatgagaaaaaatcccaagaaggaaagccaaaagaacacacagagccaaaaagcctacccaagcaggcatcagatacaggaagtaacgatgctcacaataaaaaagcagtttccagatcagctgaacagcagccatcagagaaatcaacagaaccaaagactaaaccacaagacatgatttctgctggtggagagagtgttgctggtatcactgcaatatctggcaagccgggtgacaagaaaaaagaaaagaaatcattaaccccagctgtgccagttgaatctaaaccggataaaccatcgggaaagtcaggcatggatgctgctttggatgacttaatagatactttaggaggacctgaagaaactgaagaagaaaatacaacgtatactggaccagaagtttcagatccaatgagttccacctacatagaggaattgggtaaaagagaagtcacaattcctccaaaatatagggaactattggctaaacccatagggccagatgatgctatagacgccttgtcatctgacttcacctgtgggtcgcctacagctgctggaaagaaaactgaaaaagaggaatctacagaagttttaaaagctcagtcagcagggacagtcagaagtgctgctccaccccaagagaagaaaagaaaggtggagaaggatacaatgagtgatcaagcactcgaggctctgtcggcttcactgggcacccggcaagcagaacctgagctcgacctccgctcaattaaggaagtcgatgagggaaggggagtctccctgacttccagcaacaatccttgagtctgggactgccctggcctaagatgggccagtttctatcttcgactttcttggagggctcaccggccacagtgtggcacgataagctttgtgacggtgaacgcagaggagcaagagaagcagttcgtatcttccaggaccaagcaaaagctaaagaagaaaaactagagaagtgtggtgaggatgatgaaacaatcccatctgagtacagattaaaaccagccacggataaagatggaaaaccactattgccagagcctgaagaaaaacccaagcctcggagtgaatcagaactcattgatgaactttcagaagattttgaccggtctgaatgtaaagagaaaccatctaagccaactgaaaagacagaagaatctaaggccgctgctccagctcctgtgtcggaggctgtgtgtcggacctccatgtgtagtatacagtcagcaccccctgagccggctaccttgaagggcacagtgccagatgatgctgtagaagccttggctgatagcctggggaaaaaggaagcagatccagaagatggaaaacctgtgatggataaagtcaaggagaaggccaaagaagaagaccgtgaaaagcttggtgaaaaagaagaaacaattcctcctgattatagattagaagaggtcaaggataaagatggaaagccactcctgccaaaagagtctaaggaacagcttccacccatgagtgaagacttccttctggatgctttgtctgaggacttctctggtccacaaaatgcttcatctcttaaatttgaagatgctaaacttgctgctgccatctctgaagtggtttcccaaaccccagcttcaacgacccaagctggagccccaccccgtgatacctcgcagagtgacaaagacctcgatgatgccttggataaactctctgacagtctaggacaaaggcagcctgacccagatgagaacaaaccaatggaagataaagtaaaggaaaaagctaaagctgaacatagagacaagcttggagaaagagatgacactatcccacctgaatacagacatctcctggatgataatggacaggacaaaccagtgaagccacctacaaagaaatcagaggattcaaagaaacctgcagatgaccaagaccccattgatgctctctcaggagatctggacagctgtccctccactacagaaacctcacagaacacagcaaaggataagtgcaagaaggctgcttccagctccaaagcacctaagaatggaggtaaagcgaaggattcagcaaagacaacagaggaaacttccaagccaaaagatgactaaagaaatacaagttaaggtatctggtatctgcatgtaaaatcttcagctggtggatggtgacttttgaagaacaaaaggctttggcaacagaaaacaattgttctgggtgatttctagaatggtttttgttgagtctctgaacatcctaaatattggtttgttattcttttccagaaagaaaatgaatttgactggttcacctgtgtactgagtattgataaactttgaatttttttaattgccttcaattgggagagaaagctttatatttgtgtgaggacttctgcatcttacagtcagcacagaacacactgagacttgaatcaagtcagcaacagagcaaaataaaggttagataagtccttgtgtagcaaatttcgagcataagaaataaaatctaattaattcttagggt

SEQ ID NO: 5691 - protein, 431 aa, Homo sapiens; identical to SEQ ID NO: 5611

SEQ ID NO: 5692 - DNA, 2914 bp, Homo sapiens
gcccacctggcagccgccttgggatgtgcggagctcagtgccagcccggtcccggccaagcggagtgtgagcccggcgcctccaacgcaacaccccgcgccctcgccggctcccccgccgtgcggatcggagccagccggttgttgccatggcattcgccagctggtggtacaagacgcatgtcagtgaaaaaaccagtgaatcgccttccaaaccaggagaaaagaaaggatcagatgagaaaaaagcagcaagcctcggcagcagtcaatcctccagaacctatgctggtggaacagcctcggccaccaaggtgtcagcttcctctggtgcaaccagcaagtcttccagtatgaatcccacagaaaccaaggctgtaaaaacagaacctgagaagaagtcacagtcaaccaagctgtctgtggttcatgagaaaaaatcccaagaaggaaagccaaaagaacacacagagccaaaaagcctacccaagcaggcatcagatacaggaagtaacgatgctcacaataaaaaagcagtttccagatcagctgaacagcagccatcagagaaatcaacagaaccaaagactaaaccacaagacatgatttctgctggtggagagagtgttgctggtatcactgcaatatctggcaagccgggtgacaagaaaaaagaaaagaaatcattaaccccagctgtgccagttgaatctaaaccggataaaccatcgggaaagtcaggcatggatgctgctttggatgacttaatagatactttaggaggacctgaagaaactgaagaagaaaatacaacgtatactggaccagaagtttcagatccaatgagttccacctacatagaggaattgggtaaaagagaagtcacaattcctccaaaatatagggaactattggctaaaaaggaagggatcacagggcctcctgcagactcttcgaaacccatagggccagatgctcagtcagcagggacagtcagaagtgctgctccaccccaagagaagaaaagaaaggtggagaaggatacaatgagtgatcaagcactcgaggctctgtcggcttcactgggcacccggcaagcagaacctgagctcgacctccgctcaattaaggaagtcgatgagggaaggggagtctccctgacttccagcaacaatccttgagtctgggactgccctggcctaagatgggccagtttctatcttcgactttcttggagggctcaccggccacagtgtggcacgataagctttgtgacggtgaacgcagaggagcaagagaagcagttcgtatcttccaggaccaagcaaaagctaaagaagaaaaactagagaagtgtggtgaggatgatgaaacaatcccatctgagtacagattaaaaccagccacggataaagatggaaaaccactattgccagagcctgaagaaaaacccaagcctcggagtgaatcagaactcattgatgaactttcagaagattttgaccggtctgaatgtaaagagaaaccatctaagccaactgaaaagacagaagaatctaaggccgctgctccagctcctgtgtcggaggctgtgtgtcggacctccatgtgtagtatacagtcagcaccccctgagccggctaccttgaagggcacagtgccagatgatgctgtagaagccttggctgatagcctggggaaaaaggaagcagatccagaagatggaaaacctgtgatggataaagtcaaggagaaggccaaagaagaagaccgtgaaaagcttggtgaaaaagaagaaacaattcctcctgattatagattagaagaggtcaaggataaagatggaaagccactcctgccaaaagagtctaaggaacagcttccacccatgagtgaagacttccttctggatgctttgtctgaggacttctctggtccacaaaatgcttcatctcttaaatttgaagatgctaaacttgctgctgccatctctgaagtggtttcccaaaccccagcttcaacgacccaagctggagccccaccccgtgatacctcgcagagtgacaaagacctcgatgatgccttggataaactctctgacagtctaggacaaaggcagcctgacccagatgagaacaaaccaatggaagataaagtaaaggaaaaagctaaagctgaacatagagacaagcttggagaaagagatgacactatcccacctgaatacagacatctcctggatgataatggacaggacaaaccagtgaagccacctacaaagaaatcagaggattcaaagaaacctgcagatgaccaagaccccattgatgctctctcaggagatctggacagctgtccctccactacagaaacctcacagaacacagcaaaggataagtgcaagaaggctgcttccagctccaaagcacctaagaatggaggtaaagcgaaggattcagcaaagacaacagaggaaacttccaagccaaaagatgactaaagaaatacaagttaaggtatctggtatctgcatgtaaaatcttcagctggtggatggtgacttttgaagaacaaaaggctttggcaacagaaaacaattgttctgggtgatttctagaatggtttttgttgagtctctgaacatcctaaatattggtttgttattcttttccagaaagaaaatgaatttgactggttcacctgtgtactgagtattgataaactttgaatttttttaattgccttcaattgggagagaaagctttatatttgtgtgaggacttctgcatcttacagtcagcacagaacacactgagacttgaatcaagtcagcaacagagcaaaataaaggttagataagtccttgtgtagcaaatttcgagcataagaaataaaatctaattaattcttagggt

SEQ ID NO: 5693 - protein, 431 aa, Homo sapiens; identical to SEQ ID NO: 5611

SEQ ID NO: 5694 - DNA, 2929 bp, Homo sapiens
gcccacctggcagccgccttgggatgtgcggagctcagtgccagcccggtcccggccaagcggagtgtgagcccggcgcctccaacgcaacaccccgcgccctcgccggctcccccgccgtgcggatcggagccagccggttgttgccatggcattcgccagctggtggtacaagacgcatgtcagtgaaaaaaccagtgaatcgccttccaaaccaggagaaaagaaaggatcagatgagaaaaaagcagcaagcctcggcagcagtcaatcctccagaacctatgctggtggaacagcctcggccaccaaggtgtcagcttcctctggtgcaaccagcaagtcttccagtatgaatcccacagaaaccaaggctgtaaaaacagaacctgagaagaagtcacagtcaaccaagctgtctgtggttcatgagaaaaaatcccaagaaggaaagccaaaagaacacacagagccaaaaagcctacccaagcaggcatcagatacaggaagtaacgatgctcacaataaaaaagcagtttccagatcagctgaacagcagccatcagagaaatcaacagaaccaaagaaaaaagaaaagaaatcattaaccccagctgtgccagttgaatctaaaccggataaaccatcgggaaagtcaggcatggatgctgctttggatgacttaatagatactttaggaggacctgaagaaactgaagaagaaaatacaacgtatactggaccagaagtttcagatccaatgagttccacctacatagaggaattgggtaaaagagaagtcacaattcctccaaaatatagggaactattggctaaaaaggaagggatcacagggcctcctgcagactcttcgaaacccatagggccagatgatgctatagacgccttgtcatctgacttcacctgtgggtcgcctacagctgctggaaagaaaactgaaaaagaggaatctacagaagttttaaaagctcagtcagcagggacagtcagaagtgctgctccaccccaagagaagaaaagaaaggtggagaaggatacaatgagtgatcaagcactcgaggctctgtcggcttcactgggcacccggcaagcagaacctgagctcgacctccgctcaattaaggaagtcgatgagggaaggggagtctccctgacttccagcaacaatccttgagtctgggactgccctggcctaagatgggccagtttctatcttcgactttcttggagggctcaccggccacagtgtggcacgataagctttgtgacggtgaacgcagaggagcaagagaagcagttcgtatcttccaggaccaagcaaaagctaaagaagaaaaactagagaagtgtggtgaggatgatgaaacaatcccatctgagtacagattaaaaccagccacggataaagatggaaaaccactattgccagagcctgaagaaaaacccaagcctcggagtgaatcagaactcattgatgaactttcagaagattttgaccggtctgaatgtaaagagaaaccatctaagccaactgaaaagacagaagaatctaaggccgctgctccagctcctgtgtcggaggctgtgtgtcggacctccatgtgtagtatacagtcagcaccccctgagccggctaccttgaagggcacagtgccagatgatgctgtagaagccttggctgatagcctggggaaaaaggaagcagatccagaagatggaaaacctgtgatggataaagtcaaggagaaggccaaagaagaagaccgtgaaaagcttggtgaaaaagaagaaacaattcctcctgattatagattagaagaggtcaaggataaagatggaaagccactcctgccaaaagagtctaaggaacagcttccacccatgagtgaagacttccttctggatgctttgtctgaggacttctctggtccacaaaatgcttcatctcttaaatttgaagatgctaaacttgctgctgccatctctgaagtggtttcccaaaccccagcttcaacgacccaagctggagccccaccccgtgatacctcgcagagtgacaaagacctcgatgatgccttggataaactctctgacagtctaggacaaaggcagcctgacccagatgagaacaaaccaatggaagataaagtaaaggaaaaagctaaagctgaacatagagacaagcttggagaaagagatgacactatcccacctgaatacagacatctcctggatgataatggacaggacaaaccagtgaagccacctacaaagaaatcagaggattcaaagaaacctgcagatgaccaagaccccattgatgctctctcaggagatctggacagctgtccctccactacagaaacctcacagaacacagcaaaggataagtgcaagaaggctgcttccagctccaaagcacctaagaatggaggtaaagcgaaggattcagcaaagacaacagaggaaacttccaagccaaaagatgactaaagaaatacaagttaaggtatctggtatctgcatgtaaaatcttcagctggtggatggtgacttttgaagaacaaaaggctttggcaacagaaaacaattgttctgggtgatttctagaatggtttttgttgagtctctgaacatcctaaatattggtttgttattcttttccagaaagaaaatgaatttgactggttcacctgtgtactgagtattgataaactttgaatttttttaattgccttcaattgggagagaaagctttatatttgtgtgaggacttctgcatcttacagtcagcacagaacacactgagacttgaatcaagtcagcaacagagcaaaataaaggttagataagtccttgtgtagcaaatttcgagcataagaaataaaatctaattaattcttagggt

SEQ ID NO: 5695 - protein, 431 aa, Homo sapiens; identical to SEQ ID NO: 5611

SEQ ID NO: 5696 - DNA, 6216 bp, Homo sapiens
cctttcttcttattctttcttccctttcactaatttatcccgatgttagcacattctgtctcgttactagcggacgcctgtaggtttgctacatgggatcattactgatcacggtgactctgaagtctggaactgaaggcggaatgagaagttgggaaaacttttttctctaaactctctgttttttaaaaaactattattctcgatgcttgttaagaggaaaaaaaaacctttggtgcttctgttgtgaatgtgaaacattattttccagctgtacagtgacacattttttttaaggagaaaaggactgattcgtttgccaaaaggggggtggggaggtggaataatgttatcgagtgattattctggctgagatgtgttatttggtttcttccttcttgatcatttggtgtttaagtaaaatgaggcacaggcttgtttgccgagtggagtgggaaaggcattttgatttgctggcctaattaaaaaatgataaaggattaaaaggaaaaggtggacctggactgagggtgtaaaatccctggacacattcgtggggcaggaaaaagaagaggaagattagaagattttttttttctttgagagaaagcccagcggagataaacgaatgtcccctcatctccaaagaaaagttcatcggatttttattctagagagctcatcttcaggatgtcagtgaacatttctactgcaggaaaaggtgtggatccaaatacagttgatacttatgacagtggcgatgattgggaaatcggggttggaaatttaataattgatttggacgctgatttggagaaggacagacagaaatttgagatgaataattccaccaccaccactagtagcagcaactccaaggattgtggaggtccggcctccagtggggctggtgctaccgcagccttagctgatggcctaaaatttgcttctgttcaggcctctgctccccaggggaattcacacaaagagaccagcaaatcaaaagtgaaaaggagtaaaacttctaaggatgctaataaatctctgccttctgctgccttgtatgggattcccgagatcagcagcactggcaagaggcaggaagtccaagggcgccctggagaggcaactggcatgaattcagcgctgggtcaaagtgtgagcagcggcggcagcggcaacccaaacagcaatagtaccagcaccagcacctctgccgccaccgcgggggcaggctcctgtgggaaaagcaaagaggagaagccaggtaaaagccagagcagccgaggcgccaagcgggataaggatgcggggaaatccaggaaggacaagcacgacctgcttcagggccaccagaatggcagtggcagccaggccccttccggggggcacctctatggctttggggccaagagcaatggaggtggcgcgagccccttccactgcgggggcactgggagtggcagcgtcgccgctgcaggggaagttagcaaaagtgccccggattcagggctcatgggaaactctatgttggtaaagaaggaagaggaggaggaggagagccacaggcgaatcaagaaactgaaaactgagaaggttgaccccctgtttacagtgccagcgccaccaccgccgatttccagcagtctcacgcctcagattctaccctcctacttttccccatcttcatccaatattgcagcaccggttgaacagcttttggttcggactcgttctgtgggtgtcaatacatgtgaagttggagtagtgacagagccagagtgtcttgggccctgtgaacctgggaccagtgtgaatttggaagggatcgtgtggcatgaaacagaagaaggtgtcctagtggtcaatgtcacgtggaggaacaaaacgtacgtgggaaccctactggactgcaccaagcacgactgggcccctcccaggttttgtgagtcaccgacaagtgacctggagatgagagggggccggggcagagggaagagagcgaggtctgctgctgctgccccgggctccgaggccagcttcacagagtccagagggctgcagaataagaacagagggggggccaatgggaaagggaggcggggcagcctcaatgccagcggacgaaggacacccccaaattgtgctgctgaggatatcaaagccagcccttcctccaccaacaaaaggaaaaacaagcctccaatggagctggacctgaactccagctctgaggacaataagcctggaaagcgtgtccgcacaaattccagaagcactcccactacccctcaagggaaaccagagactacttttttggaccaaggctgctcttctccagtgttaatcgactgtccccacccaaactgcaacaaaaagtacaagcacattaacggcctgaggtaccaccaggctcatgcacacttagacccagaaaacaagctggagttcgagcctgacagtgaggacaagatctcggactgtgaggaaggattgagtaatgtggcacttgaatgcagtgagccaagcacaagtgtatctgcttatgaccagttgaaggcaccggcatcccctggtgctggaaacccacctgggaccccaaagggaaagagagagctgatgagcaatggcccaggttccattattggtgctaaagctgggaagaattctggcaaaaagaagggccttaacaatgaactgaacaaccttccagtaatctccaacatgacggctgcgttagacagttgctcggcagcagacggcagtttggctgctgagatgcctaaactggaagcagaaggattaattgacaagaaaaatttaggagataaagaaaagggcaaaaaagctaccaactgcaaaacggacaaaaacctctctaaactgaaaagtgcccggcccattgcccctgccccagcccccactcccccgcagctaatcgctatacccactgcaacctttacaacgaccaccactgggacaatacccggactgccctccctcacaacaactgttgttcaggctacaccaaagagtcctccgttaaaacccattcaaccaaagcccacaattatgggagagcccatcaccgtgaacccagctctggtgtcactcaaagacaaaaagaaaaaggagaagcgaaagctaaaggacaaagaagggaaagagacgggaagcccaaaaatggatgccaagctggggaaactagaggactccaagggggccagcaaagatttacctgggcattttttaaaggatcatctcaacaagaatgaagggctggcaaatggactgtcggagtctcaggagagccgcatggccagtatcaaagctgaggccgataaggtttacactttcacagacaacgctcccagcccttccatagggagcgcctcgaggctggaatgcagcactttggtgaacgggcaggcaccaatggcacctctgcatgtgttgacccagaatggggcagagagttcagctgcaaagacaagcagcccggcctattcagacatatctgatgctgctgacgatggtggttctgacagcaggtcggagggtatgagatcaaaggccagttccccatcagatattatttctagtaaggacagtgttgtaaaagggcattcttcaactacagcacaatcatctcaactgaaagagtcccattctccctattaccacagctatgatccttattattctccaagttacatgcaccctgggcaggtcggtgcccctgcagctggaaatagtgggagcacgcagggaatgaagatcaagaaggagtctgaggaagatgctgaaaagaaagacaaggcagagcagttagattctaagaaagtggaccacaattctgcatccttacagcctcagcaccagtcggtgatcacacaaagacatcctgccctggctcagtcactttattatggccagtatgcatatgggctctatatggaccagaagtctctgatggccaccagccctgcctatagacagcagtatgagaagtactatgaggaccagaggctggcagagcagaaaatggcccagactgggagaggagactgtgaaaggaaaagtgagctccccttgaaagagctgggcaaggaggaaactaaacagaaaaatatgccatcggccacaatctcaaaagctccctctactccggagcctaacaaaaaccattctaaactagggccatcagtgcctaataaaactgaggagacaggtaaatcgcagcttctctccaatcaccagcagcagcttcaggccgacagcttcaaagctaagcagatggaaaaccaccagcttattaaggaggctgtagaaatgaagtctgtcatggactctatgaagcagacaggtgtagacccaacctcgagatttaaacaagacccagattcaagaacatggcatcattatgtataccagcccaaatatctggatcagcaaaagtcagaagaacttgatagagagaagaaattaaaagaggatagtccgaggaaaactcctaataaagagagtggtgtgcccagccttcctgtatcgttaacaagcattaaagaggagcccaaagaggccaagcatcctgattctcaatcaatggaggagagcaagctgaaaaatgatgatcgaaagactcctgtgaactggaaggactctcggggaacaagagtggctgtctcctcacccatgagtcagcatcagtcatacatacagtacttgcatgcttatccttacccacagatgtacgaccccagccatcctgcataccgggctgtttctcccgtcctaatgcacagttatcctggggcatatctctctccaggatttcattatcctgtttatgggaagatgtcagggagagaagagacagagaaagtcaataccagccctagcgtcaacacgaaaacaaccactgaatctaaagcactggatttgctccagcagcatgctaaccaataccgcagcaagtctcctgctcctgtggaaaaggctacagctgagcgggaacgggaggcagaaagggaaagggatcgccactcccccttcggccagcggcacctgcacacgcaccaccacacccacgttggcatgggttacccgctaatcccgggtcaatatgacccttttcaaggcttgacctctgctgcccttgttgcctctcagcaggtggctgcccaggcatctgcatctggaatgtttcctggacaaagaagagaataacaagattggacatgtacattgtcatgtgactggatcacatggggaagcgctttatacagacatcagttccatggtgttaatttgaaatgccttaatggcaggcaaaaaccagtcatttcatttttgtaaattacagattttatcacagagtaacaaatgttgctgtaattaaacttctgttttatatatatatacgtatacatatctgtatatatacatatatatatatataaatataaatatattctttactttttgtatcagtaaccaggctcgcacacacagggtctgctgccacgtcgcaaaccactcagtaaaggaaattaaaaatgtatttgtcatgttaaaaagtgttagccacaaaaggctacttactttcttttccttttcctttaaaattgtaaataaataatgttatgtatcagtgtgcctgaaccttgcatatccttcacatatttcccataagcccctcagaaaggctaactgtgatgatgacactttggtacaatttagatgtctatttggtggctcctgttaaagacgcaccagtgtaaaatgttcctgtagtcactgtttgtacttgtgtattgtggaaaaagtacttttggaaggcatggggttgccagtaccacaaaaactgtgttgtatataatgtaaagattaaaatggggaaataatgagcatctgtgaataatgaggtgtcattttttgataatcttgaatggcaaataacccaatagcctgcgtaccagagacatctgtgattgttctattacttgaatagttctacagtctttttttttttttaatgtttacaattatccagttttagaagagagagactttaacgccattgcctggttacttgttttatgctgtaatctagtttattttatgtaaaatgtatattgaatgctttccttttttatacctgccttaaataatttggcaatcagaattaaaaagtttttttttttttaaataatg

SEQ ID NO: 5697 - protein, 1512 aa, Homo sapiens
MSVNISTAGKGVDPNTVDTYDSGDDWEIGVGNLIIDLDADLEKDRQKFEMNNSTTTTSSSNSKDCGGPASSGAGATAALADGLKFASVQASAPQGNSHKETSKSKVKRSKTSKDANKSLPSAALYGIPEISSTGKRQEVQGRPGEATGMNSALGQSVSSGGSGNPNSNSTSTSTSAATAGAGSCGKSKEEKPGKSQSSRGAKRDKDAGKSRKDKHDLLQGHQNGSGSQAPSGGHLYGFGAKSNGGGASPFHCGGTGSGSVAAAGEVSKSAPDSGLMGNSMLVKKEEEEEESHRRIKKLKTEKVDPLFTVPAPPPPISSSLTPQILPSYFSPSSSNIAAPVEQLLVRTRSVGVNTCEVGVVTEPECLGPCEPGTSVNLEGIVWHETEEGVLVVNVTWRNKTYVGTLLDCTKHDWAPPRFCESPTSDLEMRGGRGRGKRARSAAAAPGSEASFTESRGLQNKNRGGANGKGRRGSLNASGRRTPPNCAAEDIKASPSSTNKRKNKPPMELDLNSSSEDNKPGKRVRTNSRSTPTTPQGKPETTFLDQGCSSPVLIDCPHPNCNKKYKHINGLRYHQAHAHLDPENKLEFEPDSEDKISDCEEGLSNVALECSEPSTSVSAYDQLKAPASPGAGNPPGTPKGKRELMSNGPGSIIGAKAGKNSGKKKGLNNELNNLPVISNMTAALDSCSAADGSLAAEMPKLEAEGLIDKKNLGDKEKGKKATNCKTDKNLSKLKSARPIAPAPAPTPPQLIAIPTATFTTTTTGTIPGLPSLTTTVVQATPKSPPLKPIQPKPTIMGEPITVNPALVSLKDKKKKEKRKLKDKEGKETGSPKMDAKLGKLEDSKGASKDLPGHFLKDHLNKNEGLANGLSESQESRMASIKAEADKVYTFTDNAPSPSIGSASRLECSTLVNGQAPMAPLHVLTQNGAESSAAKTSSPAYSDISDAADDGGSDSRSEGMRSKASSPSDIISSKDSVVKGHSSTTAQSSQLKESHSPYYHSYDPYYSPSYMHPGQVGAPAAGNSGSTQGMKIKKESEEDAEKKDKAEQLDSKKVDHNSASLQPQHQSVITQRHPALAQSLYYGQYAYGLYMDQKSLMATSPAYRQQYEKYYEDQRLAEQKMAQTGRGDCERKSELPLKELGKEETKQKNMPSATISKAPSTPEPNKNHSKLGPSVPNKTEETGKSQLLSNHQQQLQADSFKAKQMENHQLIKEAVEMKSVMDSMKQTGVDPTSRFKQDPDSRTWHHYVYQPKYLDQQKSEELDREKKLKEDSPRKTPNKESGVPSLPVSLTSIKEEPKEAKHPDSQSMEESKLKNDDRKTPVNWKDSRGTRVAVSSPMSQHQSYIQYLHAYPYPQMYDPSHPAYRAVSPVLMHSYPGAYLSPGFHYPVYGKMSGREETEKVNTSPSVNTKTTTESKALDLLQQHANQYRSKSPAPVEKATAEREREAERERDRHSPFGQRHLHTHHHTHVGMGYPLIPGQYDPFQGLTSAALVASQQVAAQASASGMFPGQRRE

SEQ ID NO: 5698 - DNA, 1139 bp, Homo sapiens
aaaaggtgattatccttgtgttgttgataaagggattttctttttagctaccgtaagatgcttactgtcataggtttatttttcgggtttggttattttcctttaaacctgatattggactgtgaggacaatacatgagccaccttactctccatccttccctgtcccctttactgattccccaatactaatcgttttttattctggtaacacccagacaagaaatattcgacttttcccccccccttcacaggaaaaggtggacctggactgagggtgtaaaatccctggacacattcgtggggcaggaaaaagaagaggaagattagaagattttttttttctttgagagaaagcccagcggagataaacgaatgtcccctcatctccaaagaaaagttcatcggatttttattctagagagctcatcttcaggatgtcagtgaacatttctactgcaggaaaaggtgtggatccaaatacagttgatacttatgacagtggcgatgattgggaaatcggggttggaaatttaataattgatttggacgctgatttggagaaggacagacagaaatttgagatgaataattccaccaccaccactagtagcagcaactccaaggattgtggaggtccggcctccagtggggctggtgctaccgcagccttagctgatggcctaaaatttgcttctgttcaggcctctgctccccaggggaattcacacaaagagaccagcaaatcaaaagtgaaaaggagtaaaacttctaaggatgctaataaatctctgccttctgctgccttgtatgggattcccgagatcagcagcactggcaagaggcaggaagtccaagggcgccctggagaggcaactggcatgaattcagcgctgggtcaaagtgtgagcagcggcggcagcggcaacccaaacagcaatagtaccagcaccagcacctctgccgccaccgcgggggcaggctcctgtgggaaaagcaaagaggagaagccaggtaaaagccagagcagccgagcgtgcaccgagggagccgagcagcgcaggcggccctctagccccgcacggccagcgcgccgtgggggatgcgtccctttgcctccgccacgctcacctctacccg

SEQ ID NO: 5699 - protein, 233 aa, Homo sapiens
MSVNISTAGKGVDPNTVDTYDSGDDWEIGVGNLIIDLDADLEKDRQKFEMNNSTTTTSSSNSKDCGGPASSGAGATAALADGLKFASVQASAPQGNSHKETSKSKVKRSKTSKDANKSLPSAALYGIPEISSTGKRQEVQGRPGEATGMNSALGQSVSSGGSGNPNSNSTSTSTSAATAGAGSCGKSKEEKPGKSQSSRACTEGAEQRRRPSSPARPARRGGCVPLPPPRSPL

SEQ ID NO: 5700 - DNA, 827 bp, Homo sapiens
ccccacctttggcacattgtggcacctggcaaaaacttgttggatgaaggaatgacttccccaacagttgaccccctgtttacagtgccagcgccaccaccgccgatttccagcagtctcacgcctcagattctaccctcctacttttccccatcttcatccaatattgcagcaccggttgaacagcttttggttcggactcgttctgtgggtgtcaatacatgtgaagttggagtagtgacagagccagagtgtcttgggccctgtgaacctgggaccagtgtgaatttggaagggatcgtgtggcatgaaacagaagaagtatttcagctagtacaagggaagtgcctattagaagcaatgggccgcttgaggacatggattgcatccagtagtggcgcattcaccaaaaggcagatgaaaataatctgtaccaacaaggatcacaacaggaaacatcatctgaattttccactattgacaatcttgactatctagcctgggatttgcattgccaagcaacacgttaaataattttgtatctctttgaaatcaatttctggtgatcacacatgcagattgaaaactatggctttaagatttacgttcagtgaataaaatttacgttccctgaaaggcaaagaaggctgtcatttcatgcctcctaaccttcattgtctatttccctttggtacacacaagcaacctagtacgcacaaacgtacatgcccattatggagagatagctttctgctctgtcaactttgttttataaaagctctgttttctttattgcctttatctattacatctgtaaaatttatttt

SEQ ID NO: 5701 - protein, 148 aa, Homo sapiens
MTSPTVDPLFTVPAPPPPISSSLTPQILPSYFSPSSSNIAAPVEQLLVRTRSVGVNTCEVGVVTEPECLGPCEPGTSVNLEGIVWHETEEVFQLVQGKCLLEAMGRLRTWIASSSGAFTKRQMKIICTNKDHNRKHHLNFPLLTILTI

SEQ ID NO: 5702 - DNA, 828 bp, Homo sapiens
attgaggctgaatttccatccctaaaggacaaacctgtaacaactgaattttggtcacttctaattctgccttttcgtaaatgtgatggagacaactcttcctttcagaaccatgatcaaagcaatttacgctttgcagcttgctgagaaaacaacatgggcaaattctcacaaagggtctaaggtatgaagaccaaccctgccctcaagtgctgttcaggcttagcagctgatctggttgaaatcagggaaaggttagaagtctctcatccttatgcttctggatgcagacatgattttaagaagaaagaaaggcaggaagaaaggaaagaaaagcccattttggaaaccaccgtattccgatttctctcagcttaacatcagtcatttttcttaccttcttttagggaatctcacttgcaaccacctaaaaggagtattttcaactaaaattttacacatttgaattacaaactcaaaacatgctggtcataacaaattaaatgacaaggaagtgcctgagtcacactgtatgggagctatgtggtgtataaagctatgcggtgagctgagatccatgtaaagggaaggccacagaagcacccaaagcatcgtgggtcggctacagaagaagacaattttgactccctgtacaggacactatcttggtaccactcactttcctccctgcaaaatctgaatattgctcacatatattcaacatatgtccaagaagcttcttatgtatgtctcctgcctcttctttccatacctcccaaatgttgatccaaaacactgatcaattttaataaattaagcaaagttttg

SEQ ID NO: 5703 - protein, 63 aa, Homo sapiens
MKTNPALKCCSGLAADLVEIRERLEVSHPYASGCRHDFKKKERQEERKEKPILETTVFRFLSA

SEQ ID NO: 5704 - DNA, 397 bp, Homo sapiens
attcccagcaatggtggaacatgaattgcctgtagtttctacaatttaatactgtgagttataattttctggctttaatctgtgctaatctgatagtaatctattattttaatttgcatttttcatgggtacaagccattgtatttattttcctaaatattgataatttataacctttgattatctagtgagttgttggccatttcttattttaaagtatttcagtgtataataattaaatatataattttttcatgtgttttgcaaatttttttatgtgctttgcaaatattttttcccatctcttcatttgtcgtttgattctgtttatgctgttcctcccctgcactccagcctgggaaacacagaaagaccttgtctcaaaaaaaaaaaaaaa

SEQ ID NO: 5705 - protein, 46 aa, Homo sapiens
MCFANFFMCFANIFSHLFICRLILFMLFLPCTPAWETQKDLVSKKK

SEQ ID NO: 5706 - DNA, 1338 bp, Homo sapiens
aagtgctctcctgacccgccgctgtgcagcgcagcgcaccgcgggaagatggcgttggaggtcggcgatatggaagatgggcagctttccgactcggattccgacatgacggtcgcacccagcgacaggccgctgcaattgccaaaagtgctaggtggcgacagtgctatgagggccttccagaacacggcaactgcatgtgcaccagtatcacattatcgagctgttgaaagtgtggattcaagtgaagaaagtttttctgattcagatgatgatagctgtctttggaaacgcaaacgacagaaatgttttaaccctcctcccaaaccagagccttttcagtttggccagagcagtcagaaaccacctgttgctggaggaaagaagattaacaacatatggggtgctgtgctgcaggaacagaatcaagatgcagtggccactgaacttggtatcttgggaatggagggcactattgacagaagcagacaatccgagacctacaattatttgcttgccaagaaacttaggaaggaatctcaagagcatacaaaagatctagacaaggaactagatgaatatatgcatggtggcaaaaaaatgggatcaaaggaagaggaaaatgggcaaggtcatctcaaaaggaaacgacctgtcaaagacaggctagggaacagaccagaaatgaactataaaggtcgatacgagatcacagcggaagattctcaagagaaagtggctgatgaaatttcattcaggttacaggaaccaaagaaagacctgatagcccgagtagtgaggattattggtaacaaaaaggcaattgaacttctgatggaaaccgctgaagttgaacaaaatggtggtctctttataatgaatggtagtcgaagaagaacaccaggtggagtttttctgaatctcttgaaaaacactcctagtatcagcgaggaacaaattaaggacattttctacattgaaaaccaaaaggaatatgaaaataaaaaagctgctaggaagaggagaacacaagtgttggggaaaaagatgaaacaagctattaaaagtctaaattttcaagaagatgatgatacatcacgagaaacttttgcaagtgacacgaatgaggccttggcctctcttgatgagtcacaggaaggacatgcagaagccaagttggaggcagaggaagccattgaagttgatcattctcatgatttggacatcttttaagtacattttcaacagtttgaggactaagcctttctaaaataacattgtaataaaccatttttactgagattgcaacgttttgcactgataaacatgagaatctgg

SEQ ID NO: 5707 - protein, 394 aa, Homo sapiens; identical to SEQ ID NO: 660

SEQ ID NO: 5708 - DNA, 1640 bp, Homo sapiens
aagtgctctcctgacccgccgctgtgcagcgcagcgcaccgcgggaagatggcgttggaggtcggcgatatggaagatgggcagctttccgactcggattccgacatgacggtcgcacccagcgacaggccgctgcaattgccaaaagtgctaggtggcgacagtgctatgagggccttccagaacacggcaactgcatgtgcaccagtatcacattatcgagctgttgaaagtgtggattcaagtgaagaaagtttttctgattcagatgatgatagctgtctttggaaacgcaaacgacagaaatgttttaaccctcctcccaaaccagagccttttcagtttggccagagcagtcagaaaccacctgttgctggaggaaagaagattaacaacatatggggtgctgtgctgcaggaacagaatcaagatgcagtggccactgaacttggtatcttgggaatggagggcactattgacagaagcagacaatccgagacctacaattatttgcttgccaagaaacttaggaaggaatctcaagagcatacaaaagatctagacaaggaactagatgaatatatgcatggtggcaaaaaaatgggatcaaaggaagaggaaaatgggcaaggtcatctcaaaaggaaacgacctgtcaaagacaggctagggaacagaccagaaatgaactataaaggtcgatacgagatcacagcggaagattctcaagagaaagtggctgatgaaatttcattcaggttacaggaaccaaagaaagacctgatagcccgagtagtgaggattattggtaacaaaaaggcaattgaacttctgatggaaaccgctgaagttgaacaaaatggtggtctctttataatgaatggtagtcgaagaagaacaccaggtggagtttttctgaatctcttgaaaaacactcctagtatcagcgaggaacaaattaaggacattttctacattgaaaaccaaaaggaatatgaaaataaaaaagctgctaggaagaggagaacacaagtgttggggaaaaagatgaaacaagctattaaaagtctaaattttcaagaagatgatgatacatcacgagaaacttttgcaagtgacacgaatgaggccttggcctctcttgatgagtcacaggaaggacatgcagaagccaagttggaggcagaggaagccattgaagttgatcattctcatgatttggacatcttttaagtacattttcaacagtttgaggactaagcctttctaaaataacattgtaataaaccatttttactgagattgcaacgttttgcactgataaacatgagaatctggaggaaagacaattgttttcttgtttaaaatatgtgtggaaaggaatgcaattgatagaacatttaaagatatatctgacaaaatacttaagagtatatagcacaggatttaatttctcaatctgttgcatgtgctaattatgagtattactagttgataatcagttttgtctaggtcataacataccatttgtaagtttgtttgctttttcaggtttatctttgcagtgaattatgctttgctttaaaacattccgctaaaatcataatgggacatataaattattaagctgttagaaatgc

SEQ ID NO: 5709 - protein, 394 aa, Homo sapiens; identical to SEQ ID NO: 660

SEQ ID NO: 5710 - DNA, 3414 bp, Homo sapiens
aagtgctctcctgacccgccgctgtgcagcgcagcgcaccgcgggaagatggcgttggaggtcggcgatatggaagatgggcagctttccgactcggattccgacatgacggtcgcacccagcgacaggccgctgcaattgccaaaagtgctaggtggcgacagtgctatgagggccttccagaacacggcaactgcatgtgcaccagtatcacattatcgagctgttgaaagtgtggattcaagtgaagaaagtttttctgattcagatgatgatagctgtctttggaaacgcaaacgacagaaatgttttaaccctcctcccaaaccagagccttttcagtttggccagagcagtcagaaaccacctgttgctggaggaaagaagattaacaacatatggggtgctgtgctgcaggaacagaatcaagatgcagtggccactgaacttggtatcttgggaatggagggcactattgacagaagcagacaatccgagacctacaattatttgcttgccaagaaacttaggaaggaatctcaagagcatacaaaagatctagacaaggaactagatgaatatatgcatggtggcaaaaaaatgggatcaaaggaagaggaaaatgggcaaggtcatctcaaaaggaaacgacctgtcaaagacaggctagggaacagaccagaaatgaactataaaggtcgatacgagatcacagcggaagattctcaagagaaagtggctgatgaaatttcattcaggttacaggaaccaaagaaagacctgatagcccgagtagtgaggattattggtaacaaaaaggcaattgaacttctgatggaaaccgctgaagttgaacaaaatggtggtctctttataatgaatggtagtcgaagaagaacaccaggtggagtttttctgaatctcttgaaaaacactcctagtatcagcgaggaacaaattaaggacattttctacattgaaaaccaaaaggaatatgaaaataaaaaagctgctaggaagaggagaacacaagtgttggggaaaaagatgaaacaagctattaaaagtctaaattttcaagaagatgatgatacatcacgagaaacttttgcaagtgacacgaatgaggccttggcctctcttgatgagtcacaggaaggacatgcagaagccaagttggaggcagaggaagccattgaagttgatcattctcatgatttggacatcttttaagtacattttcaacagtttgaggactaagcctttctaaaataacattgtaataaaccatttttactgagattgcaacgttttgcactgataaacatgagaatctggaggaaagacaattgttttcttgtttaaaatatgtgtggaaaggaatgcaattgatagaacatttaaagatatatctgacaaaatacttaagagtatatagcacaggatttaatttctcaatctgttgcatgtgctaattatgagtattactagttgataatcagttttgtctaggtcataacataccatttgtaagtttgtttgctttttcaggtttatctttgcagtgaattatgctttgctttaaaacattccgctaaaatcataatgggacatataaattattaagctgttagaaatgcattcaaatttgttttttctgtgttctaagaactcaggcaattttaaggataaaaactaacattggccaggcacggtggctcacgcctgtaatcccaacactttaggagaccaaggcgggcagatcacttgaggtcagaagtttgagaccagccaggccaacatggtgaaacttcatctctactaaaaatacaaaaactagccaggtgtggttctccatgcctataatcccggctactcgggaggctgaggcaggagaatcacctgaacccgggagtacagtggcaggatctcagcttactgcagcttccatctcccaggttcaagcgatcatgtgcctaagcctcctgagtagctgggatcacaggtgtgtaccaccacgcccagctgatttttgtatttttagtaaagactttcgccatgttgtccaggctggtctcgaactcctggcctaatgatctgcccacctctgcctcccaaagtgctgggatcacaggcatgagccaccgaacccagccttattctgcttaaatttaacgtgttttttgacttcttaattaacttggtcatatactaaatgtgatctcctgtggattaccacatgcattaaaaaatttttcaagctgggcctagtggcgcacacctgcaatcccaacactttgggaggccaagagaggaagattgcttgagcccaggagtttgagaccaatctaggcaatgtagtgagaccctgtctctaatttaaaaaagaaaaagaaaaaaacattcccagtggcagcctgcctaagactgtcttaccttatgttaaggaagtcaggtatttaaaatgttacatatgccggcgcagtggctcatgtgtgtaatcccagcactctgggaggctgagacaggtagatcatttgaggtcaggagttcaaaaccaacctggtctacatggtgaaaccccatctcaactaaaaatacaaaaaatacaaaaaattagccgggcgcggtggctcacacctgtaatcccagcactttgggaggtggaggcgggtggatcacaaggtcaagagatcgagaccatcctggccaacatggtgaaaccctgtctctattaaaaatacaaaaattagctgggcgtggtggcgcatgcctgtagtcccaactactagggaggctgaggcaggagaatcacttgaacccaggaggtggaggttgcagtgagccgagatcacgccactgcactccagcctggcgacagagcgagactccctctcaaaaaaaaaaaaaaaaatacaaaaaattagccgggcattgtggtgcatgcctgtaatctcagctatttgggaggccgaggcaggagaatcacttgaacccaggaggcagaggttgcagtgagtcgagatcgtgccactgcactccagcctgggtgacagagcaagactttgtctcaaaaataataatagtaaaatgttacatgtgcatgaagttttaaattactcatttttattaatgaagaaaataaggtagtttagacattccaagagttaactatagtttacaaaaatatattaagcaaaaatatgcttgatatattaagcagaaatgttgtatattaagcaaaaatgtaaaattcagcaattataaactgttccttacagacagtgtacttgaagtcttttggtagttctgagaatgtggtcattgaagttggatctaagaggaaagtggttatcggttgctttttatttataaaggatgcaaaaataaaattagatttttggcagtccttaa

SEQ ID NO: 5711 - protein, 394 aa, Homo sapiens; identical to SEQ ID NO: 660

SEQ ID NO: 5712 - DNA, 684 bp, Homo sapiens
gtggcgacagtgctatgagggccttccagaacacggcaactgcatgtgcaccagtatcacattatcgagctgttgaaagtgtggattcaagtgaagaaagtttttctgattcagatgatgatagctgtctttggaaacgcaaacgacagaaatgttttaaccctcctcccaaaccagagccttttcagtttggccagagcagtcagaaaccacctgttgctggaggaaagaagattaacaacatatggggtgctgtgctgcaggaacagaatcaagatgcagtggccactgaacttggtatcttgggaatggagggcatccagcctgggtgacagagcaagactttgtctcaaaaataataatagtaaaatgttacatgtgcatgaagttttaaattactcatttttattaatgaagaaaataaggtagtttagacattccaagagttaactatagtttacaaaaatatattaagcaaaaatatgcttgatatattaagcagaaatgttgtatattaagcaaaaatgtaaaattcagcaattataaactgttccttacagacagtgtacttgaagtcttttggtagttctgagaatgtggtcattgaagttggatctaagaggaaagtggttatcggttgctttttatttataaaggatgcaaaaataaaattagatttttggc

SEQ ID NO: 5713 - protein, 105 aa, Homo sapiens
MRAFQNTATACAPVSHYRAVESVDSSEESFSDSDDDSCLWKRKRQKCFNPPPKPEPFQFGQSSQKPPVAGGKKINNIWGAVLQEQNQDAVATELGILGMEGIQPG

SEQ ID NO: 5714 - DNA, 1895 bp, Homo sapiens
agatgatgatacatcacgagaaacttttgcaagtgacacgaatgaggccttggcctctcttgatgagtcacaggaaggacatgcagaagccaagttggaggcagaggaagccattgaagttgatcattctcatgatttggacatcttttaagtacattttcaacagtttgaggactaagcctttctaaaataacattgtaataaaccatttttactgagattgcaacgttttgcactgataaacatgagaatctggaggaaagacaattgttttcttgtttaaaatatgtgtggaaaggaatgcaattgatagaacatttaaagatatatctgacaaaatacttaagagtatatagcacaggatttaatttctcaatctgttgcatgtgctaattatgagtattactagttgataatcagttttgtctaggtcataacataccatttgtaagtttgtttgctttttcaggtttatctttgcagtgaattatgctttgctttaaaacattccgctaaaatcataatgggacatataaattattaagctgttagaaatgcattcaaatttgttttttctgtgttctaagaactcaggcaattttaaggataaaaaaggcatgagccaccgaacccagccttattctgcttaaatttaacgtgttttttgacttcttaattaacttggtcatatactaaatgtgatctcctgtggattaccacatgcattaaaaaatttttcaagctgggcctagtggcgcacacctgcaatcccaacactttgggaggccaagagaggaagattgcttgagcccaggagtttgagaccaatctaggcaatgtagtgagaccctgtctctaatttaaaaaagaaaaagaaaaaaacattcccagtggcagcctgcctaagactgtcttaccttatgttaaggaagtcaggtatttaaaatgttacatatgccggcgcagtggctcatgtgtgtaatcccagcactctgggaggctgagacaggtagatcatttgaggtcaggagttcaaaaccaacctggtctacatggtgaaaccccatctcaactaaaaatacaaaaaatacaaaaaattagccgggcgcggtggctcacacctgtaatcccagcactttgggaggtggaggcgggtggatcacaaggtcaagagatcgagaccatcctggccaacatggtgaaaccctgtctctattaaaaatacaaaaattagctgggcgtggtggcgcatgcctgtagtcccaactactagggaggctgaggcaggagaatcacttgaacccaggaggtggaggttgcagtgagccgagatcacgccactgcactccagcctggcgacagagcgagactccctctcaaaaaaaaaaaaaaaaatacaaaaaattagccgggcattgtggtgcatgcctgtaatctcagctatttgggaggccgaggcaggagaatcacttgaacccaggaggcagaggttgcagtgagtcgagatcgtgccactgcactccagcctgggtgacagagcaagactttgtctcaaaaataataatagtaaaatgttacatgtgcatgaagttttaaattactcatttttattaatgaagaaaataaggtagtttagacattccaagagttaactatagtttacaaaaatatattaagcaaaaatatgcttgatatattaagcagaaatgttgtatattaagcaaaaatgtaaaattcagcaattataaactgttccttacagacagtgtacttgaagtcttttggtagttctgagaatgtggtcattgaagttggatctaagaggaaagtggttatcggttgctttttatttataaaggatgcaaaaataaaattagatttttggcagtccttaa

SEQ ID NO: 5715 - protein, 31 aa, Homo sapiens
MHSNLFFLCSKNSGNFKDKKGMSHRTQPYSA

SEQ ID NO: 5716 - DNA, 1925 bp, Homo sapiens
tttgcaagtgacacgaatgaggccttggcctctcttgatgagtcacaggaaggacatgcagaagccaagttggaggcagaggaagccattgaagttgatcattctcatgatttggacatcttttaagtacattttcaacagtttgaggactaagcctttctaaaataacattgtaataaaccatttttactgagattgcaacgttttgcactgataaacatgagaatctggaggaaagacaattgttttcttgtttaaaatatgtgtggaaaggaatgcaattgatagaacatttaaagatatatctgacaaaatacttaagagtatatagcacaggatttaatttctcaatctgttgcatgtgctaattatgagtattactagttgataatcagttttgtctaggtcataacataccatttgtaagtttgtttgctttttcaggtttatctttgcagtgaattatgctttgctttaaaacattccgctaaaatcataatgggacatataaattattaagctgttagaaatgcattcaaatttgttttttctgtgttctaagaactcaggcaattttaaggctggtctcgaactcctggcctaatgatctgcccacctctgcctcccaaagtgctgggatcacaggcatgagccaccgaacccagccttattctgcttaaatttaacgtgttttttgacttcttaattaacttggtcatatactaaatgtgatctcctgtggattaccacatgcattaaaaaatttttcaagctgggcctagtggcgcacacctgcaatcccaacactttgggaggccaagagaggaagattgcttgagcccaggagtttgagaccaatctaggcaatgtagtgagaccctgtctctaatttaaaaaagaaaaagaaaaaaacattcccagtggcagcctgcctaagactgtcttaccttatgttaaggaagtcaggtatttaaaatgttacatatgccggcgcagtggctcatgtgtgtaatcccagcactctgggaggctgagacaggtagatcatttgaggtcaggagttcaaaaccaacctggtctacatggtgaaaccccatctcaactaaaaatacaaaaaatacaaaaaattagccgggcgcggtggctcacacctgtaatcccagcactttgggaggtggaggcgggtggatcacaaggtcaagagatcgagaccatcctggccaacatggtgaaaccctgtctctattaaaaatacaaaaattagctgggcgtggtggcgcatgcctgtagtcccaactactagggaggctgaggcaggagaatcacttgaacccaggaggtggaggttgcagtgagccgagatcacgccactgcactccagcctggcgacagagcgagactccctctcaaaaaaaaaaaaaaaaatacaaaaaattagccgggcattgtggtgcatgcctgtaatctcagctatttgggaggccgaggcaggagaatcacttgaacccaggaggcagaggttgcagtgagtcgagatcgtgccactgcactccagcctgggtgacagagcaagactttgtctcaaaaataataatagtaaaatgttacatgtgcatgaagttttaaattactcatttttattaatgaagaaaataaggtagtttagacattccaagagttaactatagtttacaaaaatatattaagcaaaaatatgcttgatatattaagcagaaatgttgtatattaagcaaaaatgtaaaattcagcaattataaactgttccttacagacagtgtacttgaagtcttttggtagttctgagaatgtggtcattgaagttggatctaagaggaaagtggttatcggttgctttttatttataaaggatgcaaaaataaaattagatttttggcagtccttaa

SEQ ID NO: 5717 - protein, 48 aa, Homo sapiens
MRPWPLLMSHRKDMQKPSWRQRKPLKLIILMIWTSFKYIFNSLRTKPF

SEQ ID NO: 5718 - DNA, 303 bp, Homo sapiens; identical to SEQ ID NO: 661

SEQ ID NO: 5719 - protein, 100 aa, Homo sapiens; identical to SEQ ID NO: 662

SEQ ID NO: 5720 - DNA, 465 bp, Homo sapiens
attgctgtcaggaatggcttcagggaaagatacttgtcctactttgcctaaactcactaacaactgctctgatgagagtctctataaatctgctaataagtatgaagagattcatttgccacgattttcattaaagcaagggatgatcccaagacgttatgtcatgccttggaaagaaaacatgatattcaggaatgtgaatctgaagcaagcagaagtgtgtgggatccatactggccctttagaagactctctgtttttgaatcacagtgaaaggctttgccatggggaagatcgtaaagttgtcttccaaaaaggcccaccagaaataaaaattgcagatatgcctttgcattcgcctctctccagataccaaagcactgtgatttcccatggcttcaggaggcgactagtctaatgaaagaagaataaaataataaagtgtttcaatctctgctctcttac

SEQ ID NO: 5721 - protein, 134 aa, Homo sapiens; identical to SEQ ID NO: 664

SEQ ID NO: 5722 - DNA, 350 bp, Homo sapiens
ctcactaacaactgctctgatgagagtctctataaatctgctaataagtatgaagagattcatttgccacgattttcattaaagcaagggatgatcccaagacgttatgtcatgccttggaaagaaaacatgatattcaggaatgtgaatctgaagtgaaaggctttgccatggggaagatcgtaaagttgtcttccaaaaaggcccaccagaaataaaaattgcagatatgcctttgcattcgcctctctccagataccaaagcactgtgatttcccatggcttcaggaggcgactagtctaatgaaagaagaataaaataataaagtgtttcaatctctgctctctta

SEQ ID NO: 5723 - DNA, 603 bp, Homo sapiens
ctgctgccatttcctctgtccctgaggtctccagaagagaaaggagctccagccttgcattctttgggtgtggagaggagcagagcagaatggagcctgcaggtcatgccaggagtcaccgcaaggctgtggctgtcagctcagaattccatcatcacttgggagatttctgcgaatcatcactaaagccattcactttctcataactaaacaagaatcttcttctggagttaagtatcagatatgaatgttctcactgacctcaggaagcaaaagtcctaaatcattatatggcagtgaaggtacaaaaaaaaaaaaaaatcagcaggaaataaagcggaactgctgccaacacatacaagctgcagtagcacccacaaaatgtgtagtatctattctaacacattcattggactgattacattggctcatagacttggttaactctggaagaacataataggtgtttattgtttactatggggatgggaaacataattaagtctatagtctccaattcttctcaagttcaaatgaaaccaacacttttggttttgtcttaacattcaggatgtgtttctaattaaactgaaatcacagtaa

SEQ ID NO: 5724 - protein, 38 aa, Homo sapiens
MEPAGHARSHRKAVAVSSEFHHHLGDFCESSLKPFTFS

SEQ ID NO: 5725 - DNA, 455 bp, Homo sapiens
tatcaggcaacttctttccatgaaagtgagatctgtgcgtcttgaagccgatagattatcacagaaaaaccagcaaccctgattttaaatcatttgccaacagtgttaatgggcggttcctaatccgtttcttaatttaagggtttgtaaaatcaaaaaacagctcagaaatgatacgattaacatatgacgatttaagttgggttgatctcaaagtgaaggatggagaaatgaattctctattgtcataaggaaaagggaagtcatgaagttagaaggggcttgtatctgaaggcctctggccaatgtgcctgctgccatttcctctgtccctgaggtctccagaagagaaaggagctccagccttgcattctttgggtgtggagaggagcagagcagaatggagcctgcaggtcatgccaggagtcaccgcaaggctgtggctgtcagctcag

SEQ ID NO: 5726 - protein, 49 aa, Homo sapiens
MCLLPFPLSLRSPEEKGAPALHSLGVERSRAEWSLQVMPGVTARLWLSA

SEQ ID NO: 5727 - DNA, 3477 bp, Homo sapiens
gcgggggataaggttaccacgcccgcggtggccggggacactctgagtttcgcgtgtggcttttagggacgtttatatttgaatttccctgaaccgccgagtgtgggcggtggcgcagatccgtcccggaaacctccgggctccttcccgcctttctcaggcccggcccctccaaggggtccccgcggggcggcgggagggccctgggcccagagccgcgcgggtgggcagtcccaggcgtccttccttacagccctgagcctggtccgggaaccgcccagccgggagggccgagctgacggttgcccaagggccagattttaaatttacaggcccggcccccgaaccgccgaagcgcgctgcctgctccccattggcccatggtagtcacgtggaggcgccggggcgtgccggccatgttggggagtgcggcgccgcggcccgcgccacctccgccccccgcggcttgcctccagcccgcccctcccggccctcctccccccgcccgccgctccgtgcagcctgagaggaaacaaagtgctgcgagcaggagacggcggcggcgcgaaccctgctgggcctccagtcaccctcgtcttgcattttcccgcgtgcgtgtgtgagtgggtgtgtgtgttttcttacaaagggtatttcgcgatcgatcgattgattcgtagttcccccccgcgcgcctttgccctttgtgctgtaatcgagctcccgccatcccaggtgcttctccgttcctctaaacgccagcgtctggacgtgagcgcaggtcgccggtttgtgccttcggtccccgcttcgccccctgccgtcccctccttatcacggtcccgctcgcggcctcgccgccccgctgtctccgccgcccgccatggcgactgcgacccccgtgccgccgcggatgggcagccgcgctggcggccccaccacgccgctgagccccacgcgcctgtcgcggctccaggagaaggaggagctgcgcgagctcaatgaccggctggcggtgtacatcgacaaggtgcgcagcctggagacggagaacagcgcgctgcagctgcaggtgacggagcgcgaggaggtgcgcggccgtgagctcaccggcctcaaggcgctctacgagaccgagctggccgacgcgcgacgcgcgctcgacgacacggcccgcgagcgcgccaagctgcagatcgagctgggcaagtgcaaggcggaacacgaccagctgctcctcaactatgctaagaaggaatctgatcttaatggcgcccagatcaagcttcgagaatatgaagcagcactgaattcgaaagatgcagctcttgctactgcacttggtgacaaaaaaagtttagagggagatttggaggatctgaaggatcagattgcccagttggaagcctccttagctgcagccaaaaaacagttagcagatgaaactttacttaaagtagatttggagaatcgttgtcagagccttactgaggacttggagtttcgcaaaagcatgtatgaagaggagattaacgagaccagaaggaagcatgaaacgcgcttggtagaggtggattctgggcgtcaaattgagtatgagtacaagctggcgcaagcccttcatgagatgagagagcaacatgatgcccaagtgaggctgtataaggaggagctggagcagacttaccatgccaaacttgagaatgccagactgtcatcagagatgaatacttctactgtcaacagtgccagggaagaactgatggaaagccgcatgagaattgagagcctttcatcccagctttctaatctacagaaagagtgtttgttgctgagtcatatcagtttcatcatgctgcctattaggccataagaatttccttttggttaaataactcagtctagagcatgtttggaaaggattcaagaattagaggacttgcttgctaaagaaaaagacaactctcgtcgcatgctgacagacaaagagagagagatggcggaaataagggatcaaatgcagcaacagctgaatgactatgaacagcttcttgatgtaaagttagccctggacatggaaatcagtgcttacaggaaactcttagaaggcgaagaagagaggttgaagctgtctccaagcccttcttcccgtgtgacagtatcccgagcatcctcaagtcgtagtgtacgtacaactagaggaaagcggaagagggttgatgtggaagaatcagaggcgagtagtagtgttagcatctctcattccgcctcagccactggaaatgtttgcatcgaagaaattgatgttgatgggaaatttatccgcttgaagaacacttctgaacaggatcaaccaatgggaggctgggagatgatcagaaaaattggagacacatcagtcagttataaatatacctcaagatatgtgctgaaggcaggccagactgttacaatttgggctgcaaacgctggtgtcacagccagccccccaactgacctcatctggaagaaccagaactcgtggggcactggcgaagatgtgaaggttatattgaaaaattctcagggagaggaggttgctcaaagaagtacagtctttaaaacaaccatacctgaagaagaggaggaggaggaagaagcagctggagtggttgttgaggaagaacttttccaccagcagggaaccccaagagcatccaatagaagctgtgcaattatgtaaaattttcaactgtcttcctcaaaataaagaagtatggtaatctttacctgtatacagtgcagagccttctcagaagcacagaatatttttatatttcctttatgtgaatttttaagctgcaaatctgatggccttaatttcctttttgacactgaaagttttgtaaaagaaatcatgtccatacactttgttgcaagatgtgaattattgacactgaacttaataactgtgtactgttcggaaggggttcctcaaattttttgactttttttgtatgtgtgttttttctttttttttaagttcttatgaggaggggagggtaaataaaccactgtgcgtcttggtgtaatttgaagattgccccatctagactagcaatctcttcattattctctgctatatataaaacggtgctgtgagggaggggaaaagcatttttcaatatattgaacttttgtactgaatttttttgtaataagcaatcaaggttataattttttttaaaatagaaattttgtaagaaggcaatattaacctaatcaccatgtaagcactctggatgatggattccacaaaacttggttttatggttacttcttctcttagattcttaattcatgaggagggtgggggagggaggtggagggagggaagggtttctctattaaaatgcattcgttgtgttttttaagatagtgtaacttgcttaaatttcttatgtgacattaacaaataaaaaagctcttttaatattg

SEQ ID NO: 5728 - protein, 329 aa, Homo sapiens
MATATPVPPRMGSRAGGPTTPLSPTRLSRLQEKEELRELNDRLAVYIDKVRSLETENSALQLQVTEREEVRGRELTGLKALYETELADARRALDDTARERAKLQIELGKCKAEHDQLLLNYAKKESDLNGAQIKLREYEAALNSKDAALATALGDKKSLEGDLEDLKDQIAQLEASLAAAKKQLADETLLKVDLENRCQSLTEDLEFRKSMYEEEINETRRKHETRLVEVDSGRQIEYEYKLAQALHEMREQHDAQVRLYKEELEQTYHAKLENARLSSEMNTSTVNSAREELMESRMRIESLSSQLSNLQKECLLLSHISFIMLPIRP

SEQ ID NO: 5729 - DNA, 2896 bp, Homo sapiens
gcccgccgctccgtgcagcctgagaggaaacaaagtgctgcgagcaggagacggcggcggcgcgaaccctgctgggcctccagtcaccctcgtcttgcattttcccgcgtgcgtgtgtgagtgggtgtgtgtgttttcttacaaagggtatttcgcgatcgatcgattgattcgtagttcccccccgcgcgcctttgccctttgtgctgtaatcgagctcccgccatcccaggtgcttctccgttcctctaaacgccagcgtctggacgtgagcgcaggtcgccggtttgtgccttcggtccccgcttcgccccctgccgtcccctccttatcacggtcccgctcgcggcctcgccgccccgctgtctccgccgcccgccatggcgactgcgacccccgtgccgccgcggatgggcagccgcgctggcggccccaccacgccgctgagccccacgcgcctgtcgcggctccaggagaaggaggagctgcgcgagctcaatgaccggctggcggtgtacatcgacaaggtgcgcagcctggagacggagaacagcgcgctgcagctgcaggtgacggagcgcgaggaggtgcgcggccgtgagctcaccggcctcaaggcgctctacgagaccgagctggccgacgcgcgacgcgcgctcgacgacacggcccgcgagcgcgccaagctgcagatcgagctgggcaagtgcaaggcggaacacgaccagctgctcctcaactatgctaagaaggaatctgatcttaatggcgcccagatcaagcttcgagaatatgaagcagcactgaattcgaaagatgcagctcttgctactgcacttggtgacaaaaaaagtttagagggagatttggaggatctgaaggatcagattgcccagttggaagcctccttagctgcagccaaaaaacagttagcagatgaaactttacttaaagtagatttggagaatcgttgtcagagccttactgaggacttggagtttcgcaaaagcatgtatgaagaggagattaacgagaccagaaggaagcatgaaacgcgcttggtagaggtggattctgggcgtcaaattgagtatgagtacaagctggcgcaagcccttcatgagatgagagagcaacatgatgcccaagtgaggctgtataaggaggagctggagcagacttaccatgccaaacttgagaatgccagactgtcatcagagatgaatacttctactgtcaacagtgccagggaagaactgatggaaagccgcatgagaattgagagcctttcatcccagctttctaatctacagaaagagtctagagcatgtttggaaaggattcaagaattagaggacttgcttgctaaagaaaaagacaactctcgtcgcatgctgacagacaaagagagagagatggcggaaataagggatcaaatgcagcaacagctgaatgactatgaacagcttcttgatgtaaagttagccctggacatggaaatcagtgcttacaggaaactcttagaaggcgaagaagagaggttgaagctgtctccaagcccttcttcccgtgtgacagtatcccgagcatcctcaagtcgtagtgtacgtacaactagaggaaagcggaagagggttgatgtggaagaatcagaggcgagtagtagtgttagcatctctcattccgcctcagccactggaaatgtttgcatcgaagaaattgatgttgatgggaaatttatccgcttgaagaacacttctgaacaggatcaaccaatgggaggctgggagatgatcagaaaaattggagacacatcagtcagttataaatatacctcaagatatgtgctgaaggcaggccagactgttacaatttgggctgcaaacgctggtgtcacagccagccccccaactgacctcatctggaagaaccagaactcgtggggcactggcgaagatgtgaaggttatattgaaaaattctcagggagaggaggttgctcaaagaagtacagtctttaaaacaaccatacctgaagaagaggaggaggaggaagaagcagctggagtggttgttgaggaagaacttttccaccagcagggaaccccaagagcatccaatagaagctgtgcaattatgtaaaattttcaactgtcttcctcaaaataaagaagtatggtaatctttacctgtatacagtgcagagccttctcagaagcacagaatatttttatatttcctttatgtgaatttttaagctgcaaatctgatggccttaatttcctttttgacactgaaagttttgtaaaagaaatcatgtccatacactttgttgcaagatgtgaattattgacactgaacttaataactgtgtactgttcggaaggggttcctcaaattttttgactttttttgtatgtgtgttttttctttttttttaagttcttatgaggaggggagggtaaataaaccactgtgcgtcttggtgtaatttgaagattgccccatctagactagcaatctcttcattattctctgctatatataaaacggtgctgtgagggaggggaaaagcatttttcaatatattgaacttttgtactgaatttttttgtaataagcaatcaaggttataattttttttaaaatagaaattttgtaagaaggcaatattaacctaatcaccatgtaagcactctggatgatggattccacaaaacttggttttatggttacttcttctcttagattcttaattcatgaggagggtgggggagggaggtggagggagggaagggtttctctattaaaatgcattcgttgtgttttttaagatagtgtaacttgcttaaatttcttatgtgacattaacaaataaaaaagctcttttaatattg

SEQ ID NO: 5730 - protein, 586 aa, Homo sapiens; identical to SEQ ID NO: 667

SEQ ID NO: 5731 - DNA, 2993 bp, Homo sapiens
gcccgccgctccgtgcagcctgagaggaaacaaagtgctgcgagcaggagacggcggcggcgcgaaccctgctgggcctccagtcaccctcgtcttgcattttcccgcgtgcgtgtgtgagtgggtgtgtgtgttttcttacaaagggtatttcgcgatcgatcgattgattcgtagttcccccccgcgcgcctttgccctttgtgctgtaatcgagctcccgccatcccaggtgcttctccgttcctctaaacgccagcgtctggacgtgagcgcaggtcgccggtttgtgccttcggtccccgcttcgccccctgccgtcccctccttatcacggtcccgctcgcggcctcgccgccccgctgtctccgccgcccgccatggcgactgcgacccccgtgccgccgcggatgggcagccgcgctggcggccccaccacgccgctgagccccacgcgcctgtcgcggctccaggagaaggaggagctgcgcgagctcaatgaccggctggcggtgtacatcgacaaggtgcgcagcctggagacggagaacagcgcgctgcagctgcaggtgacggagcgcgaggaggtgcgcggccgtgagctcaccggcctcaaggcgctctacgagaccgagctggccgacgcgcgacgcgcgctcgacgacacggcccgcgagcgcgccaagctgcagatcgagctgggcaagtgcaaggcggaacacgaccagctgctcctcaactatgctaagaaggaatctgatcttaatggcgcccagatcaagcttcgagaatatgaagcagcactgaattcgaaagatgcagctcttgctactgcacttggtgacaaaaaaagtttagagggagatttggaggatctgaaggatcagattgcccagttggaagcctccttagctgcagccaaaaaacagttagcagatgaaactttacttaaagtagatttggagaatcgttgtcagagccttactgaggacttggagtttcgcaaaagcatgtatgaagaggagattaacgagaccagaaggaagcatgaaacgcgcttggtagaggtggattctgggcgtcaaattgagtatgagtacaagctggcgcaagcccttcatgagatgagagagcaacatgatgcccaagtgaggctgtataaggaggagctggagcagacttaccatgccaaacttgagaatgccagactgtcatcagagatgaatacttctactgtcaacagtgccagggaagaactgatggaaagccgcatgagaattgagagcctttcatcccagctttctaatctacagaaagagtctagagcatgtttggaaaggattcaagaattagaggacttgcttgctaaagaaaaagacaactctcgtcgcatgctgacagacaaagagagagagatggcggaaataagggatcaaatgcagcaacagctgaatgactatgaacagcttcttgatgtaaagttagccctggacatggaaatcagtgcttacaggaaactcttagaaggcgaagaagagaggttgaagctgtctccaagcccttcttcccgtgtgacagtatcccgagcatcctcaagtcgtagtgtacgtacaactagaggaaagcggaagagggttgatgtggaagaatcagaggcgagtagtagtgttagcatctctcattccgcctcagccactggaaatgtttgcatcgaagaaattgatgttgatgggaaatttatccgcttgaagaacacttctgaacaggatcaaccaatgggaggctgggagatgatcagaaaaattggagacacatcagtcagttataaatatacctcaagatatgtgctgaaggcaggccagactgttacaatttgggctgcaaacgctggtgtcacagccagccccccaactgacctcatctggaagaaccagaactcgtggggcactggcgaagatgtgaaggttatattgaaaaattctcagggagaggaggttgctcaaagaagtacagtctttaaaacaaccatacctgaagaagaggaggaggaggaagaagcagctggagtggttgttgaggaagaacttttccaccagcagggaaccccaagagcatccaatagaagctgtgcaattatgtaaaattttcaactgtcttcctcaaaataaagaagtatggtaatctttacctgtatacagtgcagagccttctcagaagcacagaatatttttatatttcctttatgtgaatttttaagctgcaaatctgatggccttaatttcctttttgacactgaaagttttgtaaaagaaatcatgtccatacactttgttgcaagatgtgaattattgacactgaacttaataactgtgtactgttcggaaggggttcctcaaattttttgactttttttgtatgtgtgttttttctttttttttaagttcttatgaggaggggagggtaaataaaccactgtgcgtcttggtgtaatttgaagattgccccatctagactagcaatctcttcattattctctgctatatataaaacggtgctgtgagggaggggaaaagcatttttcaatatattgaacttttgtactgaatttttttgtaataagcaatcaaggttataattttttttaaaatagaaattttgtaagaaggcaatattaacctaatcaccatgtaagcactctggatgatggattccacaaaacttggttttatggttacttcttctcttagattcttaattcatgaggagggtgggggagggaggtggagggagggaagggtttctctattaaaatgcattcgttgtgttttttaagatagtgtaacttgcttaaatttcttatgtgacattaacaaataaaaaagctcttttaatattgatatactgtcctttttaacgctttaaaaacagattttgaggggagaaaagtattgtttcagttttgcttttgataaaaatataatttgacttctttg

SEQ ID NO: 5732 - protein, 586 aa, Homo sapiens; identical to SEQ ID NO: 667

SEQ ID NO: 5733 - DNA, 756 bp, Homo sapiens
tggcatatgcaaaaagactaagaagatgcttttgcataaactcaaagttacaaaggatagtttccggtgccaataaaattctgctactcactgaataaactaatctgtcaaagaattagcaacaacctaatcagactcaggcaaactctagttgaaactcgggtaaaattaggaaaaatactaaatgagattgaaactggaccacaaaaccacttctttgaaacaaaaaaaaaaatcactgtaacataaacaggcacaggagtatggagcagactcgtacagattaagtcttaatttaaatgactgattcatttaaaaagaaaaagaaaaaccaataactactacctttgtcactcatctacaatgtgctaggcactgacctgggtgtaaaatatttctgaaacagtgttccaatgtccattctccagtttgctgggtgttatgaggcagctattcctaaagcaatagcagtggcagcttcctagtcctgaatagtagctatatactgtttttaaaacagtttactggttccattggtggcctcacacataaaagctcccaaagaaggtcagttctacaacaatgttctaagcatcattattgctcctctagcctctctaaaaatcatttctaagcacctacatctcatattgtttccctttctgcttaaaatccctagtgctgccgggcgcggtggctcatgccttaatcccagttactcgggaggctgaggcaggagaatcacttaaacacagg

SEQ ID NO: 5734 - protein, 71 aa, Homo sapiens
NSLLVPLVASHIKAPKEGQFYNNVLSIIIAPLASLKIISKHLHLILFPFLLKIPSAAGRGGSCLNPSYSGG

SEQ ID NO: 5735 - DNA, 715 bp, Homo sapiens
ctggctaagctctgttcctgctttcatatactgtaaggttcttctgaacagctgtctggtagcccctgaacaccactcaacactagtgcagtactcaagtgactatcacacaaatccgtgtctggggatctcttcacacccagagctcagcatcaacatgccatgtctcttatatctagccatgctccagacctttagagaaaaaataaaccttattttcaatttaaagtaaaatatacccacataaaaaccttgtcctaaaactagataattttatttcgtaacaggctcaaactgcttatcaagcatgcatttgctccaacagccactcatcagcttcaacactgtcctcatgttaacttcccttccaaagggaaaaaggatgtgatccacagtatttttccaaaggaaaattaatgaacttccccgaaattaaaacaaatataacttaatacacaaaaactcggccaggcacggtggttcactcctgtaatcccagtactatagggggccgaggcagctattcctaaagcaatagcagtggcagcttcctagtcctgaatagtagctatatactgtttttaaaacagtttactggttccattggtggcctcacacataaaagctcccaaagaaggtcagttctacaacaatgttctaagcatcattattgctcctctagcctctctaaaaatcatttctaagcacctacatc

SEQ ID NO: 5736 - protein, 57 aa, Homo sapiens
SNSSGSFLVLNSSYILFLKQFTGSIGGLTHKSSQRRSVLQQCSKHHYCSSSLSKNHF

SEQ ID NO: 5737 - DNA, 301 bp, Homo sapiens
tgccattggaaactaagaccaaggatggaacaaatgtcatccttcctctgtaatgcttccctgctttacctctcctagcagaaaaaaatcatgtacctttctgggctccacagcacttggtgcatcattctcatatggtgcatggtatatacatctttttaaaatttaagattccatgtctgtctcctacactggaatgtgggtaaaatgagattaccttcagatcctcagtgcaaagtaatttatagtctcttctcataagaggttatgaacacacttttgctttttctaacccacacaa

SEQ ID NO: 5738 - protein, 38 aa, Homo sapiens
MLPCFTSPSRKKSCTFLGSTALGASFSYGAWYIHLFKI

SEQ ID NO: 5739 - DNA, 1236 bp, Homo sapiens
aaaaaaaaaaaaaacaaaaaaacaagggctgggcacagaggctcatgtctgtaacccaacagcatttgggaggctgaggcgggtgggtcacttgcagtcaggagtttgagaccagcctggccaacatggtgaaacctcttctctactaaaaacaaaattagccgggtgtggtgacacacgcctgtaatcccagttactcaggaggctgaggtaggcaaatcgcttgaaaccaggaggtgaaggttgcagtgagccgagaatcacaccactgcactctagcctgggcaacaggctgagactctgtctcaaaaataaataaataaataaataaataaataaataaataaataaataatatgtaaagtctctttcagccagtttggcattttacaatatattaaatcaccaaaacacttaaaatctcaaaggaactaatccatcctgatgcagttcagcatttaaagtaataataataaataaactaagagtacttgagcaacattttctgcgatgaggtagaaatatgatctattactacttctatacctaggtgttcaaagaaatgaccaagaaaataaagttctttttaaaatgctatttatttttatttcaataaaaagggtgagaggcaaaaagtggaccataaggtagggtgacccttaagttccttacctctcttcttcgccttctaagagtttcctgtaagcactgatttccatgtccagggctaactttacatcaagaagctgttcatagtcattcagctgttgctgcatttgatcccttatttccgccatctctctctctttgtctgtcagcatgcgacgagagttgtctttttctttagcaagcaagtcctctaattcttgaatcctttccaaacatgctctagacttaagatgcaaggaaacatatttactttctaggaacattccaacattagcaccaggcagctattttaaatcatttcctagactggaaaacagtacaaccctatggaatctctaactcactagaattcaagagattttaagaaattaaaacccaaaattcctcaaatacaaaacacagacctcaggatagttttggctgataaaagaataaaagacatattccacaaatgtaagttctgtaaatatacatataatttttctgtacttagccaaaaaaatgttaagatgtggttttggtaaaagtcaagtctggctcccttacaaagcctttacttccaaaagt

SEQ ID NO: 5740 - protein, 35 aa, Homo sapiens
KKKKTKKQGLGTEAHVCNPTAFGRLRRVGHLQSGV

SEQ ID NO: 5741 - DNA, 948 bp, Homo sapiens
gattttaagtgtgttttttaacttaaactactattgtttttaggaggttgctcaaagaagtacagtctttaaaacaaccatacctgaagaagaggaggaggaggaagaagcagctggagtggttgttgaggaagaacttttccaccagcagggaaccccaagagcatccaatagaagctgtgcaattatgtaaaattttcaactgtcttcctcaaaataaagaagtatggtaatctttacctgtatacagtgcagagccttctcagaagcacagaatatttttatatttcctttatgtgaatttttaagctgcaaatctgatggccttaatttcctttttgacactgaaagttttgtaaaagaaatcatgtccatacactttgttgcaagatgtgaattattgacactgaacttaataactgtgtactgttcggaaggggttcctcaaattttttgactttttttgtatgtgtgttttttctttttttttaagttcttatgaggaggggagggtaaataaaccactgtgcgtcttggtgtaatttgaagattgccccatctagactagcaatctcttcattattctctgctatatataaaacggtgctgtgagggaggggaaaagcatttttcaatatattgaacttttgtactgaatttttttgtaataagcaatcaaggttataattttttttaaaatagaaattttgtaagaaggcaatattaacctaatcaccatgtaagcactctggatgatggattccacaaaacttggttttatggttacttcttctcttagattcttaattcatgaggagggtgggggagggaggtggagggagggaagggtttctctattaaaatgcattcgttgtgttttttaagatagtgtaacttgcttaaatttcttatgtgacattaacaaataaaaaagctcttttaatattg

SEQ ID NO: 5742 - protein, 76 aa, Homo sapiens [sequence omitted]

SEQ ID NO: 5743 - DNA, 1045 bp, Homo sapiens
gattttaagtgtgttttttaacttaaactactattgtttttaggaggttgctcaaagaagtacagtctttaaaacaaccatacctgaagaagaggaggaggaggaagaagcagctggagtggttgttgaggaagaacttttccaccagcagggaaccccaagagcatccaatagaagctgtgcaattatgtaaaattttcaactgtcttcctcaaaataaagaagtatggtaatctttacctgtatacagtgcagagccttctcagaagcacagaatatttttatatttcctttatgtgaatttttaagctgcaaatctgatggccttaatttcctttttgacactgaaagttttgtaaaagaaatcatgtccatacactttgttgcaagatgtgaattattgacactgaacttaataactgtgtactgttcggaaggggttcctcaaattttttgactttttttgtatgtgtgttttttctttttttttaagttcttatgaggaggggagggtaaataaaccactgtgcgtcttggtgtaatttgaagattgccccatctagactagcaatctcttcattattctctgctatatataaaacggtgctgtgagggaggggaaaagcatttttcaatatattgaacttttgtactgaatttttttgtaataagcaatcaaggttataattttttttaaaatagaaattttgtaagaaggcaatattaacctaatcaccatgtaagcactctggatgatggattccacaaaacttggttttatggttacttcttctcttagattcttaattcatgaggagggtgggggagggaggtggagggagggaagggtttctctattaaaatgcattcgttgtgttttttaagatagtgtaacttgcttaaatttcttatgtgacattaacaaataaaaaagctcttttaatattgatatactgtcctttttaacgctttaaaaacagattttgaggggagaaaagtattgtttcagttttgcttttgataaaaatataatttgacttctttg

SEQ ID NO: 5744 - protein, 76 aa, Homo sapiens [sequence omitted]

SEQ ID NO: 5745 - DNA, 569 bp, Homo sapiens
cagatgatggtgctctgaggatgttggaattcaccattgcttcactaacagaccaccccaaagcttagtggcttaaaacagtgatttcttacttcccataattctgtggtttgactgggctcagctgggcagtgtttctgttccacatgctgcagactgaactcaatcgagcaggctgtgcaggagaatggcgtgaacccgggaggcggagcttgcagtgagctgagatggcgccactgcactccagcttgggtgacagagtgagactctgcctcataaaaaaagacttaatgcaccaactatatccgctcatccagttattttgtagggttcatgtgagagttaaatgaagttgaaagattggaattaaactgacatagtctggaatgcttagggatgtagcttctgtacaatttggaacaaaggagaagttaagactgcattttaaaatatcactggccaagctgaatcagagggactaactctagagaggagattccagaggcagtgagggaatatataatggaaatttattaaggcttagtgactaaacttgagggtgagagaag

SEQ ID NO: 5746 - protein, 40 aa, Homo sapiens
MAPLHSSLGDRVRLCLIKKDLMHQLYPLIQLFCRVHVRVK

SEQ ID NO: 5747 - DNA, 787 bp, Homo sapiens
gatgcacacctgtagtcgcagctgctcgggaggctgaggcatgagaatcgcttgaacccaggaggtagaggttgcagtgagccaagattgcaccactgcactccagcctgggcaacagagtgagactctatctcaaacaaacaaagaaaaagaaaaaaagaaaaggttagaaaagatgagagatgataaagggtccatttgaggttaggtaatatggtttggtatccctgtagttaaaagtttttgtcttattttagaatactgtgatctatttctttagtattaatttttccttctgttttcctcatcagggaaccccaagagcatccaatagaagctgtgcaattatgtaaaattttcaactgtcttcctcaaaataaagaagtatggtaatctttacctgtatacagtgcagagccttctcagaagcacagaatatttttatatttcctttatgtgaatttttaagctgcaaatctgatggccttaatttcctttttgacactgaaagttttgtaaaagaaatcatgtccatacactttgttgcaagatgtgaattattgacactgaacttaataactgtgtactgttcggaaggggttcctcaaattttttgactttttttgtatgtgtgttttttctttttttttaagttcttatgaggaggggagggtggagggagggaagggtttctctattaaaatgcattcgttgtgttttttaagatagtgtaacttgcttaaatttcttatgtgacattaacaaataaaaaagctcttttaatatt

SEQ ID NO: 5748 - protein, 33 aa, Homo sapiens
MCVFSFFLSSYEEGRVEGGKGFSIKMHSLCFLR

SEQ ID NO: 5749 - DNA, 774 bp, Homo sapiens
tgcttacaggtccccagccctgcccggctgggtggcagtggaggcccgtcgagaatttgagcatggcacgggcaggccggctgtgctgggggacctggcgcccccctctgcagctgctggcccaggtgctaagcccctcactgcccccgggctgggggcgcaggccggctgctcggagtgcgggggcctgccgagcccacgcccacccggaactcacgctggcctgcaagtgtgcgcccaaccctggttcccaccggcgcctctccctccacacctccccacaagcagagggagccagctccagcctcggccagcccagagtggagctcccacagtgcagcggcaggctgaagggctcctcaagcgcggccagagtgggcgcggaggtcgaggaggcgccaagagcgagcgagggctgccagcacgctgtcacctctcactatgaacaattggcaggacagtcatggtctggacctaaggaaggtttgctcagggctgacctacccacgagcagctgctcctggcagtctgagcgcctttcatatttcctgtattaaccttgtggcgcacaaagacagcatcgagaacaagctaatgagaatcatccctctcatcatggaacccgcatcccctgcctcaaaccaagccatgtgcacacgcacacttgatgatagcagaatcgaggcatctgttgacatttgtcttctttttgtttctagagtgtggtgggatgcctccatcactgtagcactgtcagatgggcgacagccttat

SEQ ID NO: 5750 - protein, 164 aa, Homo sapiens
MARAGRLCWGTWRPPLQLLAQVLSPSLPPGWGRRPAARSAGACRAHAHPELTLACKCAPNPGSHRRLSLHTSPQAEGASSSLGQPRVELPQCSGRLKGSSSAARVGAEVEEAPRASEGCQHAVTSHYEQLAGQSWSGPKEGLLRADLPTSSCSWQSERLSYFLY

SEQ ID NO: 5751 - DNA, 300 bp, Homo sapiens
cataattattattgaatgttcttgaaaagaatttttaaaacacagagtattagaatagaaaggaaatagaatataggaaaaatgtaaaaaaaaatcacactggcagagaaacagaacacacccttgaagactggaaaaccagcaaatataactgctaactagacagcagtgggagagttgcggagcgcctggccactacattaacacaggagagagcagacctagccaggtataaacaaactccaagatcacaccactgcactccagcctgggcaagacagagcaagactctgtcttagg

SEQ ID NO: 5752 - protein, 46 aa, Homo sapiens
LDSSGRVAERLATTLTQERADLARYKQTPRSHHCTPAWARQSKTLS

SEQ ID NO: 5753 - DNA, 2630 bp, Homo sapiens
gcggccgccaggcttgccgcactccccctgaggtgcccgccggaaccaatgtgccctggtccactgggccgtgagcagccaccgactgggggcaacttggcacttagaaccgcagcagggacgtcggtttgctatcgggactcggcgaggacgctgcactttagtagtcggctggaagccgtcggactgattgcactcactgtcgcactcttcactatttacctcttttggacactagtgtcatttaggtaccactgtcgattgtacaacgagtggcgtcggaccaatcagagggtgattctcctcattccaaagtctgtcaatgtaccttctaaccagccgtccttgctgggcctccattcggtcaagaggaactcaaaggagacagttgtttgatgtttgtatggttggttggttgtttgattcattgtttggggtttggaagtgtctgcactggggtcatgcactgagcgacccccaagcccttccttaagcctgtgggtctaagaacatccagagcatattagcacatcactccaagcaacaacctccgccagaagaaagcaaatgctgttttacttcaaatgatggatgctgcaatcatatgatatttgctaagctgccaaacatgtttatttagcagatactgtatggaattttctgaacacctctttaacgtatgaggaaggttgtcctgctacggatgcaattcaattcttccttttttattactatttcaaacacacacacatatatatatatattaaacttagatgataatcaaaatcaaaaagtcaacgtaaaaactggtttcttggtttggttgggtcttatttgagttagtttgtttctcagtttctcgtatggattctttggggtactttggtagcctgagtggtctttttcatctctttcgcgtccattactcaaggagacagcataacagatgcagaacaagtcatatttgaagaatgttttgtactaaacttcatttaattattcagtttttaaagggaaaaagggcgtgagctcacacagtgagctgtttatttaaatatcattaaggagaaaaaaaaatatggtgagaagctcgctcctttcaacttgtttggtactgacagctgatagaagctattttctaataataaacatccagtgtgtgaaagacaaaacccactgattgcaatactctttttttaatgataaaacctgtgaagtttcccaaagcaggttttaaaaggaaaaaaaggaaaagcaaaaaggttgctgttctcactcccatctcatttagtgcatgtcttaattcgggattcgtaatgaattggaggatcattagacatttctaggaaccctagacctgttttgcatgtcaattagcattcccattgctctattgaatttctagcttgacaggtagatgtggcaaaaaaaaaaaaaaaaaaaaaagcctgtcctagcagccctgcacttattctaagacccctttgtctgattctttaaaaaggagccccacacagtgccttcccccaaccatgagccaattctgtcacagtccgaaatagactttttctaagggtttcgtgtccctcttttatccgtcgcagtgtaaagggtctgatccgcagcctgcattgtgcgcgcaccgaggcaggagcggatgtcttctgaggagagcgctggctggggttgactctcaggctcccggctgtccgcccgcccacacgcagcgaggaggggcggagccctgcttccggaatgcttaaaatatggaattctagaacatgacccacattctgagtatcactccagcatctgccttgtgttccaagtgggaaaacgagaagtgcaaaggaacaggcagcgaggagggtagcgatttttgtctgcaaattgatggagctgatgcaggtgtcccctttgtaggcgagccctccattcactggctgctcccagcgctgcctggggagggaaacagctgtactgctctccgctgcaaaactcagatgtgctttatggcttgtgacaatagatttcctccccaccacgcttcactgggacacttcaattccagtaatatatgtctcagcccttctgtttactgcgccctgctcacccccctgggctgtcattagctgcaccaccatcaaccgtttcttaattgacctttttaaaatgctggacatcaccggctgcacgcagctgccacacattaaatttccagagcaaagagtccaacttggtagctggtgaattgcagccctgtaatatacttaataaatgacgtccacccagccttagtccctgagctgtcaggtgaacccgtgacacgtctcaactgaatggcacaacattcatgagaggaccataccccttctccctgtttcttgcatgaattaaggaagcagcggatttccaggatgatttcctgtcaaggttggctgcagagaattcctgccatcttggttcatgagatgagatatgacatcatcaaaggcagccaggtcccaggccgttcaatggggatcctgcattaggaagggtttgcacattaaaactgtgcctgtgccacacctctttccttcgtgtttgcatccctgccctgtgaagtaaaacagagtccaagatgcaag

SEQ ID NO: 5754 - protein, 115 aa, Homo sapiens
MCPGPLGREQPPTGGNLALRTAAGTSVCYRDSARTLHFSSRLEAVGLIALTVALFTIYLFWTLVSFRYHCRLYNEWRRTNQRVILLIPKSVNVPSNQPSLLGLHSVKRNSKETVV

SEQ ID NO: 5755 - DNA, 1168 bp, Homo sapiens
gcggccgccaggcttgccgcactccccctgaggtgcccgccggaaccaatgtgccctggtccactgggccgtgagcagccaccgactgggggcaacttggcacttagaaccgcagcagggacgtcggtttgctatcgggactcggcgaggacgctgcactttagtagtcggctggaagccgtcggactgattgcactcactgtcgcactcttcactatttacctcttttggacactagtgtcatttaggtaccactgtcgattgtacaacgagtggcgtcggaccaatcagagggtgattctcctcattccaaagtctgtcaatgtaccttctaaccagccgtccttgctgggcctccattcggtcaagaggaactcaaaggagacagttgtttgatgtttgtatggttggttggttgtttgattcattgtttggggtttggaagtgtctgcactggggtcatgcactgagcgacccccaagcccttccttaagcctgtgggtctaagaacatccagagcatattagcacatcactccaagcaacaacctccgccagaagaaagcaaatgctgttttacttcaaatgatggatgctgcaatcatatgatatttgctaagctgccaaacatgtttatttagcagatactgtatggaattttctgaacacctctttaacgtatgaggaaggttgtcctgctacggatgcaattcaattcttccttttttattactatttcaaacacacacacatatatatatatattaaacttagatgataatcaaaatcaaaaagtcaacgtaaaaactggtttcttggtttggttgggtcttatttgagttagtttgtttctcagtttctcgtatggattctttggggtactttggtagcctgagtggtctttttcatctctttcgcgtccattactcaaggagacagcataacagatgcagaacaagtcatatttgaagaatgttttgtactaaacttcatttaattattcagtttttaaagggaaaaagggcgtgagctcacacagtgagctgtttatttaaatatcattaaggagaaaaaaaaatatggtgagaagctcgctcctttcaacttgtttggtactgacagctgatagaagctattttctaataataaacatccagtgtgtgaaagac

SEQ ID NO: 5756 - protein, 115 aa, Homo sapiens; identical to SEQ ID NO: 5754

SEQ ID NO: 5757 - DNA, 2049 bp, Homo sapiens
gagtcccgcagcgcccgccggcagccacggcacttcgcaataaccaacttccccgccgccggcgcgtcccgccagcctgccctcggccgcaggcgactggacggcggttacggggcggtcccagcgccaccacgactggctgtcggctccgccagtcatgggctgatgacgccccggggctggctccgcccctagcggcagccccgcctcccctccagagcctggtcggcttagccctgctttccgcctcactcgttgagcaggtccgtgaattgtcagcgcgctgtgggcgactgtgtggccgcggcggccgccaggcttgccgcactccccctgaggtgcccgccggaaccaatgtgccctggtccactgggccgtgagcagccaccgactgggggcaacttggcacttagaaccgcagcagggacgtcggtttgctatcgggactcggcgaggacgatggaaatcctgtatgaatgtggaagccattagcagagtaattgctgtctgttaccatgacaaccagccgctgcagtcacctgcccgaagtcctgccagactgcaccagctcagctgcacccgtggtgaagacggtggaggattgtggcagcctagtgaatgggcagccgcagtatgtcatgcaagtttcagccaaggacgggcagctgctgtcaacagtagtgcggactcttgccacccagagccccttcaatgaccggccgatgtgcaggatctgccacgagggcagcagccaagaggacttgctctctccatgtgaatgtacagggaccttggggacaattcatcggagctgcctggagcactggctgtcatcctcaaacaccagctactgtgaactctgccacttcaggtttgcagtcgagcgcaaacccaggccgttagtggagtggctgagaaaccctggcccccagcatgagaagcggactctgtttggcgacatggtgtgcttcttgtttataactcccctggccaccatctcgggctggctgtgcctgcggggcgccgtggaccacctgcactttagtagtcggctggaagccgtcggactgattgcactcactgtcgcactcttcactatttacctcttttggacactagtgtcatttaggtaccactgtcgattgtacaacgagtggcgtcggaccaatcagagggtgattctcctcattccaaagtctgtcaatgtaccttctaaccagccgtccttgctgggcctccattcggtcaagaggaactcaaaggagacagttgtttgatgtttgtatggttggttggttgtttgattcattgtttggggtttggaagtgtctgcactggggtcatgcactgagcgacccccaagcccttccttaagcctgtgggtctaagaacatccagagcatattagcacatcactccaagcaacaacctccgccagaagaaagcaaatgctgttttacttcaaatgatggatgctgcaatcatatgatatttgctaagctgccaaacatgtttatttagcagatactgtatggaattttctgaacacctctttaacgtatgaggaaggttgtcctgctacggatgcaattcaattcttccttttttattactatttcaaacacacacacatatatatatatattaaacttagatgataatcaaaatcaaaaagtcaacgtaaaaactggtttcttggtttggttgggtcttatttgagttagtttgtttctcagtttctcgtatggattctttggggtactttggtagcctgagtggtctttttcatctctttcgcgtccattactcaaggagacagcataacagatgcagaacaagtcatatttgaagaatgttttgtactaaacttcatttaattattcagtttttaaagggaaaaagggcgtgagctcacacagtgagctgtttatttaaatatcattaaggagaaaaaaaaatatggtgagaagctcgctcctttcaacttgtttggtactgacagctgatagaagctattttctaataataaacatccagtgtgtgaaagac

SEQ ID NO: 5758 - protein, 253 aa, Homo sapiens; identical to SEQ ID NO: 669

SEQ ID NO: 5759 - DNA, 809 bp, Homo sapiens
gcggccgccaggcttgccgcactccccctgaggtgcccgccggaaccaatgtgccctggtccactgggccgtgagcagccaccgactgggggcaacttggcacttagaaccgcagcagggacgtcggtttgctatcgggactcggcgaggacgctgcactttagtagtcggctggaagccgtcggactgattgcactcactgtcgcactcttcactatttacctcttttggacactagtgtcatttaggtaccactgtcgattgtacaacgagtggcgtcggaccaatcagagggtgattctcctcattccaaagtctgtcaatgtaccttctaaccagccgtccttgctgggcctccattcggtcaagaggaactcaaaggagacagttgtttgatgtttgtatggttggttggttgtttgattcattgtttggggtttggaagtgtctgcactggggtcatgcactgagcgacccccaagcccttccttaagcctgtgggtctaagaacatccagagcatattagcacatcactccaagcaacaacctccgccagaagaaagcaaatgctgttttacttcaaatgatggatgctgcaatcatatgatatttgctaagctgccaaacatgtttatttagcagatactgtatggaattttctgaacacctctttaacgtatgaggaaggttgtcctgctacggatgcaattcaattcttccttttttattactatttcaaacacacacacatatatatatatattaaacttagatgataatcaaaatcaaaaagtcaacgtaaaaactg

SEQ ID NO: 5760 - protein, 115 aa, Homo sapiens; identical to SEQ ID NO: 5754

SEQ ID NO: 5761 - DNA, 5086 bp, Homo sapiens
atgcgcctgactcacatctgctgctgctgcctcctttaccagctggggttcctgtcgaatgggatcgtttcagagctgcagttcgcccccgaccgcgaggagtgggaagtcgtgtttcctgcgctctggcgccgggagccggtggacccggctggcggcagcgggggcagcgcggacccgggctgggtgcgcggcgttgggggcggcggaagcgcccgggcgcaggctgccggcagctcacgcgaggtgcgctctgtggctccggtgcctttggaggagcccgtggagggccgatcagagtcccggctccggcccccgccgccgtcggagggtgaggaggacgaggagctcgagtcgcaggagctgccgcggggatccagcggggctgccgccttgtccccgggcgccccggcctcgtggcagccgccgcctcccccgcagccgcccccgtccccgcccccggcccagcatgccgagccggatggcgacgaagtgttgctgcggatcccggccttctctcgggacctgtacctgctgctccggagagacggccgcttcctggcgccgcgcttcgcagtggaacagcggccaaatcccggccccggccccacgggggcagcatccgccccgcaacctcccgcgccaccagacgcaggctgcttctacaccggagctgtgctgcggcaccctggctcgctggcttctttcagcacctgtggaggtggcctgatgggatttatacagctcaatgaggacttcatatttattgagccactcaatgatacaatggccataacaggtcacccacaccgtgtatataggcagaaaaggtccatggaggaaaaggtcacagagaagtcagctcttcacagtcattactgtggtatcatttcagataaaggaagacctaggtctagaaaaatagcagaaagtggaagagggaaacgatattcatacaaattacctcaagaatacaacatagagactgtagtggttgcagacccagcaatggtttcctatcatggagcagatgcagccaggagattcattctaaccatcttaaatatggtatttaaccttttccaacacaagagtctgagtgtgcaggtcaatcttcgtgtgataaagcttattctgctccatgaaactccaccagaactatatattgggcatcatggagaaaaaatgctagagagtttttgtaagtggcaacatgaagaatttggcaaaaagaatgatatacatttagagatgtcaacaaactggggggaagacatgacttcagtggatgcagctatacttataacaaggaaagatttctgtgtgcacaaagatgaaccatgtgatactgttggtatagcttacttgagtggaatgtgtagtgaaaagagaaaatgtattattgctgaagacaatggcttgaatcttgcttttacaattgctcatgaaatgggtcacaacatgggcattaaccatgacaatgaccacccatcgtgtgctgatggtcttcatatcatgtctggtgaatggattaaaggacagaatcttggtgacgtttcatggtctcgatgtagcaaggaagatttggaaagatttctcaggtcaaaggccagtaactgcttgctacaaacaaatccgcagagtgtcaattctgtgatggttccctccaagctgccagggatgacatacactgctgatgaacaatgccagatcctttttgggccattggcttctttttgtcaggagatgcagcatgttatttgcacaggattatggtgcaaggtagaaggtgagaaagaatgcagaaccaagctagacccaccaatggatggaactgactgtgaccttggtaagtggtgtaaggctggagaatgtaccagcaggacctcagcacctgaacatctggccggagagtggagcctgtggagtccttgtagccgaacctgcagtgctgggatcagcagtcgagagcgcaaatgtcctgggctagattctgaagcaagggattgtaatggtcccagaaaacaatacagaatatgtgagaatccaccttgtcctgcaggtttgcctggattcagagactggcaatgtcaggcttatagtgttagaacttcctccccaaagcatatacttcagtggcaagctgtcctggatgaagaaaaaccatgtgccttgttttgctctcctgttggaaaagaacagcctattcttctatcagaaaaagtgatggatggaacttcttgtggctatcagggattagatatctgtgcaaatggcaggtgccagaaagttggctgtgatggtttattagggtctcttgcaagagaagatcattgtggtgtatgcaatggcaatggaaaatcatgcaagatcattaaaggggattttaatcacaccagaggagcaggttatgtagaagtgctggtgatacctgctggagcaagaagaatcaaagttgtggaggaaaagccggcacatagctatttagctctccgagatgctggcaaacagtctattaatagtgactggaagattgaacactctggagccttcaatttggctggaactaccgttcattatgtaagacgaggcctctgggagaagatctctgccaaaggtcctactacagcacctttacatcttctggtgctcctgtttcaggatcagaattatggtcttcactatgaatacactatcccatcagaccctcttccagaaaaccagagctctaaagcacctgagcccctcttcatgtggacacacacaagctgggaagattgcgatgccacttgtggaggaggagaaaggaagacaacagtgtcctgcacaaaaatcatgagcaaaaatatcagcattgtggacaatgagaaatgcaaatacttaaccaagccagagccacagattcgaaagtgcaatgagcaaccatgtcaaacaaggtggatgatgacagaatggaccccttgttcacgaacttgtggaaaaggaatgcagagcagacaagtggcctgtacccaacaactgagcaatggaacactgattagagcccgagagagggactgcattgggcccaagcccgcctctgcccagcgctgtgagggccaggactgcatgaccgtgtgggaggcgggagtgtggtctgagtgttcagtcaagtgtggcaaaggcatacgtcatcggaccgttagatgtaccaacccaagaaagaagtgtgtcctctctaccagacccagggaggctgaagactgtgaggattattcaaaatgctatgtgtggcgaatgggtgactggtctaagtgctcaattacctgtggcaaaggaatgcagtcccgtgtaatccaatgcatgcataagatcacaggaagacatggaaatgaatgtttttcctcagaaaaacctgcagcatacaggccatgccatcttcaaccctgcaatgagaaaattaatgtaaataccataacatcacccagactggctgctctgactttcaagtgcctgggagatcagtggccagtgtactgccgagtgatacgtgaaaagaacctatgtcaggacatgcggtggtatcagcgctgctgtgaaacatgcagggacttctatgcccaaaagctgcagcagaagagttgacctctagcaggctggctggatcacagctcttggcaattacattatttataaacacacacactagcatgtttttcagaccaaatattatcagattacatataatttaatcaaattaatttatttttttgcctgccaaacatccaatgtggtgcttgttttggttacacaaacattttgatttatactatatggcttcataaataattttatatgaatgaattagttggatccagtaatataataaaaagaaaaaggaaaaaaatagatcattatacttaaaacaagttttcgttgtttgttagggctatctctaaggtgctactctctccccaccaataacattgaattatccagaatgtatactgacttagcataatagtttaggtgtatatgaagagaaactatttttgttttttggtgtcctgctgcagaattagcccattttctgtcacctgcaggagatgtgtaaacataatgaacctcatgctgttgaacaggtttttagagaatgtattatgaatttggttcagatttatagacatccataggaaaaattctgctgtaattataaccttattttgatatggaaaagaaaagtcaaaatagagactttgatcatgttcatgaacatgtacttgaacacaagtattgtaacaatgaaacactgtaatgatttacactgaatcacaattgcactgttgatatagtgtagagaaatcgttagaaatggtgacatcttacaaaaaatgtgtattattttaacatgttatcactagattttagctttttttaaatatttttaacaaagaaaacattgatccacccatttccctgtatctttttagcagatttattaaagagtatagtacttagcctcacgaatcataattagaaaatttactagtatttctcagccttttccctaggaacaaggaaaaacagaaagcatataatacggtggtcgtttcattgtgtttttcttccttttaaaaattaaaaagttttacaattatgtgaaacgttcaaaagccagcttaaaatttttcttgtgagaaaatattatacatgattcacatgatttcttagatttttcaataaaatatgtaaaacttcccactgagagacaattcttcatagacttgtcacatatccacatgtctgatgaacaaaggtactgtctacttttgttctggagtatcttctagaggatgtttatagagtgaactgccttggaagatagtatgtctcttgggagcaaagggcaaacatacttctcattataaaagtttcaggttccctaaaattggggtttctttactataagacaatccaatgtatgttctgaggtcacctggctctcttcatgtcaccctttgggaaatggggctcaacgagccagtacaggaaaagctgattccctggctactactatcgctgtgagtaataaagtcctttgtgtcta

SEQ ID NO: 5762 - protein, 1207 aa, Homo sapiens; identical to SEQ ID NO: 671

SEQ ID NO: 5763 - DNA, 4344 bp, Homo sapiens
agacgcaggctgcttctacaccggagctgtgctgcggcaccctggctcgctggcttctttcagcacctgtggaggtggcctgatgggatttatacagctcaatgaggacttcatatttattgagccactcaatgatacaatggccataacaggtcacccacaccgtgtatataggcagaaaaggtccatggaggaaaaggtcacagagaagtcagctcttcacagtcattactgtggtatcatttcagataaaggaagacctaggtctagaaaaatagcagaaagtggaagagggaaacgatattcatacaaattacctcaagaatacaacatagagactgtagtggttgcagacccagcaatggtttcctatcatggagcagatgcagccaggagattcattctaaccatcttaaatatggtaggcaaactttaaagtgcgcttggaattttttcaagaaaactctaaggaagacatgtgtatttaaccttttccaacacaagagtctgagtgtgcaggtcaatcttcgtgtgataaagcttattctgctccatgaaactccaccagaactatatattgggcatcatggagaaaaaatgctagagaaaaatgtattattgctgaagacaatggcttgaatcttgcttttacaattgctcatgaaatgggtcacaacatgggcattaaccatgacaatgaccacccatcgtgtgctgatggtcttcatatcatgtctggtgaatggattaaaggacagaatcttggtgacgtttcatggtctcgatgtagcaaggaagatttggaaagatttctcaggtcaaaggccagtaactgcttgctacaaacaaatccgcagagtgtcaattctgtgatggttccctccaagctgccagggatgacatacactgctgatgaacaatgccagatcctttttgggccattggcttctttttgtcaggagatgcagcatgttatttgcacaggattatggtgcaaggtagaaggtgagaaagaatgcagaaccaagctagacccaccaatggatggaactgactgtgaccttggtaagtggtgtaaggctggagaatgtaccagcaggacctcagcacctgaacatctggccggagagtggagcctgtggagtccttgtagccgaacctgcagtgctgggatcagcagtcgagagcgcaaatgtcctgggctagattctgaagcaagggattgtaatggtcccagaaaacaatacagaatatgtgagaatccaccttgtcctgcaggtttgcctggattcagagactggcaatgtcaggcttatagtgttagaacttcctccccaaagcatatacttcagtggcaagctgtcctggatgaagaaaaaccatgtgccttgttttgctctcctgttggaaaagaacagcctattcttctatcagaaaaagtgatggatggaacttcttgtggctatcagggattagatatctgtgcaaatggcaggtgccagaaagttggctgtgatggtttattagggtctcttgcaagagaagatcattgtggtgtatgcaatggcaatggaaaatcatgcaagatcattaaaggggattttaatcacaccagaggagcaggttatgtagaagtgctggtgatacctgctggagcaagaagaatcaaagttgtggaggaaaagccggcacatagctatttagctctccgagatgctggcaaacagtctattaatagtgactggaagattgaacactctggagccttcaatttggctggaactaccgttcattatgtaagacgaggcctctgggagaagatctctgccaaaggtcctactacagcacctttacatcttctggtgctcctgtttcaggatcagaattatggtcttcactatgaatacactatcccatcagaccctcttccagaaaaccagagctctaaagcacctgagcccctcttcatgtggacacacacaagctgggaagattgcgatgccacttgtggaggaggaatattgccttaaaatctctgatgaaggctgatcatctcaggagaaaggaagacaacagtgtcctgcacaaaaatcatgagcaaaaatatcagcattgtggacaatgagaaatgcaaatacttaaccaagccagagccacagattcgaaagtgcaatgagcaaccatgtcaaacaaggtggatgatgacagaatggaccccttgttcacgaacttgtggaaaaggaatgcagagcagacaagtggcctgtacccaacaactgagcaatggaacactgattagagcccgagagagggactgcattgggcccaagcccgcctctgcccagcgctgtgagggccaggactgcatgaccgtgtgggaggcgggagtgtggtctgagtgttcagtcaagtgtggcaaaggcatacgtcatcggaccgttagatgtaccaacccaagaaagaagtgtgtcctctctaccagacccagggaggctgaagactgtgaggattattcaaaatgctatgtgtggcgaatgggtgactggtctaagtgctcaattacctgtggcaaaggaatgcagtcccgtgtaatccaatgcatgcataagatcacaggaagacatggaaatgaatgtttttcctcagaaaaacctgcagcatacaggccatgccatcttcaaccctgcaatgagaaaattaatgtaaataccataacatcacccagactggctgctctgactttcaagtgcctgggagatcagtggccagtgtactgccgagtgatacgtgaaaagaacctatgtcaggacatgcggtggtatcagcgctgctgtgaaacatgcagggacttctatgcccaaaagctgcagcagaagagttgacctctagcaggctggctggatcacagctcttggcaattacattatttataaacacacacactagcatgtttttcagaccaaatattatcagattacatataatttaatcaaattaatttatttttttgcctgccaaacatccaatgtggtgcttgttttggttacacaaacattttgatttatactatatggcttcataaataattttatatgaatgaattagttggatccagtaatataataaaaagaaaaaggaaaaaaatagatcattatacttaaaacaagttttcgttgtttgttagggctatctctaaggtgctactctctccccaccaataacattgaattatccagaatgtatactgacttagcataatagtttaggtgtatatgaagagaaactatttttgttttttggtgtcctgctgcagaattagcccattttctgtcacctgcaggagatgtgtaaacataatgaacctcatgctgttgaacaggtttttagagaatgtattatgaatttggttcagatttatagacatccataggaaaaattctgctgtaattataaccttattttgatatggaaaagaaaagtcaaaatagagactttgatcatgttcatgaacatgtacttgaacacaagtattgtaacaatgaaacactgtaatgatttacactgaatcacaattgcactgttgatatagtgtagagaaatcgttagaaatggtgacatcttacaaaaaatgtgtattattttaacatgttatcactagattttagctttttttaaatatttttaacaaagaaaacattgatccacccatttccctgtatctttttagcagatttattaaagagtatagtacttagcctcacgaatcataattagaaaatttactagtatttctcagccttttccctaggaacaaggaaaaacagaaagcatataatacggtggtcgtttcattgtgtttttcttccttttaaaaattaaaaagttttacaattatgtgaaacgttcaaaagccagcttaaaatttttcttgtgagaaaatattatacatgattcacatgatttcttagatttttcaataaaatatgtaaaacttcccactgagagacaattcttcatagacttgtcacatatccacatgtctgatgaacaaaggtactgtctacttttgttctggagtatcttctagaggatgtttatagagtgaactgccttggaagatagtatgtctcttgggagcaaagggcaaacatacttctcattataaaagtttcaggttccctaaaattggggtttctttactataagacaatccaatgtatgttctgaggtcacctggctctcttcatgtcaccctttgggaaatggggctcaacgagccagtacaggaaaagctgattccctggctactactatcgctgtgagtaataaagtcctttgtgtcta

SEQ ID NO: 5764 - protein, 454 aa, Homo sapiens [sequence omitted]

SEQ ID NO: 5765 - DNA, 513 bp, Homo sapiens
aaggttgaagaagaaataaagaagcacggaagtaataacatgggattatcagaaaacctgactgattgtgctgctgctggcaatggtgatgatggactaattccacaaagagcagaaaacctgaaaatcagcaatttcctaggacggagaatgaagagtatcatagggttgaagatggcatggcctgtatgctgcaggtttttctgaggaaaaacattcatttccatgtcttcctgtgatcttatgcatgcattggattacacgggactgcattcctttgccacagatgaaaatatagccagaaagtatcccaacagatacccaaagactaaggcaggcgttgcaagtgactacctgagaagatgaattcaccatcctcacaggaaaagactgagatccccagagactgaggagcatctctgaagaaaagagtctcccaagaagccacaaatgtgacccatgaaagactctccatttaaagcacttggcaaatgcggagctcagcaataatat

SEQ ID NO: 5766 - protein, 55 aa, Homo sapiens
MGLSENLTDCAAAGNGDDGLIPQRAENLKISNFLGRRMKSIIGLKMAWPVCCRFF

SEQ ID NO: 5767 - DNA, 621 bp, Homo sapiens
atggtgggagaagatggagaggctgagacgaaacttgtgaagggagacatggatctctctgttttgccaaataacaaccatcctgacaaattcctgcagcttgacgtaaagtctttaacgaggagctcagccctccttcaggccagcctggtgaggtttccgggtggaaattatcctgctgcacaacactggcaaaaccttgtctactcacagagggaaaagaagaatattgctgctcaacgaattaggggatccagtgcagacagccttgtcactgctgatagccccccaccatccatgtcatcagttatgaagaataacccactctatggtgacctaagtttggaggaagctatggaagaaagaaaaaagaacccctcatggaccattgaggaatatgacaaacattccctgcacacaaacctctctggacatctgaaggaaaatcctaatgacctgcggttttggttgggagacatgtacactccaggttttgacactttattgaaaaaggaagagaaacaagagaagcattcaaaattctgtcgtatgggtctgattttacttgtcgttatctccatcttggttaccatagtgactatcattacttttttcacctga

SEQ ID NO: 5768 - protein, 206 aa, Homo sapiens
MVGEDGEAETKLVKGDMDLSVLPNNNHPDKFLQLDVKSLTRSSALLQASLVRFPGGNYPAAQHWQNLVYSQREKKNIAAQRIRGSSADSLVTADSPPPSMSSVMKNNPLYGDLSLEEAMEERKKNPSWTIEEYDKHSLHTNLSGHLKENPNDLRFWLGDMYTPGFDTLLKKEEKQEKHSKFCRMGLILLVVISILVTIVTIITFFT

SEQ ID NO: 5769 - DNA, 324 bp, Homo sapiens
tgttcaggctctgaatgggttggatgatgccctcccatattgcggtggccaatatgctttactcagtctacagattcaaatgctaatctcttctggaaacaaactcacagacacactcaaaaataatgtttaactagatatctggacatccggtgtcaaggttgaagaagaaataaagaagcacggaagtaataacatgggattatcagaaaacctgactgattgtgctgctgctggcaatggtgatgatggactaattccacaaagagcagaaaacctgaaaatcagcaatttcctaggacggagaatgaagagtatcatagg

SEQ ID NO: 5770 - protein, 41 aa, Homo sapiens
MGLSENLTDCAAAGNGDDGLIPQRAENLKISNFLGRRMKSI

SEQ ID NO: 5771 - DNA, 286 bp, Homo sapiens
caggctggaaagccggcgcagggaggtcacctttgatgtagacatcgtcgtcggcgcgcatgaaccactcatacttgtccagaaatcagcatgagaagatgatcaaaattcatatattgaaacatgaaaaggctctgaatgggttggatgatgccctcccatattgcggtggccaatatgctttactcagtctacagattcaaatgctaatctcttctggaaacaaactcacagacacactcaaaaataatgtttaactagatatctggacatccggtgctcaagg

SEQ ID NO: 5772 - protein, 65 aa, Homo sapiens
MNHSYLSRNQHEKMIKIHILKHEKALNGLDDALPYCGGQYALLSLQIQMLISSGNKLTDTLKNNV

SEQ ID NO: 5773 - DNA, 2020 bp, Homo sapiens
agaacgagattccgagactggattgcgatgcgccagcctggcacactctccgagatttaactgaaggcagcgccgtcaaccgctttcccctcgcccctaaccccctcaggccggcccagagccataaagctctgttctctttacccaagatgctcgcccaatccaacggtccgaggccagcgctctgatctccacagaagatttttttccttgcagggagctggccgtttaaacagaaaaacaggggtttaaaaaaaaaaaaaaaaaaaaggaaatatacccacccccaaacgtgcctccccagcgccgcagggagccaacagacacgctggagtttaacaaacagcaatactcttcgcgctcctgaaaagcaggtctggacgctctccgtggtgctgaaacgcctcgcagccgccgctgtccgtggtatctacgaccccctcgctccaatttcccctggggctctccctccgcgcccctgttccccgcctccctttaacatctggattattttttgcaatagcgctttctggttttgtaagtgccaatttgaaacatttttgcccccataactcgtggactacaaagcacaaggacctgaaaaatgtacagcttcaatactcttcgactctacctttgggagaccattgtattcttcagccttgctgcttctaaggaggctgaagctgctcgctccgcacccaagcctatgtcaccctcggatttcctggataagctaatggggagaacctccggatatgatgccaggatcaggcccaattttaaaggtcccccagtgaacgtgagctgcaacattttcatcaacagctttggttccattgctgagacaaccatggactatagggtcaacatcttcctgcggcagcaatggaacgacccccgcctggcctataatgaataccctgacgactctctggacctggacccatccatgctggactccatctggaaacctgacctgttctttgccaacgagaagggggcccacttccatgagatcaccacagacaacaaattgctaaggatctcccggaatgggaatgtcctctacagcatcagaatcaccctgacactggcctgccccatggacttgaagaatttccccatggatgtccagacatgtatcatgcaactggaaagctttggatatacgatgaatgacctcatctttgagtggcaggaacagggagccgtgcaggtagcagatggactaactctgccccagtttatcttgaaggaagagaaggacttgagatactgcaccaagcactacaacacaggtaaattcacctgcattgaggcccggttccacctggagcggcagatgggttactacctgattcagatgtatattcccagcctgctcattgtcatcctctcatggatctccttctggatcaacatggatgctgcacctgctcgtgtgggcctaggcatcaccactgtgctcaccatgaccacccagagctccggctctcgagcatctctgcccaaggtgtcctatgtgaaagccattgacatttggatggcagtttgcctgctctttgtgttctcagccctattagaatatgctgccgttaactttgtgtctcggcaacataaggagctgctccgattcaggaggaagcggagacatcacaaggaggatgaagctggagaaggccgctttaacttctctgcctatgggatgggcccagcctgtctacaggccaaggatggcatctcagtcaagggcgccaacaacagtaacaccaccaacccccctcctgcaccatctaagtccccagaggagatgcgaaaactcttcatccagagggccaagaagatcgacaaaatatcccgcattggcttccccatggccttcctcattttcaacatgttctactggatcatctacaagattgtccgtagagaggacgtccacaaccagtgaagggtctgaaaggttgggggaggctgggagaggggaacgtgggaatagcacaggaatctgagagac

SEQ ID NO: 5774 - protein, 449 aa, Homo sapiens
MYSFNTLRLYLWETIVFFSLAASKEAEAARSAPKPMSPSDFLDKLMGRTSGYDARIRPNFKGPPVNVSCNIFINSFGSIAETTMDYRVNIFLRQQWNDPRLAYNEYPDDSLDLDPSMLDSIWKPDLFFANEKGAHFHEITTDNKLLRISRNGNVLYSIRITLTLACPMDLKNFPMDVQTCIMQLESFGYTMNDLIFEWQEQGAVQVADGLTLPQFILKEEKDLRYCTKHYNTGKFTCIEARFHLERQMGYYLIQMYIPSLLIVILSWISFWINMDAAPARVGLGITTVLTMTTQSSGSRASLPKVSYVKAIDIWMAVCLLFVFSALLEYAAVNFVSRQHKELLRFRRKRRHHKEDEAGEGRFNFSAYGMGPACLQAKDGISVKGANNSNTTNPPPAPSKSPEEMRKLFIQRAKKIDKISRIGFPMAFLIFNMFYWIIYKIVRREDVHNQ

SEQ ID NO: 5775 - DNA, 3591 bp, Homo sapiens
gctagaatgcactgtctttgaagcattgagcaggccctcaccagacaccaaatctgctggttcctggatcttggacttcccagcctcataactaggcatcacaaatctccgagaggaacgcatccacttcctggcctggtagagcggagagcagaggtgggcccaggagtccaagaacttcccctaaggctgctagtcgcacccatctcttgagcagagacccaagagggcaggacaggaagaatggaagtgagatttggccccggtcatgttttccaaagtgctgacatcaggaaaataatagaagttaacgcagatatggggctgccactgaggagagagaagactgaaagaagcatatagataaaagtttcagttacctgaggtcaaccttggtctgaaattagattatctgagtaggctgaaccatcggtgaaaaggaggccaagcatctcaaaaataggacacgtgagagtatggagccaatgtgacactcaggtgagttagccttatgatccctaagcatgcagtccttggaccagatgcatcaggatcttctggtaagtgtgctaaaatataggctactgagacccaccctatgtctgtcaaatcagaatattctaaggaagcaggtcccagggaatatatattttaaagctccctaaatacacttcatgggctgccagatttgggaatcgcaggattaggtagctacctaaatgaagacacttaaatgtgccaaaagcttctctttcacccatccatttatccatctattcacccatccatcaaccaaacatgtgccagtatctggtatttgcttcatgacctgctactgctgtggtgggtgcaaagataaatgatcaatgttctcaaagagtcaatagtctaagagaatggatgaatgaagtataaataataaaagatgtgctatgaagtacgataggggtccagaaaagtatatacttattccagattgtggcagaagactctggagaggtttcgttttatataatggcatgaattccccttcagatccatctctaaatcaagcttcacctacttctgactgtttgtgttagataccaatcctatggatttctatagttttctggaattactttttacacactacagtagagttatgtggctgcttccatgttttacttagaagctgagagcttgataaaagtgaaggctgcatcttaatcatcaccttttcccccacctcctagctagggtctggctctgcctaagcagctgccattggtgctcaataaacattgaagaagttgggttgttgcactggttatgcaaagaaagggacacagtgggtgtaagcgtggggcggggagcaaagctgggaccaatcatggaacacctagaatttgaatcaaatttgggctttagtttttaggcaatgagcctaagacaattttggaagcatcctttgttcacaaaaaagttagaaatggtgagaactagggcagtctatcacaaagtgtgggagaggtaattttatatgtaaactattataaatcacatttgagttatgaagtgagacaattattccctttgcagtttcatttcattctgtctaattatttcagggagacattctgaattgggtgctagtattttaacacttctctaacactttctctttttaaattttgtttatttttaattgacaaataataattgtgtatatttatggggtacattgggcatggagggtgggttattctgtgatgtcttgacctgtgtgtacattgtaacacttctctaatactttctaatccagccatccccaacctttttggcaccaggaaccagttttgtggaagacgatttttccacagatggttgggggatgattttgggatggaactattccacctcagatcatcaggcattagattctcataagaagcatgcaacgtagatccctcacatatacagttcacaatagggttcatggttctatgagaatctaatgctgccactgatctaacaggaggcagagctcagctgataatgctttttcacctgctactgacttcctgctgtgttgcccagttcctaacaggccatagactggtaccagtccatagcctggggcttgaggacccctgctctatgatgtctatacaacaataaaattgcctaatgatacatttctcagaatgtatacccatcattaagtgacacatggctgcttgtgtatttttatatatagctaaatgtggctagattagatgtgatatctctttggatgcagggataggtgggcaagtttctaaaacacgaaactaactgtgtcttttctctgcttaagaaccttccatgactccctgttgttcataaccggataaattctaagctgcctaactcagaattctagcttagagatgtctacgcctggctgctcccaacagttagtctcatgtcctgtctcaaacatggggcttcagtaagaatgaaatttccaaggagaattttatattctgcatgcctttaaaggctcaagcctggagaccccccttcttgcctctcttacccttttcaccagggcaccctctattcatccttccagagccttctctgggaagtcctttcccaaagcccacttcccagcctaagcttagtgctatttctgtagatacccagaaacacatcaactatatgtacagtttaccctagtatgtcaaagttatagttactgccttaggagggattttgagcttttcatctttattactcgggcttctgctactgtgtcaagcaggtagttgacactcaacaaatgtttgtttagcctaactcagcagaacacatggagtgtgttcacatggagtaacctgattttgcttagtctgcaacatttcttgcatgcatcccctgcttgcagtctcaattacagtcatcctgtttcagttttcttaacttgtcactcccttcctctgataacttttgccatacctctgtataacatggcctactttttgaaaaagatttttttacattcacctacatttgtctcaaatttttttttaaaagaaactttgtattactaccgtcattgaaaaccttcatcacttggcacaaaagaaagtttaaaaaatacaacaaaagacattctactaaattctggctagacaaccttgcctgctctagtagatgcactgagaccattaatgaatctttcatcccaccttgtgtcatattctttgccacatgactttgggtctccctcactactaggcaagttcctgtctccatctcttgattctgaattcagccataatacttgctctccccaatgttgttttagcagatttgacacatacagaagcgtgaaaaactcttgtgtgactgggatagctcctctgcaatgagaacatgcctgggataatgtactgaaaagatgtgagaaatacatgaagcagagtccagtcatcccagccaagaaccagctgtgaatgtaaccgcatgactttgaggcaagtccagaccaagaacaaagaaccactggtcttaaagacagacctgcagattcctgagctaaataaaagtttattgttgaaaggc

SEQ ID NO: 5776 - protein, 39 aa, Homo sapiens
MEVRFGPGHVFQSADIRKIIEVNADMGLPLRREKTERSI

SEQ ID NO: 5777 - DNA, 428 bp, Homo sapiens
catcaggaaaataatagaagttaacgcagatatggggctgccactgaggagagagaagactgaaagaagcatatagataaaagattatctgagtaggctgaaccatcggtgaaaaggaggccaagcatctcaaaaataggacacgtgagagtatggagccaatgtgacactcagatttgacacatacagaagcgtgaaaaactcttgtgtgactgggatagctcctctgcaatgagaacatgcctgggataatgtactgaaaagatgtgagaaatacatgaagcagagtccagtcatcccagccaagaaccagctgtgaatgtaaccgcatgactttgaggcaagtccagaccaagaacaaagaaccactggtcttaaagacagacctgcagattcctgagctaaataaaagtttattgttgaaaggc

SEQ ID NO: 5778 - protein, 32 aa, Homo sapiens
MTLRQVQTKNKEPLVLKTDLQIPELNKSLLLK

SEQ ID NO: 5779 - DNA, 474 bp, Homo sapiens
accccatgactggtatagaactgaaagtaaatcaagctggacttatgaaggattcctctctccattcgtggatgaatttgagtggcactggaacaagtttcagttacctgaggtcaaccttggtctgaaattagattatctgagtaggctgaaccatcggtgaaaaggaggccaagcatctcaaaaataggacacgtgagagtatggagccaatgtgacactcagatttgacacatacagaagcgtgaaaaactcttgtgtgactgggatagctcctctgcaatgagaacatgcctgggataatgtactgaaaagatgtgagaaatacatgaagcagagtccagtcatcccagccaagaaccagctgtgaatgtaaccgcatgactttgaggcaagtccagaccaagaacaaagaaccactggtcttaaagacagacctgcagattcctgagctaaataaaagtttattgttga

SEQ ID NO: 5780 - protein, 40 aa, Homo sapiens
MTGIELKVNQAGLMKDSSLHSWMNLSGTGTSFSYLRSTLV

SEQ ID NO: 5781 - DNA, 672 bp, Homo sapiens
accagcgtggaagccagtggggctgaaagcagaggaatacagtggagacagggccttgctctgtcactcagggtggagtgcactggcacaatcatggctcactgcaacctcgacctcctgagcttaagtgatcctcctgcctcagcctcctgagtagctgggactacagacagaagccagcatgccctgcctatttttaggaacaaaagtatctctcaactcttagcaagatttttatttttatacattatagtgaaaagtgttgtagaaacatatctaggaccacttgatgttgagaaaatatttatattgaatgttttccttgcatttatttctgttaggaaaaaaatagcaatgaaaagcattattagtctgggtggttctttttcagatgcaaaaatcactcaaactgaaatcctttttatactcaaattgggcctgccagctttaaaagagggcagtcaggataatatgataaactggcccatgcgctcaatcttagctcatcaaggctgtgccagaactgacattttcgtacagtatggcttgatgctctgattacaaattggtcttgagcagctatactctttgtaattttattcactgagggattgtgtttgtatcattaggtctgttttggttttgaaacctgaagtaaaaaatacatcactg

SEQ ID NO: 5782 - protein, 67 aa, Homo sapiens [sequence omitted]

SEQ ID NO: 5783 - DNA, 938 bp, Homo sapiens
gagcagaagaaagagaggacttatctccagcatctagcactacagagcagaggctgtgtggagaatggctgaaaaatcagaattggttgtagaagcagttttctttctggttgtgagtatgagcccggcagacaccatgagcgctgttgcaggggagtcggcctgtgcttgacacatgtgtttcccattgatagctggagacagcccagtagctgtgagtcggtctgacaaagccatattgaagtacggagtacggtttcaaagcagtcagaaaaagaacgggaatgctgttcaggaaattcttcaggcatgggcagggacttggctgcagttctgcagttggaaaatctgactggggcagcttctgagcgcaggctgggcctgcacacactcagcgggccgagtggccacctccttcagagctgctcagcacgccctgggatcgcgggcggttttcatcggccggtttgtgaaacggacaagagagagacattactgccgggagtgttgagtgaagggaccaggtggagatgatgcctcaggagcagtacactcaccaccggagcaccatgcctggctctgtggggccacaggtatacaaggtggggatttatggctggcggaaacgatgcctgtatttctttgtcctgctcctcatgattttaatactggtgaacttggccatgaccatctggattctcaaagtcatgaacttcacaattagcatccatctgcttctgagatttaactggctattcagatgttgtggaatgagctgagaggagccagaaccaggagccaggtgactcagattccagtacccactttgctgctggatggaatgggaaacctgaggatcacagaaaaaggtctaaagctagaaggagactctgaattcttacaacctctctacgccaaagaaatccagtcccgaccag

SEQ ID NO: 5784 - protein, 82 aa, Homo sapiens
MMPQEQYTHHRSTMPGSVGPQVYKVGIYGWRKRCLYFFVLLLMILILVNLAMTIWILKVMNFTISIHLLLRFNWLFRCCGMS

SEQ ID NO: 5785 - DNA, 1584 bp, Homo sapiens
gagcagaagaaagagaggacttatctccagcatctagcactacagagcagaggctgtgtggagaatggctgaaaaatcagaattggttgtagaagcagttttctttctggttgtgagtatgagcccggcagacaccatgagcgctgttgcaggggagtcggcctgtgcttgacacatgtgtttcccattgatagctggagacagcccagtagctgtgagtcggtctgacaaagccatattgaagtacggagtacggtttcaaagcagtcagaaaaagaacgggaatgctgttcaggaaattcttcaggcatgggcagggacttggctgcagttctgcagttggaaaatctgactggggcagcttctgagcgcaggctgggcctgcacacactcagcgggccgagtggccacctccttcagagctgctcagcacgccctgggatcgcgggcggttttcatcggccggtttgtgaaacggacaagagagagacattactgccgggagtgttgagtgaagggaccaggtggagatgatgcctcaggagcagtacactcaccaccggagcaccatgcctggctctgtggggccacaggtatacaaggtggggatttatggctggcggaaacgatgcctgtatttctttgtcctgctcctcatgattttaatactggtgaacttggccatgaccatctggattctcaaagtcatgaacttcacaattgatggaatgggaaacctgaggatcacagaaaaaggtctaaagctagaaggagactctgaattcttacaacctctctacgccaaagaaatccagtcccgaccaggtaatgccctgtacttcaagtctgccagaaatgttacagtgaacattctcaatgaccagactaaagtgctaactcagcttataacaggtccaaaagccgtagaagcttatggtaaaaaatttgaggtaaaaactgtttctggaaaattgctcttctctgcagacaataatgaagtggtagtaggagctgaaagattacgagttttaggagcggagggcacagtgttccctaaatctatagaaacacctaatgtcagggcagaccccttcaaagaactaaggttggagtccccaacccggtctctagtgatggaggccccaaaaggagtggaaatcaatgcagaagctggcaatatggaagccacctgcaggacagagctgagactggaatccaaagatggagaggtgagggatgagaaggacagaagttcaaagagctacagcttcaacaggccaacccttcccataactggttgacctcggagttggatcctacagtgtatcaacaaaaggagccaagcaggttttatttctgaaacaattaattgagcagcatgattataagccaaacccacaatccatcaaagtgatgatttcttatttgtaaaatgcagagataatggcatgtattccaagtacagaattatatgaccatgaaaatgaatgctattttcaaattctctcttgtcaccttaaaataagattttgttagccaacataattaagctgtatatattatacacatctggctcaagatgaa

SEQ ID NO: 5786 - protein, 256 aa, Homo sapiens; identical to SEQ ID NO: 677

SEQ ID NO: 5787 - DNA, 9803 bp, Homo sapiens
gagcagaagaaagagaggacttatctccagcatctagcactacagagcagaggctgtgtggagaatggctgaaaaatcagaattggttgtagaagcagttttctttctggttgtgagtatgagcccggcagacaccatgagcgctgttgcaggggagtcggcctgtgcttgacacatgtgtttcccattgatagctggagacagcccagtagctgtgagtcggtctgacaaagccatattgaagtacggagtacggtttcaaagcagtcagaaaaagaacgggaatgctgttcaggaaattcttcaggcatgggcagggacttggctgcagttctgcagttggaaaatctgactggggcagcttctgagcgcaggctgggcctgcacacactcagcgggccgagtggccacctccttcagagctgctcagcacgccctgggatcgcgggcggttttcatcggccggtttgtgaaacggacaagagagagacattactgccgggagtgttgagtgaagggaccaggtggagatgatgcctcaggagcagtacactcaccaccggagcaccatgcctggctctgtggggccacaggtatacaaggtggggatttatggctggcggaaacgatgcctgtatttctttgtcctgctcctcatgattttaatactggtgaacttggccatgaccatctggattctcaaagtcatgaacttcacaattgatggaatgggaaacctgaggatcacagaaaaaggtctaaagctagaaggagactctgaattcttacaacctctctacgccaaagaaatccagtcccgaccaggtaatgccctgtacttcaagtctgccagaaatgttacagtgaacattctcaatgaccagactaaagtgctaactcagcttataacaggtccaaaagccgtagaagcttatggtaaaaaatttgaggtaaaaactgtttctggaaaattgctcttctctgcagacaataatgaagtggtagtaggagctgaaagattacgagttttaggagcggagggcacagtgttccctaaatctatagaaacacctaatgtcagggcagaccccttcaaagaactaaggttggagtccccaacccggtctctagtgatggaggccccaaaaggagtggaaatcaatgcagaagctggcaatatggaagccacctgcaggacagagctgagactggaatccaaagatggagagattaagttagatgctgcgaaaatcaggctacctagactgcctcatggatcctacacgcctacaggaacgaggcagaaggtcttcgagatctgcgtctgcgccaatgggagattattcctgtctcaggcaggagctgggtccacttgtcagataaacacaagtgtctgcctctgaaagactatccatagtggacattgttggcagcataaaggccttttttggctttagacactggctgccagctatttttactagaacacagaaagcctatcaaagaccttgtgtgtatgtgtacgtgtgtgtgcgtgcttgagtgtgttcgcgtgtgtgggtggatataaatatatataaatatatataaataaatatatatatcctctgtataaaatgaggtttcagtacaaaaggaaccatgggtgaccctgcgatatccactgtcattttccatcccatccccaccacctgagtgacagaaatctaaacacacatccgtcccaacattccccagaccattcagaatcacacagcgtattaaacactgacagaatcttcatctagatattcgagtagcagcatatcttctcttttagtgtcattacgagggagtgatggcgggaatctcagtcgcactcaagctctgagacctttgtatcaaaaataggcatttgatttcctgttttagctttagtaaggctggctaacttccccctcttcaagctaggaactggcaatgctgtagaagtcagccgtaggaattcaaaatggctggcctaccttggctaccagacatattggggtttttgtagttgaatgaatgaggaggatgaatttcagcaaattttgaactgctcacccaacttctgctatcttgctccctccaaactcacagattctcctacagtcaaattaggagctgtaaatcagcacaaaataagataacagctgttcctcagtgagctggaagctacttaatggcctgatgggcaatgaacaaacgggtgatatgtctctgtttaagggaaaaatggcttaaaagctgttctgttctcacttctgactttaaccaaaagatttcaacccacaatgatcaggtcaatcaaaatccctaagagcagaactcctaccccaaaagaagcctggaagtctaattaagagtagcataaggaacctaattatgtttaccatgtttcttgggattggtgggaaatgtcaaaacatgccctttatttttaaaggcattcacaaactctctgactttgttcttcttatatattttttcagtgccgggatattcatattcctaaagccactattgtgttttctctaagaagcactacatgccaccagaattgtgcactgaaagataatacaaactgagtgtctttatgagaatcactgtgtcccctgaggcccagcagtacctgcttccctgtatgtggaagcagcacctcattcccgccatcagctacctctcatcaccccaccttcatcatcatgctccagggtcaccctggccagctcttgtgctgggacaggggattacaccatctctgttcaaagagggggaaatgtgcctatgccttaagtcaatgcactcagcaaggagaagcacatcttatttatcttgttacctatagtttactttgggtgattggaggggaatgacttagttatgactggacatcttaaaagctgatagacaagccaaatggctggcagatgatgtggatttcaaagagcccagaatgaactcatcactggcttagacagtcctggatgccatttggaaagtagtggccctgcaagcctaaatgaagtagtatttgtaggcctgggtggcatttggatttttcttttccctcaacaaggttttactttttcttactttacaagcaagggaagttttgtgataggagagaaataaaagatttgatattttttgagatgacactcaagcatcaggctgagatttgcacacatgggatgtaaaagcaagctgtgtgttgcttagtcacttacttagaagtagatggtgggggacagcggcgtgggtcctagcctggccagtgatgctgctggcgtccagaccccagactcactccaagcactcttgttcaatatctcatgcagaagagttgggctggtcactcttaggggtgagaccccgtgattggttggtttgtagcactaaggtctaaaaaggaaaaccataaaagacatcagattacgctggatcagtataattaatattccatagggccatgttgccagaatctgtatgtatcaatacagggtttttccaagccaggaaacgccctccttggctactaggagcacctatcccatatcattcagataaacaatgatagctacaaagtcatttgtggctagataggttaagacaggtgattttttaaagtagactgtctttgcattttgccatctgaagttcattaatctttagatgacaaaaaagcaaaaagttcccagaacgtttttgcttagattttgttctaatcaccacgtgaaggaatgagattagcaccacaagtttcatgccaataaaagagactggtgtgatcccacatgcaaaatttaatcctaagggtagtgagatcacaaacagaataaaaataagagcaatcaaccatataaatcaagtacctattgggaacagacataacattcaatttttcatttatgctaagtgaccacagtatacaaagtaataagcaggaaatttgatatgggttaaattatgcattttgttcagattttggaaattggtatgcattataagtttctcaatgtacatctttttatcccaacaccctcaaactagaatatttgtcagtggtcaagagaaaaaattttacctgaattcttgggggccggcggggagcttttacattaaaaatctactaacgcctactttttaaaaaatgagattctttctaatctttatatatgacattttctagacaatcgcacctttgggtatattaaacagctggtatcataacaaagaatccaaatgaaccttcaatatactagaagttctagtaggttaatattgttcagaagatttttacaaattaaaaactgatttccaaatatgttcaacatttacttctatttgatatctgctcaagaagtcatagaagtcttgggaaactattcgagtatcacagaggttttcaaaagcccttatggtgacatctacctaggtaaaagcctgacatgtggctttataattgttatgttacccaagggataaacttgaactggctttgaacatcctttaggtcattttctctttggataattttcatcgcatatccagcaactatagaccaaagtttgcttaaggtttgaccctagagcagaggtgggcaaactatgacctggaaaccaaatctgacttaccaccttttcctgtagttaaagttttattgtcacatagccacatacattcatttacatgttttctgattttacactacagcagcaggatggagtagttgtgtcagagactatgtatcccacaaagcatagattacttactatttagtcctttacaggcaaagtttcctcacccctgacctagaggtttttgtggtatgcattggatatagcaggaaagaaagcacatttccaaacagcagggagtaagcttacatttctgtgtaggtttgggaatatagttacttggcaaagtctttcaggaaggaagcccttccttatgttacatgtggaaagcctgccttccaagacatgtggaagtaattgatccacctgccagagaaacacaggctcagaggatgcctgggaacagggaggatgggattagtggaagcttaatggaaaaggaaagttatgatcctccaagacccttaattgatagaccataccaggttctgcaggtcagcatcattgtgtaatgagagtgaagtaggggaccctgtggttcaaccttagaatctgtttcctgtaggctctttctgctgtctatattcattaaagttttccacttcaccctcccatagtctagagggatgcccattccatggtcctccagagaatagttttgacttaacatgtctgtttagcccacatcacgtcagttatcaacaccgccactgtgcttactgttcctacagccacaccaggcttgaagagttagtgagaccaacaaataattggaagtattggaaaaagcaaaatacatggggacaaaaaaaatacagtgaaattctttttatcaaactgatgctgtgagaaaccagatgaatgccagtttggctttatttctaagaatctgggtcttcattctctggtgtagaaggaatgcaaaaaactataacaacaacaacaaaaacatattttgaaaagacatattctgacatctctgcttgtgtgtggtaaggcaggttcctatcagacatttatccctttggtcaagatcccttttgctcatccagggtttcatactcaatatcgcttaaaaaaaaaaaagtatcagctagggatgactctggaagtatgagtatcatggtggggaggaaggaattttttttaaatgtaaatgacccccatttaccagaccctaatcaaagtcacttaagggaatccctcagccttttatttggaaacagttgaaataaactggcagcagctagatcagagtatcttgctttattttataaaggccaaaggtagtatgaagtttggaccaaaaaggtaaatagatccattccagcacctgatactgatttttcaaggctctatgaaaggtcaaaaatttcattaaacaagaccagttctccctcttccccctgtcccaagaaatcttaggcatgaaaaggataaggaaacagctcctggaatgatacatttgcatagtgccctagtagcaggttgggaaaaagttataatataagaaacaaccttcgaaaacaggccttttatctcaaagataaaatgtctttcttgtggtctttcatcactatctccgtggtggaaggttcccctagttccaacatatttccattaaaatagtcaaagccacggcattgggatgtcagatgcctctctttctttgtggtaatcggaatttaaaattatacagttgcctctgaatttctcatgcacaaagccaaaccactgataagagataaagcagtctgaagcctgctgcttcagccagcacagcacaccacacacgctcgcactttcaaaagcaatgtgatttctatggttcttaaaagctttcttcataagggagtccctgaaatttctcaaggcaggtttgaatggcaaagggaaaataattacttgtgggaggtcctccttttgagtattgttagagcatacatgtaaaagaaaataacctttttggggcaactcatgctcacacatgctgttttctttggttctccccctaccttccttttgtagatattgacagaataggaggaaatgagcatccttatttgagaaagagcaagaatgtcatgagcccttgatgcaatagtaagtgtgatgtcatcatacagtgttaatgatgctatcaaatccatcaataaacagtctcaaaccttccaacaacagtgctcactgctgctcctcaacttcagcccagcaagcagtaatatcatcacccattttgagatatgcaggtggaatagaacaaagaaacagccactgtaatcgagaagcatgtttactgtctaaatccacctgttgcagtaggaagccagagtggggttccaaatgcctcattaagtatgtggacagcctcactagtaagtgagtgaatttggcttcatcactgaacattagctaaggtcagcttaataacacaaatatgaggccgacttctttgcgagaagagaaaagaaaacatctgcttgatttaaaatccaccccacatgcctagagttgtctaatagtccctcactttccaatggcttcacatcctacttctacatttggggttttttggtgaaatcagagatagctcaggatttcataaaacgagaaactccaaactggtctattaggttccatgggaacacttgtagccaaaggattgtctgagggcaggaagacgacacttgtcaacaaggaagacagtgtttctttagttcccatattcatctaattcatggggttctaacattttggggggccatagattcttttgacaatctgagccaatctatgaaacttctccccaaaaagaaccaccccacaaaatcttgcaaaacgtaagagattttcctggatctgaagctacccgaagacatgggaagagttgtattctattattcaattttaagaatatttattaatattcactgagctattgctagccactgtgctaaacattttacatacattctcctatttcatcctcaaaacaatcctttgagttgggttttaatatagttccaatattcggatgtgaaaactgaggcttatagtggctaagaaacttgcccaaagccactacctagaaaatggcagagctggaatgtaggtttaactcctgaccactatgctataaagtcaccacatgtcaaactaattttcaagttgttgggacatgtcccctactaggttttaaactagatcttccttggtagatgaagctatagaacttctattttccctgctttctgtagtctctcacagtgacagcatctatactaaagtatagatacctaaggggaaaatatagaaagcctgcctgaataatagaatctagaacaacaacaaaaatattaattttttctgtgtatgcttaggtcaagcttaaaaaaaaaaaaaaaagaccggaaaatacctgggttgttagcctcacatttaggaaaaaattgtaatactcagttatctgtgtgtgtggctaaacaagtcagcatttctgcacacatacatctctttcctttatacttcccttcaaaagacaaatatcttacttttgatctttgacactatttggtcagtattcttctttacctttacttgtggcaaaactcaaggaagcgatcaaatagagggaagctcatttctatcattgtctctgtttccctataagaaagaactaccagggactcactgactgcattaggcatacaatgtcagagctgagctgaccactctggtcctgtaatgtctttggcctcacaccttggcagccatcattaatgggccatacccttccccaggtgcagaattctcctccccagagcactcaggccgttactaccaatttatctgagttggaaataagactcatttgccagttcttatttttaaagtggcaccctttaactttgaacctgtgtattttacactggcatcctagattcagcaatgaggtttggtggtgtttcaactaggaagggagaaaatgagtgcatctgaagttccttacagcttggtttctttggaatgctttcatcttctaagcaaagggatcagggtttgatctgtaagagttaaaaagacaaagtcattttgaagaattaactcagccagggatcatgcaaaaagattagaaaccataatgcccttgttaaagccctgctgtcaacctgccttcacccagagcttagagggccacagcagcaaagaggttggggtccatccctctctgatgtgctttttccacaacacatatctggtcctctggcaggattgtggatagagctcctcaccatacccaaaagactcagccccagtgccagtgctttcctggttcaacaacccaccacaaaaccttagtaaaaggatgagccaaaaatgaaaaagactcgactctacagtaagtcagtcagggatttcctttttaatggtttaagacatccaaatggcaagccaggaatagataccattaaagggtctcataggactaaccttaccagagccagaaatctagctctctggaagagatgcaagattctagaaaagtaaagggaagtgtcggcacatctaaatttagtgaacacaaaattaatttttatctagtctgtgacggagggaataaagtttttcatgtatcaaccacctcccccagtcaggtttctccctttttgagattatgaagaagctgagacatacttcttaaggaggtcgtgttttagaaggaaaaggcagaggctatccatcattatgctggctagatgcgcttctgaagaagccggattctgatgttcttaaccaaaatggtgaggtcatggaagtcccatttgcttggagattttgaaaaaaaaaaaaaaaaaaaacccattcccataaagtaattgagttcagcctttggattatttttggtttggtttttctctggttttgggtgtgatgtaagaagagctttttagttttgttttgaataacatcaatccttgcacactctatgcaaaaattttgtaagcatttcaataatgctatgaattacaaggaactattttaactttattacactttctgtataaaaaatttgtatttaatattatttcgaccacagtcttgtaaaatatattaataaaaataatgattggtaagaaggaaagc

SEQ ID NO: 5788 - protein, 290 aa, Homo sapiens; identical to SEQ ID NO: 675

SEQ ID NO: 5789 - DNA, 9757 bp, Homo sapiens
gagcagaagaaagagaggacttatctccagcatctagcactacagagcagaggctgtgtggagaatggctgaaaaatcagaattggttgtagaagcagttttctttctggttgtgagtatgagcccggcagacaccatgagcgctgttgcaggggagtcggcctgtgcttgacacatgtgtttcccattgatagctggagacagcccagtagctgtgagtcggtctgacaaagccatattgaagtacggagtacggtttcaaagcagtcagaaaaagaacgggaatgctgttcaggaaattcttcaggcatgggcagggacttggctgcagttctgcagttggaaaatctgactggggcagcttctgagcgcaggctgggcctgcacacactcagcgggccgagtggccacctccttcagagctgctcagcacgccctgggatcgcgggcggttttcatcggccggtttgtgaaacggacaagagagatgcctcaggagcagtacactcaccaccggagcaccatgcctggctctgtggggccacaggtatacaaggtggggatttatggctggcggaaacgatgcctgtatttctttgtcctgctcctcatgattttaatactggtgaacttggccatgaccatctggattctcaaagtcatgaacttcacaattgatggaatgggaaacctgaggatcacagaaaaaggtctaaagctagaaggagactctgaattcttacaacctctctacgccaaagaaatccagtcccgaccaggtaatgccctgtacttcaagtctgccagaaatgttacagtgaacattctcaatgaccagactaaagtgctaactcagcttataacaggtccaaaagccgtagaagcttatggtaaaaaatttgaggtaaaaactgtttctggaaaattgctcttctctgcagacaataatgaagtggtagtaggagctgaaagattacgagttttaggagcggagggcacagtgttccctaaatctatagaaacacctaatgtcagggcagaccccttcaaagaactaaggttggagtccccaacccggtctctagtgatggaggccccaaaaggagtggaaatcaatgcagaagctggcaatatggaagccacctgcaggacagagctgagactggaatccaaagatggagagattaagttagatgctgcgaaaatcaggctacctagactgcctcatggatcctacacgcctacaggaacgaggcagaaggtcttcgagatctgcgtctgcgccaatgggagattattcctgtctcaggcaggagctgggtccacttgtcagataaacacaagtgtctgcctctgaaagactatccatagtggacattgttggcagcataaaggccttttttggctttagacactggctgccagctatttttactagaacacagaaagcctatcaaagaccttgtgtgtatgtgtacgtgtgtgtgcgtgcttgagtgtgttcgcgtgtgtgggtggatataaatatatataaatatatataaataaatatatatatcctctgtataaaatgaggtttcagtacaaaaggaaccatgggtgaccctgcgatatccactgtcattttccatcccatccccaccacctgagtgacagaaatctaaacacacatccgtcccaacattccccagaccattcagaatcacacagcgtattaaacactgacagaatcttcatctagatattcgagtagcagcatatcttctcttttagtgtcattacgagggagtgatggcgggaatctcagtcgcactcaagctctgagacctttgtatcaaaaataggcatttgatttcctgttttagctttagtaaggctggctaacttccccctcttcaagctaggaactggcaatgctgtagaagtcagccgtaggaattcaaaatggctggcctaccttggctaccagacatattggggtttttgtagttgaatgaatgaggaggatgaatttcagcaaattttgaactgctcacccaacttctgctatcttgctccctccaaactcacagattctcctacagtcaaattaggagctgtaaatcagcacaaaataagataacagctgttcctcagtgagctggaagctacttaatggcctgatgggcaatgaacaaacgggtgatatgtctctgtttaagggaaaaatggcttaaaagctgttctgttctcacttctgactttaaccaaaagatttcaacccacaatgatcaggtcaatcaaaatccctaagagcagaactcctaccccaaaagaagcctggaagtctaattaagagtagcataaggaacctaattatgtttaccatgtttcttgggattggtgggaaatgtcaaaacatgccctttatttttaaaggcattcacaaactctctgactttgttcttcttatatattttttcagtgccgggatattcatattcctaaagccactattgtgttttctctaagaagcactacatgccaccagaattgtgcactgaaagataatacaaactgagtgtctttatgagaatcactgtgtcccctgaggcccagcagtacctgcttccctgtatgtggaagcagcacctcattcccgccatcagctacctctcatcaccccaccttcatcatcatgctccagggtcaccctggccagctcttgtgctgggacaggggattacaccatctctgttcaaagagggggaaatgtgcctatgccttaagtcaatgcactcagcaaggagaagcacatcttatttatcttgttacctatagtttactttgggtgattggaggggaatgacttagttatgactggacatcttaaaagctgatagacaagccaaatggctggcagatgatgtggatttcaaagagcccagaatgaactcatcactggcttagacagtcctggatgccatttggaaagtagtggccctgcaagcctaaatgaagtagtatttgtaggcctgggtggcatttggatttttcttttccctcaacaaggttttactttttcttactttacaagcaagggaagttttgtgataggagagaaataaaagatttgatattttttgagatgacactcaagcatcaggctgagatttgcacacatgggatgtaaaagcaagctgtgtgttgcttagtcacttacttagaagtagatggtgggggacagcggcgtgggtcctagcctggccagtgatgctgctggcgtccagaccccagactcactccaagcactcttgttcaatatctcatgcagaagagttgggctggtcactcttaggggtgagaccccgtgattggttggtttgtagcactaaggtctaaaaaggaaaaccataaaagacatcagattacgctggatcagtataattaatattccatagggccatgttgccagaatctgtatgtatcaatacagggtttttccaagccaggaaacgccctccttggctactaggagcacctatcccatatcattcagataaacaatgatagctacaaagtcatttgtggctagataggttaagacaggtgattttttaaagtagactgtctttgcattttgccatctgaagttcattaatctttagatgacaaaaaagcaaaaagttcccagaacgtttttgcttagattttgttctaatcaccacgtgaaggaatgagattagcaccacaagtttcatgccaataaaagagactggtgtgatcccacatgcaaaatttaatcctaagggtagtgagatcacaaacagaataaaaataagagcaatcaaccatataaatcaagtacctattgggaacagacataacattcaatttttcatttatgctaagtgaccacagtatacaaagtaataagcaggaaatttgatatgggttaaattatgcattttgttcagattttggaaattggtatgcattataagtttctcaatgtacatctttttatcccaacaccctcaaactagaatatttgtcagtggtcaagagaaaaaattttacctgaattcttgggggccggcggggagcttttacattaaaaatctactaacgcctactttttaaaaaatgagattctttctaatctttatatatgacattttctagacaatcgcacctttgggtatattaaacagctggtatcataacaaagaatccaaatgaaccttcaatatactagaagttctagtaggttaatattgttcagaagatttttacaaattaaaaactgatttccaaatatgttcaacatttacttctatttgatatctgctcaagaagtcatagaagtcttgggaaactattcgagtatcacagaggttttcaaaagcccttatggtgacatctacctaggtaaaagcctgacatgtggctttataattgttatgttacccaagggataaacttgaactggctttgaacatcctttaggtcattttctctttggataattttcatcgcatatccagcaactatagaccaaagtttgcttaaggtttgaccctagagcagaggtgggcaaactatgacctggaaaccaaatctgacttaccaccttttcctgtagttaaagttttattgtcacatagccacatacattcatttacatgttttctgattttacactacagcagcaggatggagtagttgtgtcagagactatgtatcccacaaagcatagattacttactatttagtcctttacaggcaaagtttcctcacccctgacctagaggtttttgtggtatgcattggatatagcaggaaagaaagcacatttccaaacagcagggagtaagcttacatttctgtgtaggtttgggaatatagttacttggcaaagtctttcaggaaggaagcccttccttatgttacatgtggaaagcctgccttccaagacatgtggaagtaattgatccacctgccagagaaacacaggctcagaggatgcctgggaacagggaggatgggattagtggaagcttaatggaaaaggaaagttatgatcctccaagacccttaattgatagaccataccaggttctgcaggtcagcatcattgtgtaatgagagtgaagtaggggaccctgtggttcaaccttagaatctgtttcctgtaggctctttctgctgtctatattcattaaagttttccacttcaccctcccatagtctagagggatgcccattccatggtcctccagagaatagttttgacttaacatgtctgtttagcccacatcacgtcagttatcaacaccgccactgtgcttactgttcctacagccacaccaggcttgaagagttagtgagaccaacaaataattggaagtattggaaaaagcaaaatacatggggacaaaaaaaatacagtgaaattctttttatcaaactgatgctgtgagaaaccagatgaatgccagtttggctttatttctaagaatctgggtcttcattctctggtgtagaaggaatgcaaaaaactataacaacaacaacaaaaacatattttgaaaagacatattctgacatctctgcttgtgtgtggtaaggcaggttcctatcagacatttatccctttggtcaagatcccttttgctcatccagggtttcatactcaatatcgcttaaaaaaaaaaaagtatcagctagggatgactctggaagtatgagtatcatggtggggaggaaggaattttttttaaatgtaaatgacccccatttaccagaccctaatcaaagtcacttaagggaatccctcagccttttatttggaaacagttgaaataaactggcagcagctagatcagagtatcttgctttattttataaaggccaaaggtagtatgaagtttggaccaaaaaggtaaatagatccattccagcacctgatactgatttttcaaggctctatgaaaggtcaaaaatttcattaaacaagaccagttctccctcttccccctgtcccaagaaatcttaggcatgaaaaggataaggaaacagctcctggaatgatacatttgcatagtgccctagtagcaggttgggaaaaagttataatataagaaacaaccttcgaaaacaggccttttatctcaaagataaaatgtctttcttgtggtctttcatcactatctccgtggtggaaggttcccctagttccaacatatttccattaaaatagtcaaagccacggcattgggatgtcagatgcctctctttctttgtggtaatcggaatttaaaattatacagttgcctctgaatttctcatgcacaaagccaaaccactgataagagataaagcagtctgaagcctgctgcttcagccagcacagcacaccacacacgctcgcactttcaaaagcaatgtgatttctatggttcttaaaagctttcttcataagggagtccctgaaatttctcaaggcaggtttgaatggcaaagggaaaataattacttgtgggaggtcctccttttgagtattgttagagcatacatgtaaaagaaaataacctttttggggcaactcatgctcacacatgctgttttctttggttctccccctaccttccttttgtagatattgacagaataggaggaaatgagcatccttatttgagaaagagcaagaatgtcatgagcccttgatgcaatagtaagtgtgatgtcatcatacagtgttaatgatgctatcaaatccatcaataaacagtctcaaaccttccaacaacagtgctcactgctgctcctcaacttcagcccagcaagcagtaatatcatcacccattttgagatatgcaggtggaatagaacaaagaaacagccactgtaatcgagaagcatgtttactgtctaaatccacctgttgcagtaggaagccagagtggggttccaaatgcctcattaagtatgtggacagcctcactagtaagtgagtgaatttggcttcatcactgaacattagctaaggtcagcttaataacacaaatatgaggccgacttctttgcgagaagagaaaagaaaacatctgcttgatttaaaatccaccccacatgcctagagttgtctaatagtccctcactttccaatggcttcacatcctacttctacatttggggttttttggtgaaatcagagatagctcaggatttcataaaacgagaaactccaaactggtctattaggttccatgggaacacttgtagccaaaggattgtctgagggcaggaagacgacacttgtcaacaaggaagacagtgtttctttagttcccatattcatctaattcatggggttctaacattttggggggccatagattcttttgacaatctgagccaatctatgaaacttctccccaaaaagaaccaccccacaaaatcttgcaaaacgtaagagattttcctggatctgaagctacccgaagacatgggaagagttgtattctattattcaattttaagaatatttattaatattcactgagctattgctagccactgtgctaaacattttacatacattctcctatttcatcctcaaaacaatcctttgagttgggttttaatatagttccaatattcggatgtgaaaactgaggcttatagtggctaagaaacttgcccaaagccactacctagaaaatggcagagctggaatgtaggtttaactcctgaccactatgctataaagtcaccacatgtcaaactaattttcaagttgttgggacatgtcccctactaggttttaaactagatcttccttggtagatgaagctatagaacttctattttccctgctttctgtagtctctcacagtgacagcatctatactaaagtatagatacctaaggggaaaatatagaaagcctgcctgaataatagaatctagaacaacaacaaaaatattaattttttctgtgtatgcttaggtcaagcttaaaaaaaaaaaaaaaagaccggaaaatacctgggttgttagcctcacatttaggaaaaaattgtaatactcagttatctgtgtgtgtggctaaacaagtcagcatttctgcacacatacatctctttcctttatacttcccttcaaaagacaaatatcttacttttgatctttgacactatttggtcagtattcttctttacctttacttgtggcaaaactcaaggaagcgatcaaatagagggaagctcatttctatcattgtctctgtttccctataagaaagaactaccagggactcactgactgcattaggcatacaatgtcagagctgagctgaccactctggtcctgtaatgtctttggcctcacaccttggcagccatcattaatgggccatacccttccccaggtgcagaattctcctccccagagcactcaggccgttactaccaatttatctgagttggaaataagactcatttgccagttcttatttttaaagtggcaccctttaactttgaacctgtgtattttacactggcatcctagattcagcaatgaggtttggtggtgtttcaactaggaagggagaaaatgagtgcatctgaagttccttacagcttggtttctttggaatgctttcatcttctaagcaaagggatcagggtttgatctgtaagagttaaaaagacaaagtcattttgaagaattaactcagccagggatcatgcaaaaagattagaaaccataatgcccttgttaaagccctgctgtcaacctgccttcacccagagcttagagggccacagcagcaaagaggttggggtccatccctctctgatgtgctttttccacaacacatatctggtcctctggcaggattgtggatagagctcctcaccatacccaaaagactcagccccagtgccagtgctttcctggttcaacaacccaccacaaaaccttagtaaaaggatgagccaaaaatgaaaaagactcgactctacagtaagtcagtcagggatttcctttttaatggtttaagacatccaaatggcaagccaggaatagataccattaaagggtctcataggactaaccttaccagagccagaaatctagctctctggaagagatgcaagattctagaaaagtaaagggaagtgtcggcacatctaaatttagtgaacacaaaattaatttttatctagtctgtgacggagggaataaagtttttcatgtatcaaccacctcccccagtcaggtttctccctttttgagattatgaagaagctgagacatacttcttaaggaggtcgtgttttagaaggaaaaggcagaggctatccatcattatgctggctagatgcgcttctgaagaagccggattctgatgttcttaaccaaaatggtgaggtcatggaagtcccatttgcttggagattttgaaaaaaaaaaaaaaaaaaaacccattcccataaagtaattgagttcagcctttggattatttttggtttggtttttctctggttttgggtgtgatgtaagaagagctttttagttttgttttgaataacatcaatccttgcacactctatgcaaaaattttgtaagcatttcaataatgctatgaattacaaggaactattttaactttattacactttctgtataaaaaatttgtatttaatattatttcgaccacagtcttgtaaaatatattaataaaaataatgattggtaagaaggaaagc

SEQ ID NO: 5790 - protein, 289 aa, Homo sapiens
MPQEQYTHHRSTMPGSVGPQVYKVGIYGWRKRCLYFFVLLLMILILVNLAMTIWILKVMNFTIDGMGNLRITEKGLKLEGDSEFLQPLYAKEIQSRPGNALYFKSARNVTVNILNDQTKVLTQLITGPKAVEAYGKKFEVKTVSGKLLFSADNNEVVVGAERLRVLGAEGTVFPKSIETPNVRADPFKELRLESPTRSLVMEAPKGVEINAEAGNMEATCRTELRLESKDGEIKLDAAKIRLPRLPHGSYTPTGTRQKVFEICVCANGRLFLSQAGAGSTCQINTSVCL

SEQ ID NO: 5791 - DNA, 3364 bp, Homo sapiens
agactccctgtctttgcggtttgggagatgatgagaaaccacagaattgctagtagtttatgtggagatcaggtcttctccaagaaaaaaaaaaagaaaaaaaaaaacaacatggctgcaaaggagaaactggaggcagtgttaaatgtggccctgagggtgccaagcatcatgctgttggatgtcctgtacagatgggatgtcagctcctttttccagcagatccaaagaagtagccttagtaataaccctcttttccagtataagtatttggctcttaatatgcattatgtaggttatatcttaagtgtggtgctgctaacattgcccaggcagcatctggttcagctttatctatattttttgactgctctgctcctctatgctggacatcaaatttccagggactatgttcggagtgaactggagtttgcctatgagggaccaatgtatttagaacctctctctatgaatcggtttaccacagccttaataggtcagttggtggtgtgtactttatgctcctgtgtcatgaaaacaaagcagatttggctgttttcagctcacatgcttcctctgctagcacgactctgccttgttcctttggagacaattgttatcatcaataaatttgctatgatttttactggattggaagttctctattttcttgggtctaatcttttggtaccttataaccttgctaaatctgcatacagagaattggttcaggtagtggaggtatatggccttctcgccttgggaatgtccctgtggaatcaactggtagtccctgttcttttcatggttttctggctcgtcttatttgctcttcagatttactcctatttcagtactcgagatcagcctgcatcacgtgagaggcttcttttcctttttctgacaagtattgcggaatgctgcagcactccttactctcttttgggtttggtcttcacggtttcttttgttgccttgggtgttctcacactctgcaagttttacttgcagggttatcgagctttcatgaatgatcctgccatgaatcggggcatgacagaaggagtaacgctgttaatcctggcagtgcagactgggctgatagaactgcaggttgttcatcgggcattcttgctcagtattatccttttcattgtcgtagcttctatcctacagtctatgttagaaattgcagatcctattgttttggcactgggagcatctagagacaagagcttgtggaaacacttccgtgctgtaagcctttgtttatttttattggtattccctgcttatatggcttatatgatttgccagtttttccacatggatttttggcttcttatcattatttccagcagcattcttacctctcttcaggttctgggaacactttttatttatgtcttatttatggttgaggaattcagaaaagagccagtggaaaacatggatgatgtcatctactatgtgaatggcacttaccgcctgctggagtttcttgtggccctctgtgtggtggcctatggcgtctcagagaccatctttggagaatggacagtgatgggctcaatgatcatcttcattcattcctactataacgtgtggcttcgggcccagctggggtggaagagctttcttctccgcagggatgctgtgaataagattaaatcgttacccattgctacgaaagagcagcttgagaaacacaatgatatttgtgccatctgttatcaggacatgaaatctgctgtgatcacgccttgcagtcattttttccatgcaggctgtcttaagaaatggctgtatgtccaggagacctgccctctgtgccactgccatctgaaaaactcctcccagcttccaggattaggaactgagccagttctacagcctcatgctggagctgagcaaaacgtcatgtttcaggaaggtactgaacccccaggccaggagcatactccagggaccaggatacaggaaggttccagggacaataatgagtacattgccagacgaccagataaccaggaaggggcttttgaccccaaagaatatcctcacagtgcgaaagatgaagcacatcctgttgaatcagcctagaggagaagcagcaggaatgatgctttgatactctggaggagaagttaactcaagatggaattcatgttctgatttgaggaatgaaaatgagatgatcaggcaggaaactgacattccaaggatctaatccaggaagtactctcagtggggaccacctgctttcatcccctgacattgtgggagaaattttgcaatgtatgctaatcaaaatgtatttatatgttctctgctgatgttttatagaggtttgtgaagaaaattcaacctcagcaacttcagaaactgcccctgatacgtgtgagagagaaataaaatcagattttgagtgttgaagggactgaggaagtgaggataaagagcatgaggacagcatggaaagaaggaggcagaagtggaactgaactttcactctccatgggacagatcaatctcattatcaagtctgaatagcaaccagccctctcctccaccccgtttctcctcagttaattggagctcagtcaggtgattattgagtcttgtacagcactgaaatgaaatcaaagatgaagaagcattgattgtattcaaagattgaagcacgctcatactttgtatgtgctttagggaaggggtgggtgggcacttgggccttgcgggtgcattcatgtaatctgagactcttgaactttatgacggagtcttcagtattttgatgtatatgaaacttttgttaaatatgttgtatacttcgctggctgtgtgaagtaaactaaaactctgatgaacactttggagtctgctttagtgaaggagaccaaagtgggaagggctttagggcactgatagaggccctgggtgtacttttcaatcctgtgtaatgtttaattcttgcaactgaatcaaaacagtgttaaattatggcaatatttgcactttgggaatgagtacataactgtatgatcacactctgcaaatgccacttttaaagctgttaatagactttgcaccttttctttgacaaggatgtgtcatatttaaatttttacattcatcatggctacaggtagaactggggaggggggaatgtaattttttatgggaattttgatatgaaaagaaactagtcatttatttatacaataggcttggctcaaaaagtgtttttcagacctcggtattcctaatgtgggatgtgactttattttatttttagtagcaaatttggatgtagactgacagacatagctgaatgtcttaataaatttaaatttgaagataa

SEQ ID NO: 5792 - protein, 691 aa, Homo sapiens; identical to SEQ ID NO: 679

SEQ ID NO: 5793 - DNA, 3617 bp, Homo sapiens
ccgcagagcgccgggggcgggaggagcaaacgcaggaggccatggccgccgacgccggcgccggctgctaaggggctcggcccgcgagcgcctgctgccgcggacgatggtgaccgtacgggccgggccgctgccgctgccgctgcctccgcctccccagaagcaacatccgaggctcggcgcagaagagccgccgctgtgagccgtgccgtaccggcccccgccgccgcccgaggagaacgggagggcgggcgagagagccggggagttgcggagcccgcccgccggcagcgccgctccccagggagggagtccgcagcctgaggtcttctccaagaaaaaaaaaaagaaaaaaaaaaacaacatggctgcaaaggagaaactggaggcagtgttaaatgtggccctgagggtgccaagcatcatgctgttggatgtcctgtacagatgggatgtcagctcctttttccagcagatccaaagaagtagccttagtaataaccctcttttccagtataagtatttggctcttaatatgcattatgtaggttatatcttaagtgtggtgctgctaacattgcccaggcagcatctggttcagctttatctatattttttgactgctctgctcctctatgctggacatcaaatttccagggactatgttcggagtgaactggagtttgcctatgagggaccaatgtatttagaacctctctctatgaatcggtttaccacagccttaataggtcagttggtggtgtgtactttatgctcctgtgtcatgaaaacaaagcagatttggctgttttcagctcacatgcttcctctgctagcacgactctgccttgttcctttggagacaattgttatcatcaataaatttgctatgatttttactggattggaagttctctattttcttgggtctaatcttttggtaccttataaccttgctaaatctgcatacagagaattggttcaggtagtggaggtatatggccttctcgccttgggaatgtccctgtggaatcaactggtagtccctgttcttttcatggttttctggctcgtcttatttgctcttcagatttactcctatttcagtactcgagatcagcctgcatcacgtgagaggcttcttttcctttttctgacaagtattgcggaatgctgcagcactccttactctcttttgggtttggtcttcacggtttcttttgttgccttgggtgttctcacactctgcaagttttacttgcagggttatcgagctttcatgaatgatcctgccatgaatcggggcatgacagaaggagtaacgctgttaatcctggcagtgcagactgggctgatagaactgcaggttgttcatcgggcattcttgctcagtattatccttttcattgtcgtagcttctatcctacagtctatgttagaaattgcagatcctattgttttggcactgggagcatctagagacaagagcttgtggaaacacttccgtgctgtaagcctttgtttatttttattggtattccctgcttatatggcttatatgatttgccagtttttccacatggatttttggcttcttatcattatttccagcagcattcttacctctcttcaggttctgggaacactttttatttatgtcttatttatggttgaggaattcagaaaagagccagtggaaaacatggatgatgtcatctactatgtgaatggcacttaccgcctgctggagtttcttgtggccctctgtgtggtggcctatggcgtctcagagaccatctttggagaatggacagtgatgggctcaatgatcatcttcattcattcctactataacgtgtggcttcgggcccagctggggtggaagagctttcttctccgcagggatgctgtgaataagattaaatcgttacccattgctacgaaagagcagcttgagaaacacaatgatatttgtgccatctgttatcaggacatgaaatctgctgtgatcacgccttgcagtcattttttccatgcaggctgtcttaagaaatggctgtatgtccaggagacctgccctctgtgccactgccatctgaaaaactcctcccagcttccaggattaggaactgagccagttctacagcctcatgctggagctgagcaaaacgtcatgtttcaggaaggtactgaacccccaggccaggagcatactccagggaccaggatacaggaaggttccagggacaataatgagtacattgccagacgaccagataaccaggaaggggcttttgaccccaaagaatatcctcacagtgcgaaagatgaagcacatcctgttgaatcagcctagaggagaagcagcaggaatgatgctttgatactctggaggagaagttaactcaagatggaattcatgttctgatttgaggaatgaaaatgagatgatcaggcaggaaactgacattccaaggatctaatccaggaagtactctcagtggggaccacctgctttcatcccctgacattgtgggagaaattttgcaatgtatgctaatcaaaatgtatttatatgttctctgctgatgttttatagaggtttgtgaagaaaattcaacctcagcaacttcagaaactgcccctgatacgtgtgagagagaaataaaatcagattttgagtgttgaagggactgaggaagtgaggataaagagcatgaggacagcatggaaagaaggaggcagaagtggaactgaactttcactctccatgggacagatcaatctcattatcaagtctgaatagcaaccagccctctcctccaccccgtttctcctcagttaattggagctcagtcaggtgattattgagtcttgtacagcactgaaatgaaatcaaagatgaagaagcattgattgtattcaaagattgaagcacgctcatactttgtatgtgctttagggaaggggtgggtgggcacttgggccttgcgggtgcattcatgtaatctgagactcttgaactttatgacggagtcttcagtattttgatgtatatgaaacttttgttaaatatgttgtatacttcgctggctgtgtgaagtaaactaaaactctgatgaacactttggagtctgctttagtgaaggagaccaaagtgggaagggctttagggcactgatagaggccctgggtgtacttttcaatcctgtgtaatgtttaattcttgcaactgaatcaaaacagtgttaaattatggcaatatttgcactttgggaatgagtacataactgtatgatcacactctgcaaatgccacttttaaagctgttaatagactttgcaccttttctttgacaaggatgtgtcatatttaaatttttacattcatcatggctacaggtagaactggggaggggggaatgtaattttttatgggaattttgatatgaaaagaaactagtcatttatttatacaataggcttggctcaaaaagtgtttttcagacctcggtattcctaatgtgggatgtgactttattttatttttagtagcaaatttggatgtagactgacagacatagctgaatgtcttaataaatttaaatttgaagataa

SEQ ID NO: 5794 - protein, 663 aa, Homo sapiens
MAAKEKLEAVLNVALRVPSIMLLDVLYRWDVSSFFQQIQRSSLSNNPLFQYKYLALNMHYVGYILSVVLLTLPRQHLVQLYLYFLTALLLYAGHQISRDYVRSELEFAYEGPMYLEPLSMNRFTTALIGQLVVCTLCSCVMKTKQIWLFSAHMLPLLARLCLVPLETIVIINKFAMIFTGLEVLYFLGSNLLVPYNLAKSAYRELVQVVEVYGLLALGMSLWNQLVVPVLFMVFWLVLFALQIYSYFSTRDQPASRERLLFLFLTSIAECCSTPYSLLGLVFTVSFVALGVLTLCKFYLQGYRAFMNDPAMNRGMTEGVTLLILAVQTGLIELQVVHRAFLLSIILFIVVASILQSMLEIADPIVLALGASRDKSLWKHFRAVSLCLFLLVFPAYMAYMICQFFHMDFWLLIIISSSILTSLQVLGTLFIYVLFMVEEFRKEPVENMDDVIYYVNGTYRLLEFLVALCVVAYGVSETIFGEWTVMGSMIIFIHSYYNVWLRAQLGWKSFLLRRDAVNKIKSLPIATKEQLEKHNDICAICYQDMKSAVITPCSHFFHAGCLKKWLYVQETCPLCHCHLKNSSQLPGLGTEPVLQPHAGAEQNVMFQEGTEPPGQEHTPGTRIQEGSRDNNEYIARRPDNQEGAFDPKEYPHSAKDEAHPVESA

SEQ ID NO: 5795 - DNA, 638 bp, Homo sapiens
cgagaattcgttttaacctcgtcactgactggactagactgtaaactccttggcgtctgggatggctcagccgtgcccagcaccaagtgcaggcactcaaacccctgtggagtgcctcagactacttcaccatagtcataaatcctgtcacatcccagtgatgcagttcatgagtctcttaatctagcctgaactctacttttgcattcagacaggcaggggatgcctcatcctttgaatactggcacattaagagcagtgacataggtaagaactgaacccaagcactataagagaggatgttaagcaagatctaaaaatcaacgtgatcaacaagagcagtaatcttttcttttccaagaaaaaagaatggaagaaacagaaggtactgggcgcaatgtattaaacactgtgttttgaatgactcgagattctacgactgcctggaggggttttgctggatcggtgcaatgtcatgtgattattggaaattaatcccttttttcaagaatttttcaagaattaggttaagttagatttgagcaaacttaattaccttgccaggcatttgtttttcagaaacataataatctatgtatttgattcaattagtagtaggcccatgggttgttctgtaa

SEQ ID NO: 5796 - protein, 41 aa, Homo sapiens
MAQPCPAPSAGTQTPVECLRLLHHSHKSCHIPVMQFMSLLI

SEQ ID NO: 5797 - DNA, 933 bp, Homo sapiens
ggtttgaaacggaaatatgttggggacggaacaactgcttcctttgaatctcttcgggtgctaatcaaatggccgctgtaagggatctccacaaagccacgaagaagccaggcctttccgagactgtaaccgctgtgcagatagcgccgatccctgggtggccgctctctcgttctgcgcgtgcgctcgttctgggctgggagcggatgggtgctgaggcgtgtgacgtctctagtagtgtcgtaactgggtgtgctgccttttccaggtgtactgaggtcttcgtgagattcagggctaggactcgtgtggctgtgtcatgttccgaatgaagcttaaaaggtgatctttgagaactgaagacttgagacccctccatgggcccaggggctgccaacactaataatttcagagacttagaatctgaggagaatctccaatctaaggggaaacggaagagggtcaggaaagagaaggggcaagcttaagtgactcagaatccaagaagcaagtctcataggagagctgcgatcgaggttaccatacagtatccaatcgtctcaaccttcccatccatacttccatgctgtctttcctctgaatgcaaggaaaaccggttacacaaacgctgacaaaagaatgtcagacttgaatggaaattcggagcagtacccatctggtccatacagcgaactcccagtgagcaccacggcaattgctggatgcttcctgaccttgaacatcagactccaagttctttggctttaggactcttggatttacactagcagtttgccgaggggatctctggcctttggccacagactgaaggctgcactgttggcttccctacttttgaggttttgggtctcgggctgatccactactggcttccttgctcctcaacttgcagacggcctatcgtgggacttt

SEQ ID NO: 5798 - protein, 42 aa, Homo sapiens
MSDLNGNSEQYPSGPYSELPVSTTAIAGCFLTLNIRLQVLWL

SEQ ID NO: 5799 - DNA, 2183 bp, Homo sapiens
acttccggtcgctttcggtctctcagcggccggtttctgcgtccgctgccgcaggttccaccgcgctccaggtatttttttttctgaaggaaagctgcttcctcatatgtttcaagaatggctctccctatcattgtaaaatggggtggacaggagtattcagtgaccacactttcagaagatgatactgtgctcgatctcaaacagtttctcaagacccttacaggagttcttccagaacgccaaaagttacttggactcaaagttaaaggcaaacctgcagaaaatgatgttaagcttggagctctcaaactgaaaccaaatactaaaatcatgatgatgggaactcgtgaggagagcttggaagatgtcttaggtccaccccctgacaatgatgatgttgttaatgactttgatattgaagatgaagtagttgaagtagaaaatagggaagaaaacctactgaaaatttctcgcagagtgaaagagtacaaagtggaaattttgaatcctcccagggaagggaaaaagcttttggtgctagatgttgattatacattatttgaccacaggtcttgtgcagagactggggtagaattaatgcggccatatcttcatgaatttctaacatctgcctatgaagattatgacattgttatttggtctgcaacaaatatgaagtggattgaagctaaaatgaaagagctgggagtgagcacaaatgcaaattataagattactttcatgttggatagtgctgctatgataacagtacatactccaaggagaggattaatagacgtaaagcctcttggtgttatatggggaaagttttcggagttttacagcaagaaaaacaccattatgtttgatgacatagggagaaattttctaatgaacccacagaatggactaaagataaggccttttatgaaagcgcacctaaatcgtgataaagacaaagaacttttaaaattaactcagtacctcaaggagatagcaaaattagatgactttttggatctaaatcacaaatattgggaaagatatctctcaaagaagcaaggacagtagttacaagttatactggcagttattgaagatacttaagatccaagaacttcttgcttttatgctagaaatcattatgatagtgctggacactgaagcaaataccatactgcttatacttggtcttccagttttttgtaaatttaattttatattttttgaagatgatagcaatatgctaaaaaatgcttgtcccctatatgaatattctgttacgcttgaaaaatattttctccagcgttggttactgaccaccccaccctcccaccacacacacacacacacacacacacacacacacacacacacacacacaaagtggagaaaaatgtatactcaacaatgtcattttgtgactttggaaacaagttatgttttgtgtttttgtctcattgtgttattgtctgactaaatctaaaaccaaacccatgttgaaactagtacttttccctttaaaaacaaaccaaaaaaaaaaacaaaaaaaaactttttaattaaagaacctagtttgctatgcttaaaattaccaagaattttttatttctttgtcatagacacaatttctcttctgtatgccactagttacatttctaaattctgagcggtctcagttaggcctgtatgtgtgtacatgtccaagtaaagctggaaaatgtcagtcttgacacagctgtgtcttagtatgagaaacagaagactgaagaataaaaactaaggaacaagaatgagtctctttttggtggctaagtagaatcttcctaaaaccattgtcataaaagcagttaaaggcaataaatttttaaaagggacatatcactgattcattcctaaaaagcatgaacaaaaagtttttgttctgttccagctatatcttgtctaagtgctaacactgtttcagtgaaaatatctagccataagattaaaaaaatatattatttgcaatgcttaagcctgcagatacgtaatgtgaccactgttttgtgttgacaatattgctttatacagttcttgtatttgaaaggaattgatccttttaaagaaacatggtgtatattgttcttacaggactaatttcagtggtgtaaataataaatatcttttcttaaaacatt

SEQ ID NO: 5800 - protein, 318 aa, Homo sapiens
MALPIIVKWGGQEYSVTTLSEDDTVLDLKQFLKTLTGVLPERQKLLGLKVKGKPAENDVKLGALKLKPNTKIMMMGTREESLEDVLGPPPDNDDVVNDFDIEDEVVEVENREENLLKISRRVKEYKVEILNPPREGKKLLVLDVDYTLFDHRSCAETGVELMRPYLHEFLTSAYEDYDIVIWSATNMKWIEAKMKELGVSTNANYKITFMLDSAAMITVHTPRRGLIDVKPLGVIWGKFSEFYSKKNTIMFDDIGRNFLMNPQNGLKIRPFMKAHLNRDKDKELLKLTQYLKEIAKLDDFLDLNHKYWERYLSKKQGQ

SEQ ID NO: 5801 - DNA, 393 bp, Homo sapiens
ttctgtcttgaagacacactgcagtaagtttacttttatcaatatttaaaagaaaattaccataagtatgctagggactgttaattctgatgcatttaaacttttagttttgcttagaaaacttacttatacagattttttttaaagaaattcaagcttttcatatgtattgtattatcattcctcgtgttttagctgcaacaaatatgaagtggattgaagctaaaatgaaagagctgggagtgagcacaaatgcaaattataagattactttcatgttggatagtgctgctatgataacagtacatactccaaggagaggattaatagacgtaagaagtcattttatttctatttaatgacaccatggttattttccagtgtactttttat

SEQ ID NO: 5802 - protein, 64 aa, Homo sapiens
MYCIIIPRVLAATNMKWIEAKMKELGVSTNANYKITFMLDSAAMITVHTPRRGLIDVRSHFISI

SEQ ID NO: 5803 - DNA, 1954 bp, Homo sapiens
cacattgtgatgtgttgagtaatgtttgtttcctaatagataaggccttttatgaaagcgcacctaaatcgtgataaagacaaagaacttttaaaattaactcagtacctcaaggagatagcaaaattagatgactttttggatctaaatcacaaatattgggaaaggtaagttttaattgcttatttattttctctttacatcaatgaagaaaaaattatcatttttcatcagtgaccccagtatatatatagctgtcttaatttttatttaaaataggtgacttctaaaaacattttctaatccagtgacctacccccaaaagtattttcccctttcatcttaacctctaacttgttcataaacatacctcttgtaaactctttaatacttctagaagagagaacttgagagactagcatatgttggtgatgctgcctgtaaattattttgtgatgttaggtaagctactcctttatgaatcacatggaatataatccctcttctcatactgtaacttaatgtcaggataagataaaacacatgtaaaaatttcataaatagtattaaaaattaccagtaacttgagtgtagcagagaaattagaaaagtttatcctactaaaaaaacaattactcataattttcctttttaaagataaccactgttaccatcttggtatatagtctttcagtcttttatctaaacccaaatgtttgcacaaatctatatagacgttgcctataaacatcaaggttttgagacagagaaaagtccccagagaagtggaaggtattactatgtattacagtatttgggggggaattagatctttgaggatctggttccagtaatacagcaccaaaagaaactatttgtgtaataataacactttggcttttcagattccacttttgacttttcagatcagtttgacacaagtcttctaagagtctataatcctaataggaagataaagcagacatttttacccccatctttaaattgcaaatgatgtaactgagtcatggagatagtaaatacttagtgcagtgccacaaagtgagcaaattgtaccagcaaaacatgtccaagtttgctgattttaggaactctttccccatccccacaccacacacacacacacacacacacacaaagtggagaaaaatgtatactcaacaatgtcattttgtgactttggaaacaagttatgttttgtgtttttgtctcattgtgttattgtctgactaaatctaaaaccaaacccatgttgaaactagtacttttccctttaaaaacaaaccaaaaaaaaaaacaaaaaaaaactttttaattaaagaacctagtttgctatgcttaaaattaccaagaattttttatttctttgtcatagacacaatttctcttctgtatgccactagttacatttctaaattctgagcggtctcagttaggcctgtatgtgtgtacatgtccaagtaaagctggaaaatgtcagtcttgacacagctgtgtcttagtatgagaaacagaagactgaagaataaaaactaaggaacaagaatgagtctctttttggtggctaagtagaatcttcctaaaaccattgtcataaaagcagttaaaggcaataaatttttaaaagggacatatcactgattcattcctaaaaagcatgaacaaaaagtttttgttctgttccagctatatcttgtctaagtgctaacactgtttcagtgaaaatatctagccataagattaaaaaaatatattatttgcaatgcttaagcctgcagatacgtaatgtgaccactgttttgtgttgacaatattgctttatacagttcttgtatttgaaaggaattgatccttttaaagaaacatggtgtatattgttcttacaggactaatttcagtggtgtaaataataaatatcttttcttaaaacatt

SEQ ID NO: 5804 - protein, 55 aa, Homo sapiens
MSKFADFRNSFPIPTPHTHTHTHTKWRKMYTQQCHFVTLETSYVLCFCLIVLLSD

SEQ ID NO: 5805 - DNA, 811 bp, Homo sapiens
agatatattttgctcccaaacgccgccctagaagaaggactacactgaaatgaaacggagatgattaaagtctgatttataggctgtacaagccctgaaagcaagaacggggttcacggcatcttgatacccccatgtggggacgttttggcgattttatttacaagaaagggattttacaccggagaggcttttaaatatgctaacagactggaccagctttctcatccccactggctgattaatgattcctccatgccaacccggttctcagagacaccaaggccagctctccaaagacctgggaaaaaattacttcatgtccttgtaaaaacgttttcacaaatttaagtgcaccagctttgaagcaagacagaattgggatcaagtccctgttccacccttaccagaaagtcttttcgtagctcacaaggggacatcaaagatgacaaagaggagtggaagaagacagagagaatcaatgtgaggagcctggaacagggctctgaattgtcttcccacagtgaaatcacttgtctattgctgagccaagaatttgactctgagcatctaggatgagaaagaagaactggcacctacgccatctctgcccctcgggactgactattttggtaagttcagttcacccatggaggaagtggttctcgtactttatctgcatgtaacaacaaaattcaggttcttggggctgatgcttggagattgtgattcagatctgggatggggctcaggaacctgcattttaacaatggaggttctaatgtggtcattggcaggttgttctaatgtg

SEQ ID NO: 5806 - protein, 31 aa, Homo sapiens
MPTRFSETPRPALQRPGKKLLHVLVKTFSQI

SEQ ID NO: 5807 - DNA, 2347 bp, Homo sapiens; identical to SEQ ID NO: 682

SEQ ID NO: 5808 - protein, 328 aa, Homo sapiens; identical to SEQ ID NO: 683

SEQ ID NO: 5809 - DNA, 1580 bp, Homo sapiens
agaggtcgctgcgagacggtacccgcgccccacagtccacccgctcctcggagtccccccgcgccccggagtccacccgcgccccggagtccacccgcgcaggtccacttctccatccctgctctcgacctccgcccctgcggtgggggaagttcctggggcggtggctgggaccaggccgggttttaggcgggcgcagatttccgggctaactttcctcgccgtctcagcgcgggaagggggaaatgggaaacccgggccagagcagcggagcttcccagccgcacacttcctccctccagccgtttgtctcggcaggggagggcccaggcagccaagccggcaggcccactggttatccgaccttgtgctctggccgtgggtggagaccttacatccagctcagagcgcctcctcccatcccctgtgtcctctaggcctccccagactttgccttttagccttccagtgaaacaagttctgtatccaagatatacaattaagtggacaaagcagattgcagaaagtcttttcgtagctcacaaggggacatcaaagatgacaaagaggagtggaagaagacagagagaatcaatgtgaggagcctggaacagggctctgaattgtcttcccacagtgaaatcacttgtctattgctgagccaagaatttgactctgagcatctaggatgagaaagaagaactggcacctacgccatctctgcccctcgggactgactattttggcccagtttcctcaacaatgaaatgggactaattatcccaggtcacacttctctctgggcttaccctgggaatcagatgattgagctttggatctcactctgttgcccaggctggaatgcagtgatacgatcatgactcactgcagcctcaaactcctgggttcaagtaaccctcccacctcagctttctgagtaactgggactacagaatgccccaccccacttagtccatagtgatgcccacctgtggttaatggagctgaggctgctggaccaaagggaggaagtctgttaggcatatgtggaacccaaaagaggaacttcatcaactgtcatggacagctctgccactttgtgaccctgtggactttttgggaagtgtttttgtggttcaccagtctctcattaggcaaggccatttgtcctgggttggtcttcttcattggtggaaagtacagctgggagatttggaatggttgcagattgacttgactctcataaggaactgccaccatgagcttttggggaaagacctcaagctgtggtgtgttgctgaggattgtgggattcctccaaatcttggggaacattttgagtcatcactggcagcagatttctgttgacaacttgagcaacttcagaatgaagaagccatcttcatctctcacatgaatatgactttgggtaaatcatctcgaaatctgaacccatggttgtgatccacactcctcctgagttctgatttttagtgtaacctttttcttctcattttttcttctttgtgcatctcttaaggaggtttttaaaatctcataattaaaaaatttatttcttc

SEQ ID NO: 5810 - protein, 37 aa, Homo sapiens
MGLIIPGHTSLWAYPGNQMIELWISLCCPGWNAVIRS

SEQ ID NO: 5811 - DNA, 2012 bp, Homo sapiens
gtacacaagaagaaatgaaaagaagtctgctaggaatccttgcagactaaaaggagatacatgagagagactttctttctgtctctggacattgtcatctgtctggagtacctagaactgcagcagtcttcatagaatcatgagagtaagcttttgtgttttagataaagtggcagatctgatttgttgatagcaattccctggagtgttgcattgagaagattctgaggccttggtctactatctgtgactgccatggaatcctgagtggagcgaaattaagttcccagacttgttataccctcctgacttgttctccccttccttgggaagggcatctgttccaggcaggtaacacctgtcatcctggctggtctagctgtgttctcgtcacccatgccggcacagtaccttacacgtaagaagagctcagaaattctttgctgaattcattcattttgaggcataaaatccaatcttcctgaagataagtcctttccactgaactggtggggtgtggggaaaggggttgctggtacttcatctggggaccccgaagggaccaggatatgagttggctagaaaaggggcaggtaagtatggggctttcccacccacagtagtcctgcttcatgttcttctttcacaattatttgacagggcaccccatgaaatcaagtggctaagtcagatttaggaagtggttttgaaattgatgggtgcagggaagtacccttgagtcaaaatcagaagaaatgggggaatgccgaagaaacactcagagttaatgagatgaatccccctacatgagcattgtgggatgtctgcccaacccacacagccaagatatgctccttcaggtgtgtcctgcccaccgaccacagctgactgaaccacagaatttccttttaccccgggctgctcccctttttgtgttcagcccagcagtctgccttcattccctcaaggaagagctgacataaaagaaagcaaaggggtggcaaaaaaaagaagttaatgattaaccttgagcttcaagagcttaagcataggcaaataggaaggcttcgtgcacatacaacatatttgagagaatatgagtggagtaaagatctctgccaaatgtaaacatgagcatcgccgctctgtgtaagactcttcagtgactcccccttgccttccagataaagtccatgtttcttaacatggttccaaggccttgcttgatccagtgactatgcatccattacaggctgaattgtgtcccataaaattcatacattgaagccccagcctccagtaattcagaacatgactgtatttgtagatagagtctttaacgaggtaattaagttaaaatgaggtcatgtgtgggggcccttaattcaatatgcctgacgtctttatacaaaaaggagataaggacacagacacgaacagagggaagcccatgtgaaggcaaagaggaaaatggccattaccacccaaggagagaggcctcaggagaaaccaacccagctaacacctggatctcaaacttcctgcctccagaatgatgagaacatacatttctgttgttttaaccacccagtcggtgatactttgctctggcagccctagcatctctctccttcacctccctaaaccgccctccccaggttatgacactctagctgtgtgctcaatgccctctccactccaggctggccccactctcacctgggcatctacattgctcccaccactcttcatccagctaactccttcctccatgaagccatccctgacctttaagtatctcctaagatacccgcttccttcccctctcagagccccatgttacgactacccatttactctgtgtcaataccacactgtgtgctacattagaacaggggccatatgtatcttgctcacatctgtgcctagaacagtgtctggtacctacaagtgctcaataaattcttttggatgactggcaattaatgaaaataaatcaaataattcaaagc

SEQ ID NO: 5812 - protein, 58 aa, Homo sapiens
MSIVGCLPNPHSQDMLLQVCPAHRPQLTEPQNFLLPRAAPLFVFSPAVCLHSLKEELT

SEQ ID NO: 5813 - DNA, 733 bp, Homo sapiens
tatacactgatcactatgaagacataaagatttgttaaaagtggcctttgaagagcatgtaattgtgtccagaattggcgggttcttggtctcactgacttcaagaatgaagccgcagaccctcacggctaagacatccaaggtcaaagggcctacatctggtgaaggtcttgctgctttatcccatggtggaaggcagatgggttcacagaaaatagaaattctttacacagtcttctgatcaatagaatcaaagccctttttctgtaaatactggctagagagttgctaacttccataatggagaaatggaaaaagcagtttctttctccaataaaaccacaaaagccatggttttaaaagaaactatagaggatttcttgtgtggagtccttagctttgtgactgctgagatttaagacataggaaatcatgacttcctcgtggcagcctcatgattctgagatcacagcacgtgcatttggtacagccagcagaggtggtggtgtcttctcgaattcctgaccttctttccatggcagaagaagcaacccttttgctaactgaggtctatggtggtgttcctggaatctccatctctaacctatttacctaatccttccaaaaatcttatattgaatcttttcatgtttaaattatttagaatggtttgtggtatctgtaaacactgaccaatgcttcccacaataaaatcagcagtatggaaagaaag

SEQ ID NO: 5814 - protein, 44 aa, Homo sapiens
MKPQTLTAKTSKVKGPTSGEGLAALSHGGRQMGSQKIEILYTVF

SEQ ID NO: 5815 - DNA, 215 bp, Homo sapiens
agacacctcacttaaaaattctagttatggaataattgtgatgccataggaagaaaattaagcaagctgtctactcttgggaaatgttaacaaatgcctgtgcatactgtgaagagtccacggggaagaaaatgagccacacaagatggtcccacctatatttattatacactgatcactatgaagacataaagatttgttaaaagtggcctttg

SEQ ID NO: 5816 - protein, 39 aa, Homo sapiens
MLTNACAYCEESTGKKMSHTRWSHLYLLYTDHYEDIKIC

SEQ ID NO: 5817 - DNA, 1770 bp, Homo sapiens
ccgccctccaatatattcctcgttagggcaggcgcggccccttcggctccgagctgaccctgatcagggccgagttgtctcggcggcgctgccgaggcctccgcccggggagggtggttaccgctgaggagctgcagtctctgtcaagatgatagaggtactgacaacaactgactctcagaaactgctacaccagctgaatgccctgttggaacaggagtctagatgtcagccaaaggtctgtggtttgagactaattgagtctgcacacgataatggcctcagaatgactgcaagactaagggactttgaagtaaaagatcttcttagtctaactcagttctttggctttgacacagagacattttctctagctgtgaatttactggacagattcctgtctaaaatgaaggtacagcccaagcaccttgggtgtgttggactgagctgcttttatttggctgtaaaatcaatagaagaggaaaggaatgtcccattggcaactgacttgatccgaataagtcaatataggtttacggtttcagacttgatgagaatggaaaagattgtattggagaaggtgtgttggaaagtcaaagctactactgcctttcaatttctgcaactgtattattcactccttcaagagaacttgccacttgaaaggagaaatagcattaattttgaaagactagaagctcaactgaaggcatgtcattgcaggatcatattttctaaagcaaagccttctgtgttggcattgtctatcattgcattagagatccaagcacagaagtgtgtagagttaacagaaggaatagaatgtcttcagaaacattccaagataaatggcagagatctgaccttctggcaagagcttgtatccaaatgtttaactgaatattcatcaaataagtgttccaaaccaaatgttcagaagttgaaatggattgtttctgggcgtactgcacggcaattgaagcatagctactacagaataactcaccttccaacaattcctgaaatggtcccttaactggattattacagcaccaaaaaacttctctgaagcctttctccacaaccttgttctatggattccataatgttacaatggatttaagctatgaagcctcaaaacatcacgagataagcatgatggtctcagacttgggaaaactgcctaatattatgctgtagtggaattatgtttagatttgaattcatctgtgaagcattcaaatcaaagctaaaagcctaaatgtgaaatgctaatgacaagcctgagaaggtaaactgtgaatcttcatttctatcattgatctaactttagatattggatcaatatatttaggtggtattgaaaatgctattggaggagtcacactaatactatcaactatcagtcttcccacagcttcaatcactgtcattattctaatcctactcctacttaaattttaagttatgaggtttatgtcaaaagcaacatttcacaaatgtacttttaaggcataataagggttaacattctaggcagtataaacacaccccataatgcaagtaataggtaatctagagatgtggactttattgctatatgggaattacatttaaatttgagggcattttatataaagaaaaatacagacctataaagtttggcatattcattaagttatcttttaatatttttttctagaaaacaggtgacatttgtatctacgataaaaatttttatacagaacctactgcctcaaactgaatccc

SEQ ID NO: 5818 - protein, 295 aa, Homo sapiens; identical to SEQ ID NO: 685

SEQ ID NO: 5819 - DNA, 2387 bp, Homo sapiens
ccgccctccaatatattcctcgttagggcaggcgcggccccttcggctccgagctgaccctgatcagggccgagttgtctcggcggcgctgccgaggcctccgcccggggagggtggttaccgctgaggagctgcagtctctgtcaagatgatagaggtactgacaacaactgactctcagaaactgctacaccagctgaatgccctgttggaacaggagtctagatgtcagccaaaggtctgtggtttgagactaattgagtctgcacacgataatggcctcagaatgactgcaagactaagggactttgaagtaaaagatcttcttagtctaactcagttctttggctttgacacagagacattttctctagctgtgaatttactggacagattcctgtctaaaatgaaggtacagcccaagcaccttgggtgtgttggactgagctgcttttatttggctgtaaaatcaatagaagaggaaaggaatgtcccattggcaactgacttgatccgaataagtcaatataggtttacggtttcagacttgatgagaatggaaaagattgtattggagaaggtgtgttggaaagtcaaagctactactgcctttcaatttctgcaactgtattattcactccttcaagagaacttgccacttgaaaggagaaatagcattaattttgaaagactagaagctcaactgaaggcatgtcattgcaggatcatattttctaaagcaaagccttctgtgttggcattgtctatcattgcattagagatccaagcacagaagtgtgtagagttaacagaaggaatagaatgtcttcagaaacattccaagataaatggcagagatctgaccttctggcaagagcttgtatccaaatgtttaactgaatattcatcaaataagtgttccaaaccaaatgttcagaagttgaaatggattgtttctgggcgtactgcacggcaattgaagcatagctactacagaataactcaccttccaacaattcctgaaatggtcccttaactggattattacagcaccaaaaaacttctctgaagcctttctccacaaccttgttctatggattccataatgttacaatggatttaagctatgaagcctcaaaacatcacgagataagcatgatggtctcagacttgggaaaactgcctaatattatgctgtagtggaattatgtttagatttgaattcatctgtgaagcattcaaatcaaagctaaaagcctaaatgtgaaatgctaatgacaagcctgagaaggtaaactgtgaatcttcatttctatcattgatctaactttagatattggatcaatatatttaggtggtattgaaaatgctattggaggagtcacactaatactatcaactatcagtcttcccacagcttcaatcactgtcattattctaatcctactcctacttaaattttaagttatgaggtttatgtcaaaagcaacatttcacaaatgtacttttaaggcataataagggttaacattctaggcagtataaacacaccccataatgcaagtaataggtaatctagagatgtggactttattgctatatgggaattacatttaaatttgagggcattttatataaagaaaaatacagacctataaagtttggcatattcattaagttatcttttaatatttttttctagaaaacaggtgacatttgtatctacgataaaaatttttatacagaacctactgcctcaaactgaatcccatcaagaaaactagtttctattgtattagtaactcaaaataaattatcacttcgaaaacttgctttcccacactaaggtaagttcagactagattgaacactccagaattttttactacagactgtttttaagttagaagtgatggcaattttataaatagagaatatacttccactgatgcccttactgtgccaaaacaaaaatcttaagaaaagcaagtagacaccttcataactatgaatgaagctgctgaagtagtgtttaggatcctccatggcagttagtgaatgtaagaagtacagtgttaaagtgttgtaaacagttactcagtgcaatgtatagcctgagtctatccatgatggctatatccaatttgacatcacgttatggatcagtacacaatgaaaaaccaaagaaccacagtatatcttattcttaacttttgtaaaccatgttttatgggtaactttttagttttcccaaaaggctgataaatttcaatattttgaatacatcattgttaattttgagttggcagaggtaaactaaccaactaccattatgttttagtactaagggatatacctttcaataaagttaatgaaattcaatcctt

SEQ ID NO: 5820 - protein, 295 aa, Homo sapiens; identical to SEQ ID NO: 685

SEQ ID NO: 5821 - DNA, 2473 bp, Homo sapiens
attcctcgttagggcaggcgcggccccttcggctccgagctgaccctgatcagggccgagttgtctcggcggcgctgccgaggcctccacccaggacagtccccctccccgggcctctctcctcttgcctacgagtcccctctcctcgtaggcctctcggatctgatatcgtggggtgaggtgagcaggcccggggagggtggttaccgctgaggagctgcagtctctgtcaagatgatagaggtactgacaacaactgactctcagaaactgctacaccagctgaatgccctgttggaacaggagtctagatgtcagccaaaggtctgtggtttgagactaattgagtctgcacacgataatggcctcagaatgactgcaagactaagggactttgaagtaaaagatcttcttagtctaactcagttctttggctttgacacagagacattttctctagctgtgaatttactggacagattcctgtctaaaatgaaggtacagcccaagcaccttgggtgtgttggactgagctgcttttatttggctgtaaaatcaatagaagaggaaaggaatgtcccattggcaactgacttgatccgaataagtcaatataggtttacggtttcagacttgatgagaatggaaaagattgtattggagaaggtgtgttggaaagtcaaagctactactgcctttcaatttctgcaactgtattattcactccttcaagagaacttgccacttgaaaggagaaatagcattaattttgaaagactagaagctcaactgaaggcatgtcattgcaggatcatattttctaaagcaaagccttctgtgttggcattgtctatcattgcattagagatccaagcacagaagtgtgtagagttaacagaaggaatagaatgtcttcagaaacattccaagataaatggcagagatctgaccttctggcaagagcttgtatccaaatgtttaactgaatattcatcaaataagtgttccaaaccaaatgttcagaagttgaaatggattgtttctgggcgtactgcacggcaattgaagcatagctactacagaataactcaccttccaacaattcctgaaatggtcccttaactggattattacagcaccaaaaaacttctctgaagcctttctccacaaccttgttctatggattccataatgttacaatggatttaagctatgaagcctcaaaacatcacgagataagcatgatggtctcagacttgggaaaactgcctaatattatgctgtagtggaattatgtttagatttgaattcatctgtgaagcattcaaatcaaagctaaaagcctaaatgtgaaatgctaatgacaagcctgagaaggtaaactgtgaatcttcatttctatcattgatctaactttagatattggatcaatatatttaggtggtattgaaaatgctattggaggagtcacactaatactatcaactatcagtcttcccacagcttcaatcactgtcattattctaatcctactcctacttaaattttaagttatgaggtttatgtcaaaagcaacatttcacaaatgtacttttaaggcataataagggttaacattctaggcagtataaacacaccccataatgcaagtaataggtaatctagagatgtggactttattgctatatgggaattacatttaaatttgagggcattttatataaagaaaaatacagacctataaagtttggcatattcattaagttatcttttaatatttttttctagaaaacaggtgacatttgtatctacgataaaaatttttatacagaacctactgcctcaaactgaatcccatcaagaaaactagtttctattgtattagtaactcaaaataaattatcacttcgaaaacttgctttcccacactaaggtaagttcagactagattgaacactccagaattttttactacagactgtttttaagttagaagtgatggcaattttataaatagagaatatacttccactgatgcccttactgtgccaaaacaaaaatcttaagaaaagcaagtagacaccttcataactatgaatgaagctgctgaagtagtgtttaggatcctccatggcagttagtgaatgtaagaagtacagtgttaaagtgttgtaaacagttactcagtgcaatgtatagcctgagtctatccatgatggctatatccaatttgacatcacgttatggatcagtacacaatgaaaaaccaaagaaccacagtatatcttattcttaacttttgtaaaccatgttttatgggtaactttttagttttcccaaaaggctgataaatttcaatattttgaatacatcattgttaattttgagttggcagaggtaaactaaccaactaccattatgttttagtactaagggatatacctttcaataaagttaatgaaattcaatcctt

SEQ ID NO: 5822 - protein, 295 aa, Homo sapiens; identical to SEQ ID NO: 685

SEQ ID NO: 5823 - DNA, 2798 bp, Homo sapiens
ccttcggctccgagctgaccctgatcagggccgagttgtctcggcggcgctgccgaggcctccgcccggggagggtggttaccgctgaggagctgcagtctctgtcaagatgatagaggtactgacaacaactgactctcagaaactgctacaccagctgaatgccctgttggaacaggagtctagatgtcagccaaagagacattttctctagctgtgaatttactggacagattcctgtctaaaatgaaggtacagcccaagcaccttgggtgtgttggactgagctgcttttatttggctgtaaaatcaatagaagaggaaaggaatgtcccattggcaactgacttgatccgaataagtcaatataggtttacggtttcagacttgatgagaatggaaaagattgtattggagaaggtgtgttggaaagtcaaagctactactgcctttcaatttctgcaactgtattattcactccttcaagagaacttgccacttgaaaggagaaatagcattaattttgaaagactagaagctcaactgaaggcatgtcattgcaggatcatattttctaaagcaaagccttctgtgttggcattgtctatcattgcattagagatccaagcacagaagtgtgtagagttaacagaaggaatagaatgtcttcagaaacattccaagataaatggcagagatctgaccttctggcaagagcttgtatccaaatgtttaactgaatattcatcaaataagtgttccaaaccaaatgttcagaagttgaaatggattgtttctgggcgtactgcacggcaattgaagcatagctactacagaataactcaccttccaacaattcctgaaatggtcccttaactggattattacagcaccaaaaaacttctctgaagcctttctccacaaccttgttctatggattccataatgttacaatggatttaagctatgaagcctcaaaacatcacgagataagcatgatggtctcagacttgggaaaactgcctaatattatgctgtagtggaattatgtttagatttgaattcatctgtgaagcattcaaatcaaagctaaaagcctaaatgtgaaatgctaatgacaagcctgagaagaaaacaggtgacatttgtatctacgataaaaatttttatacagaacctactgcctcaaactgaatcccatcaagaaaactagtttctattgtattagtaactcaaaataaattatcacttcgaaaacttgctttcccacactaagaaaccaaaaaacagtaaacatgagtcaagatgaattaaaagataagccaatttttaaggccgagcgcagtggctcacacctgtaatcccagcactttgggaggccaaggtggacggatcacttgaggccaggagttcgagaccagcatggccaacatggtgaaaccccatctctactaaaaatacaaaaatcagctgggtgtggtggcgcatgcctgtagtaccagttactccagagactgaggcaggagaattgcttgaacctgtgaggcagtgagacaagatcacaccactgctctccaacctgggcaacagagtgaggctcttgtctcaaaaaataaattaaaaagccatttttatattcatcaaagtagagttaggaacaaccaaaattgccaaggataattagggacattatataatgataaaattcaccaagacagtgctaaaagtgtaagcacttattatcagatcttaaaaatacatgaagagaccaggtacagagactcattcattcctgtaattccaatgctttgggaagccaaggtgggaggattgcttgaggccaagagttcaagaccagcctactcaacatagggagaccctatctctacaaaaaatcaaaaattagctaggcatagtgatatacatctgtagtcctaggtactgaggagcctgaggtgggaagactgtctgagcccaggagtttgaggctgcagtgaagcatgacagagttgctatgctccagcctgagtgacagggtaagactcaaaaaaaaaaaaaaaaacatgaagcaaaaagtggtagcattaaaaggaggactggacaaatcttcatttacagttggaaacttaaacattcctctctcagtagtccatagaattaatagaaaattagcaaagatgtaggaaaatggaataatactaataaccagctagatttaattgacataaaacccttctacctaaaacagcagaataagcattcttttcaagtacacatggaacactcaccaagataaaccacatcatgggtcttaaaccttaacaaatttaaaagagatgaaatcatataaaatatgttttttgaccataatctagaaatcagtaacagcaagaaaatctccaaacacttggaaattaaacaacacatttctaaataactcatgatactacagggaagtcttaaaaaatattttaaaataaatgaaaatatcaccgtgcttggaatgcagccatgctggtgctgcaatttataacaatcgactgctttttactaaacaagaaaaagttctcaaattaacactctaagctcccactttaagaaagtaggaaaatctaactgggtgtggtggcacaccactatagtcccagccactcagaaggctgaggtaggaggatcatgaccccacgagtttgaggctgcagtgagctatgatcataacactactccagtctgggtgatgaagtgagacctgtctacaaaaaaaagaagcccaaactaaacctaaagcaagcagaaag

SEQ ID NO: 5824 - protein, 229 aa, Homo sapiens
MSAKETFSLAVNLLDRFLSKMKVQPKHLGCVGLSCFYLAVKSIEEERNVPLATDLIRISQYRFTVSDLMRMEKIVLEKVCWKVKATTAFQFLQLYYSLLQENLPLERRNSINFERLEAQLKACHCRIIFSKAKPSVLALSIIALEIQAQKCVELTEGIECLQKHSKINGRDLTFWQELVSKCLTEYSSNKCSKPNVQKLKWIVSGRTARQLKHSYYRITHLPTIPEMVP

SEQ ID NO: 5825 - DNA, 1947 bp, Homo sapiens
gactgagctgcttttatttggctgtaaaatcaatagaagaggaaaggaatgtcccattggcaactgacttgatccgaataagtcaatataggtttacggtttcagacttgatgagaatggaaaagattgtattggagaaggtgtgttggaaagtcaaagctactactgcctttcaatttctgcaactgtattattcactccttcaagagaacttgccacttgaaaggagaaatagcattaattttgaaagactagaagctcaactgaaggcatgtcattgcaggatcatattttctaaagcaaagccttctgtgttggcattgtctatcattgcattagagatccaagcacagaagtgtgtagagttaacagaaggaatagaatgtcttcagaaacattccaagataaatggcagagatctgaccttctggcaagagcttgtatccaaatgtttaactgaatattcatcaaataagtgttccaaaccaaatgttcagaagttgaaatggattgtttctgggcgtactgcacggcaattgaagcatagctactacagaataactcaccttccaacaattcctgaaatggtcccttaactggattattacagcaccaaaaaacttctctgaagcctttctccacaaccttgttctatggattccataatgttacaatggatttaagctatgaagcctcaaaacatcacgagataagcatgatggtctcagacttgggaaaactgcctaatattatgctgtagtggaattatgtttagatttgaattcatctgtgaagcattcaaatcaaagctaaaagcctaaatgtgaaatgctaatgacaagcctgagaaggtaaactgtgaatcttcatttctatcattgatctaactttagatattggatcaatatatttaggtggtattgaaaatgctattggaggagtcacactaatactatcaactatcagtcttcccacagcttcaatcactgtcattattctaatcctactcctacttaaattttaagttatgaggtttatgtcaaaagcaacatttcacaaatgtacttttaaggcataataagggttaacattctaggcagtataaacacaccccataatgcaagtaataggtaatctagagatgtggactttattgctatatgggaattacatttaaatttgagggcattttatataaagaaaaatacagacctataaagtttggcatattcattaagttatcttttaatatttttttctagaaaacaggtgacatttgtatctacgataaaaatttttatacagaacctactgcctcaaactgaatcccatcaagaaaactagtttctattgtattagtaactcaaaataaattatcacttcgaaaacttgctttcccacactaaggtaagttcagactagattgaacactccagaattttttactacagactgtttttaagttagaagtgatggcaattttataaatagagaatatacttccactgatgcccttactgtgccaaaacaaaaatcttaagaaaagcaagtagacaccttcataactatgaatgaagctgctgaagtagtgtttaggatcctccatggcagttagtgaatgtaagaagtacagtgttaaagtgttgtaaacagttactcagtgcaatgtatagcctgagtctatccatgatggctatatccaatttgacatcacgttatggatcagtacacaatgaaaaaccaaagaaccacagtatatcttattcttaacttttgtaaaccatgttttatgggtaactttttagttttcccaaaaggctgataaatttcaatattttgaatacatcattgttaattttgagttggcagaggtaaactaaccaactaccattatgttttagtactaagggatatacctttcaataaagttaatgaaattcaatcctt

SEQ ID NO: 5826 - protein, 161 aa, Homo sapiens
MRMEKIVLEKVCWKVKATTAFQFLQLYYSLLQENLPLERRNSINFERLEAQLKACHCRIIFSKAKPSVLALSIIALEIQAQKCVELTEGIECLQKHSKINGRDLTFWQELVSKCLTEYSSNKCSKPNVQKLKWIVSGRTARQLKHSYYRITHLPTIPEMVP

SEQ ID NO: 5827 - DNA, 800 bp, Homo sapiens
ttagatgcatagtaccagaaacaataaaatccctattaataatatgactattagatgacactttactttgttttttctgaaacattataaaaagctctctctactcagtatatttaaatttagtactaaagttagatgcatagtaccagaaacaataaaatccccattaataatatgactattagctgacactttgttttgttttttctgaaacattataaaaagctctctctacccagtatatttaaatttagtactaaagttagatgcatagtaccagaaacaataaaatccctattaatagtatgactattagctgacatgcaccccagcctgggtgacagagtgagaatgtgagtcaaaaaaagaaaaaagaaaaattcctcatgacctggggttaaggttcctagacatgacaccaaaaacatgatccaccaatggcatgatggataagacttcatcaaaattaagtctgtgcttcaaaagacactatcaacaaagtaaagagagaataggagaaattacaaatcatatacctggtaagagacttgtacccagaatatataaagactcttactacccaataagacaactaaaaaaatgggtaaataatttgaataaacactgctttaaggaagatacacaaatagccaataagcacaagaaagaatgctcaacatagtatcagagaatagcaaaccaaaactagatagagatcccatttcatatccactagagtgactaaaatcaaaatgtcaggtaaacaagtattggcaaggatgcagagaaaatggaacctg

SEQ ID NO: 5828 - protein, 79 aa, Homo sapiens [sequence omitted]

SEQ ID NO: 5829 - DNA, 3182 bp, Homo sapiens
tcctattctctctttactttgttgatagtgtcttttgaagcacagacttaattttgatgaagtcttatccatcatgccattggtggatcatgtttttggtgtcatgtctaggaaccttaaccccaggtcatgaggaatttttcttttttctttttttgactcacattctcactctgtcacccaggctggggtgcagtggcacaatctccactcactgcaacctctgcctgctgggttcaagtgattcttgtgcttcagtctcccaagtagctgggactacaggtgtgcaccaccactcccagcccattttttttttattttttatttttagtagagttgggatttcaccatataggctaggctggtcttgaactgacctcaacggatctgcccgcctcagcctctgaagtgctgggattacaggcatgagccaccgtgcccggcctatggatttttttcttctaaaaattttataaatttagttctacatttagatccgtgatccattttaggttaatttttgtataagctgtgaaatttaggtaggtttatttttttgcatatggatgttcagttgttttaaaatcgtctgttgaaaaactctccattccccattgagttgtcttttcacctttgtcagaaatcaattgctatttatgtgagtctggttttggactttattccatcgatctatgtgtttatcctttcataaataccagattgccttgattatcacagctttatagtaagtcttaaaactgggcagcatgattccttcaaaatttttttgaaatctttttcaaaattgttttggctaatttagtttctttgccttccatatgaattttagaattagctactctgtatctacaaaaaatcctactggggttttgaatgcaattttgtgtcttccaatccatgaacatgaggtatctatttaggacctctttcatttcagttatcagcattttatgtcatttttcagcatatattccacagtgttcattttggaggaactattgttaagttgtattatttttgaaacatgggtttccaattgcacatcgctagtatgtacaaatgtgtttgatttttgtttgttgaccttgtatcctgtgaccttgctaaacttcattagttttgggagttattttgttgttaactcattaagttttctacataaactacgaatagaaacagttttattttattctttttagtctatgatttttcttgcctgattttgttgttaactcattaagttttctacataaactacgaataggaacagttttattttattctttttagtctatgatttttcttgcctgattgcagtggccagaacaataacatggagaaagtggccatctcagtcttgttctggatcttaggattttgaaagcattgtttttgaccattatgtatgcaagctgtaggcttttcttaaattccctttgtcatgttgagcaagttcccatctattaatttgttgttagcagagtttcatgagtggatgctgaattttctatgctctttctgtatcagtttggtcattctttttgtttagactgttaaaatcatggattttactgattccagaattttgaaacagcttatatttcctcccaaccccaaacttggtcatggtacattattcagcttatgtatctagatttttattttttgaggatttttatgtctgtgttcattttggatattgtgcaattgtttttgtttgttttttccttgtgttatctttatcttggtatggtatcatgttaattctggtcttgtaaaatgaattgcaaagtgattattctttctggaagagatttgtagaatttgttatatctttaaatgttttatgaatttgctagtaaggttttaaacaatggttcaatttttaaaaatagagaatttattgaggtttatttaagtttgggtactgtatgcctttcaaggaattggttcatctaatcctatgtgcatagagttgttcatggtattttctttgtgtcgttctaatgaggatctatactgttatcttttctttgattcctaagattggaatcaaagattggaattccttctctttttttgtcaattttgccagaggtttatcaattttactgctcttttcaaaaattagttttttgattgttttctattaatttgtttacaattgcatttattttctgcctcttttttttttttcttctttctgcttgctttaggtttagtttgggcttcttttttttgtagacaggtctcacttcatcacccagactggagtagtgttatgatcatagttcactgcagcctcaaactcctgggctcagacagtcttcccacctcaggctcctcagtacctaggactacagatgtatatcactatgcctagctaatttttgattttttgtagagatagggtctccctatgttgagtaggctggtcttgaactcttggcctcaagcaatcctcccaccttggcttcccaaagcattggaattacaggaatgaatgagtctctgtacctggtctcttcatgtatttttaagatctgataataagtgcttacacttttagcactgtcttggtgaattttatcattatataatgtccctaattatccttggcaattttggttgttcctaactctactttgatgaatataaaaatggctttttaatttattttttgagacaagagcctcactctgttgcccaggttggagagcagtggtgtgatcttgtctcactgcctcacaggttcaagcaattctcctgcctcagtctctggagtaactggtactacaggcatgcgccaccacacccagctgatttttgtatttttagtagagatggggtttcaccatgttggccatgctggtctcgaactcctggcctcaagtgatccgtccaccttggcctcccaaagtgctgggattacaggtgtgagccactgcgctcggccttaaaaattggcttatcttttaattcatcttgactcatgtttactgttttttggtttctgaaaaatagatttaataaataataacattttatcaaagttattagtatagagaaataaattgagtgttgttattattctatgatcatgatgacagcacagaagttaatgtggccagcatatagttttgattaaaaattatacaagc

SEQ ID NO: 5830 - protein, 33 aa, Homo sapiens
MIIVHCSLKLLGSDSLPTSGSSVPRTTDVYHYA

SEQ ID NO: 5831 - DNA, 8192 bp, Homo sapiens
aggggacggtgtagtgagttccggcttcactggttccaattctgtcccattgttcgttgcatgtgaacttttctggatttcagttctttcatccggggcctgccggtgccgtaaacggccattcaaagggaaaaacgaacacgcacaccaaagcgctagcttgcgttcctgcgcatgcgcagtgacccgagcggagaggccgaggcgtagcctaagcgtgggattccgcgcgtgcgctcggctccgcctggtgcggccgcggccgggagggactggattatgtcggccccgtttgaggagcggagtggggtggtaccgtgcgggaccccgtggggccagtggtaccagaccttggaggaggtgttcattgaagttcaggtgccgccaggcacgcgcgcccaggatatccagtgcggcctccagagccggcatgtggcgctgtcggtgggcggccgcgagatcctcaagggcaaactctttgattctacaatagctgatgagggaacatggactttggaggacagaaaaatggttcgtattgttcttacaaagacaaagagagatgcagcaaattgttggacttctctactagaatctgaatatgcagcggatccttgggtgcaagaccaaatgcagagaaagcttacattagagagattccaaaaagaaaatcctggttttgacttcagtggagcagaaatctcaggaaactacactaaaggtggaccagatttctcaaaccttgagaaataactgctttttttcctgcattctgtggatcctagcagatattgccaacttaatcagataaacagattatgtaatggaagaaaaatgcggatgcctacagttaacagattgcaaaatgtatcttaaaatggttctaaaaattgcattcaaacataatttacataggaaatgtactgtgggaactattctatggatatatggtaaagttgttttggacttgtttttgctcagcatgaagttttatatgctgcattttactaattccatatttaaccatatttttaatacaaaagaacattagagtatagatcatgtgaaatgaagggtgcctttggggaaaattaactttttcttttgataagtatgatattcaataaaattttctaaataggaattgtgtacccctttgtctaagtataacaattcacacaaaattatagtgctgaaaacaattttaataaaggaaaaagtccataaatgtattttaagtaaattaagagttaatgtaaatttcttaattagaatattattacttgagggattactttatgtcaagaagtttaaaaatagttaaaaccctaacaatagaagtggattaacacaaaagagaagtgtgatcatggtaattaggtgagtcctttgtggcagaaagcaaagtaaggtcactaattgtatatcagtggcatcattttgattgtaagtgatttaggcatataggtaggaattgtctatagacattttattcaatatcctatttatgtcctttttattttttgccctttttaactcttgaaaaaattttaaatctcatgcatagaaaagttacagataatttttttctttctgaaccatttgtgatttagttgaagacatgattcctcattactgattactatctgcttcaaattatcttacatgactacaatgcaaccattagaatcaggaaatttacgttgacacattactaccctctaatcctcagatcttcacttcattcacattgaactgattgtcccaataatgtccatatagcaagaggatccagtcagaatcatgcctttcatttagatgtcagctgtctttagtttacttcattctggaacaaattctcatttgtttccttttacaacttagtacttttgacaattatgggctagttttgtagaacaccccttattttgagttctgtctgatacttcatgattagattgaggttattcatctttggcaggaatgtgatagaagtgcatcctgtcattgtttaataatttcagtttgtctcatttctgatggtgtttcttagatgactgattaaggtagtgtctgccagacttctccactgtagttatttttataattatttcttgagaagatagttgcaaaatactaccttgtttctgatcagactttaaatttatcgtatctctataaactcattattttctattttattcagcaggttaaaaaacctattatcattacattggtgctcaaaattattgtacatttggctggtagaagtccattctgggtggcctctgtgtccttctgacacattcccatcattattcaatgaatttgttactctctggcataagatataccaggcttctcatgctgtcctcgacctaacccaagaatcagccatttttccgtagagcctgggttctctttagtgagtaatatttaaaagccaagatctgtgctagtgtgcaattgccgttggtgtgtatatataatgcatgtctttacatctatatttctgcatctatgtatattgaaaaccatgaattcacatataaattctgatcccatgggcttcattttcattttttccttctccacatttataaccgttttcagtaccagtgagaaacctgattcctatttgattatttgtggggttttttttttttaaggtggagtttcactcttgttgcccagactggagtgcagtcgcgcgatctcggcttactgcaacctccgcctcctgggttcaagcgattctcctgcctcagcctcccaagtagctgggattacaggcatgcgctgccacacctggctaatttttaatttttggtagagacggggtttctccatgttggtcaggctggtctcgaactccggacatcaggtgatccgcccgcctgggcctcccaaattgctgggattacaggtgtgagccactgcgcctggcctgattctctattgtaggtcatctccccacatgaatgtcttcctcaccctgcttaggcttcgcatcctatgctgagcaggaatgtcctcctcatcctgcctggaccctaatacctcactccaggccatggcagtccattcaccctgtgattcctatcttgctcattttaggaatgaattgtcgggggaagaggctatttttcttttaattttattctctttgacatttaacaaaattttttgagtaaagtaaaattaacttttttggtgtatggtttggtgaattttaagtatagatatgtgtaaacacctccacagtcagagtattgaagagttcaatcaccgtaaaaactctcgtgctctctttgtactctacacaccctactcccagcccctaaaccttggaaaccactgatctaatccccatctccatatttttgtcttcaagcatgttataaatgggatcatatataattaagaaaaacgctttattgtaacaacatacatttcacccatttaaggtgtgtaattcagtagcttttagtatatacacagataaatgcaaccattccaataatcaattttagaatgttttcatcacctcagatagaaaccttgtatagtttagcttttatccttctcctgtcatcccccgccatccatactacctcttttcatctcatagatttccttattctggacatttcatgtacatggaatcataatacgtggtctttggttactggcttccttcactttacatgtcttaagaggttcatctatattcgagcatgtatcagcacattcattagtatgtctgaaaatacttcattgtatggctgtagcactttgtttatacatttgtaagttggacattttgggtatttccaccctttggctgtcctgactaaagctgctataaacgtgtacaagtctttatgtgcatatgtgttttcatttcttacctaggagtagaatttttaggttatatgataactatgttaatcatttgaggagctgtcattgtttcccaaagcagctacatctttttactttcccaccagcagtgtatgcaggttccattttctctgcatccttgccaatacttgtttacctgacattttgattttagtcactctagtggatatgaaatgggatctctatctagttttggtttgctattctctgatactatgttgagcattctttcttgtgcttattggctatttgtgtatcttccttaaagcagtgtttattcaaattatttacccatttttttagttgtcttattgggtagtaagagtctttatatattctgggtacaagtctcttaccaggtatatgatttgtaatttctcctattctctctttactttgttgatagtgtcttttgaagcacagacttaattttgatgaagtcttatccatcatgccattggtggatcatgtttttggtgtcatgtctaggaaccttaaccccaggtcatgaggaatttttcttttttctttttttgactcacattctcactctgtcacccaggctggggtgcagtggcacaatctccactcactgcaacctctgcctgctgggttcaagtgattcttgtgcttcagtctcccaagtagctgggactacaggtgtgcaccaccactcccagcccattttttttttattttttatttttagtagagttgggatttcaccatataggctaggctggtcttgaactgacctcaacggatctgcccgcctcagcctctgaagtgctgggattacaggcatgagccaccgtgcccggcctatggatttttttcttctaaaaattttataaatttagttctacatttagatccgtgatccattttaggttaatttttgtataagctgtgaaatttaggtaggtttatttttttgcatatggatgttcagttgttttaaaatcgtctgttgaaaaactctccattccccattgagttgtcttttcacctttgtcagaaatcaattgctatttatgtgagtctggttttggactttattccatcgatctatgtgtttatcctttcataaataccagattgccttgattatcacagctttatagtaagtcttaaaactgggcagcatgattccttcaaaatttttttgaaatctttttcaaaattgttttggctaatttagtttctttgccttccatatgaattttagaattagctactctgtatctacaaaaaatcctactggggttttgaatgcaattttgtgtcttccaatccatgaacatgaggtatctatttaggacctctttcatttcagttatcagcattttatgtcatttttcagcatatattccacagtgttcattttggaggaactattgttaagttgtattatttttgaaacatgggtttccaattgcacatcgctagtatgtacaaatgtgtttgatttttgtttgttgaccttgtatcctgtgaccttgctaaacttcattagttttgggagttattttgttgttaactcattaagttttctacataaactacgaatagaaacagttttattttattctttttagtctatgatttttcttgcctgattttgttgttaactcattaagttttctacataaactacgaataggaacagttttattttattctttttagtctatgatttttcttgcctgattgcagtggccagaacaataacatggagaaagtggccatctcagtcttgttctggatcttaggattttgaaagcattgtttttgaccattatgtatgcaagctgtaggcttttcttaaattccctttgtcatgttgagcaagttcccatctattaatttgttgttagcagagtttcatgagtggatgctgaattttctatgctctttctgtatcagtttggtcattctttttgtttagactgttaaaatcatggattttactgattccagaattttgaaacagcttatatttcctcccaaccccaaacttggtcatggtacattattcagcttatgtatctagatttttattttttgaggatttttatgtctgtgttcattttggatattgtgcaattgtttttgtttgttttttccttgtgttatctttatcttggtatggtatcatgttaattctggtcttgtaaaatgaattgcaaagtgattattctttctggaagagatttgtagaatttgttatatctttaaatgttttatgaatttgctagtaaggttttaaacaatggttcaatttttaaaaatagagaatttattgaggtttatttaagtttgggtactgtatgcctttcaaggaattggttcatctaatcctatgtgcatagagttgttcatggtattttctttgtgtcgttctaatgaggatctatactgttatcttttctttgattcctaagattggaatcaaagattggaattccttctctttttttgtcaattttgccagaggtttatcaattttactgctcttttcaaaaattagttttttgattgttttctattaatttgtttacaattgcatttattttctgcctcttttttttttttcttctttctgcttgctttaggtttagtttgggcttcttttttttgtagacaggtctcacttcatcacccagactggagtagtgttatgatcatagctcactgcagcctcaaactcgtggggtcatgatcctcctacctcagccttctgagtggctgggactatagtggtgtgccaccacacccagttagattttcctactttcttaaagtgggagcttagagtgttaatttgagaactttttcttgtttagtaaaaagcagtcgattgttataaattgcagcaccagcatggctgcattccaagcacggtgatattttcatttattttaaaatattttttaagacttccctgtagtatcatgagttatttagaaatgtgttgtttaatttccaagtgtttggagattttcttgctgttactgatttctagattatggtcaaaaaacatattttatatgatttcatctcttttaaatttgttaaggtttaagacccatgatgtggtttatcttggtgagtgttccatgtgtacttgaaaagaatgcttattctgctgttttaggtagaagggttttatgtcaattaaatctagctggttattagtattattccattttcctacatctttgctaattttctattaattctatggactactgagagaggaatgtttaagtttccaactgtaaatgaagatttgtccagtcctccttttaatgctaccactttttgcttcatgtttttttttttttttttgagtcttaccctgtcactcaggctggagcatagcaactctgtcatgcttcactgcagcctcaaactcctgggctcagacagtcttcccacctcaggctcctcagtacctaggactacagatgtatatcactatgcctagctaatttttgattttttgtagagatagggtctccctatgttgagtaggctggtcttgaactcttggcctcaagcaatcctcccaccttggcttcccaaagcattggaattacaggaatgaatgagtctctgtacctggtctcttcatgtatttttaagatctgataataagtgcttacacttttagcactgtcttggtgaattttatcattatataatgtccctaattatccttggcaattttggttgttcctaactctactttgatgaatataaaaatggctttttaatttattttttgagacaagagcctcactctgttgcccaggttggagagcagtggtgtgatcttgtctcactgcctcacaggttcaagcaattctcctgcctcagtctctggagtaactggtactacaggcatgcgccaccacacccagctgatttttgtatttttagtagagatggggtttcaccatgttggccatgctggtctcgaactcctggcctcaagtgatccgtccaccttggcctcccaaagtgctgggattacaggtgtgagccactgcgctcggccttaaaaattggcttatcttttaattcatcttgactcatgtttactgttttttggtttctgaaaaatagatttaataaataataacattttatcaaagttattagtatagagaaataaattgagtgttgttattattctatgatcatgatgacagcacagaagttaatgtggccagcatatagttttgattaaaaattatacaagc

SEQ ID NO: 5832 - protein, 157 aa, Homo sapiens; identical to SEQ ID NO: 689

SEQ ID NO: 5833 - DNA, 1503 bp, Homo sapiens
gattatgtcggccccgtttgaggagcggagtggggtggtaccgtgcgggaccccgtggggccagtggtaccagaccttggaggaggtgttcattgaagttcaggtgccgccaggcacgcgcgcccaggatatccagtgcggcctccagagccggcatgtggcgctgtcggtgggcggccgcgagatcctcaaggtagcggcagctcggggcttgtgttcagtttcctcttcccagacgcccccagccccgtttccctgaacgactgttgggtgtcccgacggctcctgtggctggcagaaagagaaagaggataacactgaccaggtttgggtctggtcagagcccccgcctcttcagggcaggtgctgagttgtggaaatttgaggagcctattttcgtgtttagttttcaaactaagactgctgcttctgcttctctgacgggcttcagctgggaacagattaactaggttgctaaaggaacaaatatttcttccgtgcactgaagacaggcaggaagacaacagataacgtacctgcagtggagaggttaagctcctgtacggaagcgtaattcataaatagataaatataggaaaggacaacaaagaaaatagggatagaataacgggcagagaatttagagatgatgtcaggtgattagttttctcatctaaaagcttgaaaatcctgcatgtttgtggagtggtcaagcaggtggtgaagagggcaaactctttgattctacaatagctgatgagggaacatggactttggaggacagaaaaatggttcgtattgttcttacaaagacaaagagagatgcagcaaattgttggacttctctactagaatctgaatatgcagcggatccttgggtgcaagaccaaatgcagagaaagcttacattagagagattccaaaaagaaaatcctggttttgacttcagtggagcagaaatctcaggaaactacactaaaggtggaccagatttctcaaaccttgagaaataactgctttttttcctgcattctgtggatcctagcagatattgccaacttaatcagataaacagattatgtaatggaagaaaaatgcggatgcctacagttaacagattgcaaaatgtatcttaaaatggttctaaaaattgcattcaaacataatttacataggaaatgtactgtgggaactattctatggatatatggtaaagttgttttggacttgtttttgctcagcatgaagttttatatgctgcattttactaattccatatttaaccatatttttaatacaaaagaacattagagtatagatcatgtgaaatgaagggtgcctttggggaaaattaactttttcttttgataagtatgatattcaataaaattttctaaataggaattgtgtacccctttgtctaagtataacaattcacacaaaattatagtgctgaaaacaattttaataaaggaaaaagtccataaatgtattttaagtaaa

SEQ ID NO: 5834 - protein, 74 aa, Homo sapiens
MVRIVLTKTKRDAANCWTSLLESEYAADPWVQDQMQRKLTLERFQKENPGFDFSGAEISGNYTKGGPDFSNLEK

SEQ ID NO: 5835 - DNA, 1835 bp, Homo sapiens
gattatgtcggccccgtttgaggagcggagtggggtggtaccgtgcgggaccccgtggggccagtggtaccagaccttggaggaggtgttcattgaagttcaggtgccgccaggcacgcgcgcccaggatatccagtgcggcctccagagccggcatgtggcgctgtcggtgggcggccgcgagatcctcaaggtagcggcagctcggggcttgtgttcagtttcctcttcccagacgcccccagccccgtttccctgaacgactgttgggtgtcccgacggctcctgtggctggcagaaagagaaagaggataacactgaccaggtttgggtctggtcagagcccccgcctcttcagggcaggtgctgagttgtggaaatttgaggagcctattttcgtgtttagttttcaaactaagactgctgcttctgcttctctgacgggcttcagctgggaacagattaactaggttgctaaaggaacaaatatttcttccgtgcactgaagacaggcaggaagacaacagataacgtacctgcagtggagaggttaagctcctgtacggaagcgtaattcataaatagataaatataggaaaggacaacaaagaaaatagggatagaataacgggcagagaatttagagatgatgtcaggtgattagttttctcatctaaaagcttgaaaatcctgcatgtttgtggagtggtcaagcaggtggtgaagaggtgtgtgcataaaataagtagtactccttttatttcttttcaccaatgctctttggatctggacccgctttttctttgttaagtgtataattaaactaacaggttgaaattagatttagttctcaggttagatgcccaagatgtttgatggcagtgtaatatggtgaagggagactacttgtttcctagttttgtaaacttgggcgagagattgttcagtgtctctatatcttccttatccacaagataaggtagttatagtacccttctcatgggattgttttgagcttaacatggtattcacgtgtatgaagagcttggagtattcactgggcaaactctttgattctacaatagctgatgagggaacatggactttggaggacagaaaaatggttcgtattgttcttacaaagacaaagagagatgcagcaaattgttggacttctctactagaatctgaatatgcagcggatccttgggtgcaagaccaaatgcagagaaagcttacattagagagattccaaaaagaaaatcctggttttgacttcagtggagcagaaatctcaggaaactacactaaaggtggaccagatttctcaaaccttgagaaataactgctttttttcctgcattctgtggatcctagcagatattgccaacttaatcagataaacagattatgtaatggaagaaaaatgcggatgcctacagttaacagattgcaaaatgtatcttaaaatggttctaaaaattgcattcaaacataatttacataggaaatgtactgtgggaactattctatggatatatggtaaagttgttttggacttgtttttgctcagcatgaagttttatatgctgcattttactaattccatatttaaccatatttttaatacaaaagaacattagagtatagatcatgtgaaatgaagggtgcctttggggaaaattaactttttcttttgataagtatgatattcaataaaattttctaaataggaattgtgtacccctttgtctaagtataacaattcacacaaaattatagtgctgaaaacaattttaataaaggaaaaagtccataaatgtattttaagtaaa

SEQ ID NO: 5836 - protein, 107 aa, Homo sapiens
MVFTCMKSLEYSLGKLFDSTIADEGTWTLEDRKMVRIVLTKTKRDAANCWTSLLESEYAADPWVQDQMQRKLTLERFQKENPGFDFSGAEISGNYTKGGPDFSNLEK

SEQ ID NO: 5837 - DNA, 1141 bp, Homo sapiens
ctggattatgtcggccccgtttgaggagcggagtggggtggtaccgtgcgggaccccgtggggccagtggtaccagaccttggaggaggtgttcattgaagttcaggtgccgccaggcacgcgcgcccaggatatccagtgcggcctccagagccggcatgtggcgctgtcggtgggcggccgcgagatcctcaaggtagcggcagctcggggcttgtgttcagtttcctcttcccagacgcccccagccccgtttccctgaacgactgttgggtgtcccgacggctcctgtggctggcagaaagagaaagaggataacactgaccaggtttgggtctggtcagagcccccgcctcttcagggcagggcaaactctttgattctacaatagctgatgagggaacatggactttggaggacagaaaaatggttcgtattgttcttacaaagacaaagagagatgcagcaaattgttggacttctctactagaatctgaatatgcagcggatccttgggtgcaagaccaaatgcagagaaagcttacattagagagattccaaaaagaaaatcctggttttgacttcagtggagcagaaatctcaggaaactacactaaaggtggaccagatttctcaaaccttgagaaataactgctttttttcctgcattctgtggatcctagcagatattgccaacttaatcagataaacagattatgtaatggaagaaaaatgcggatgcctacagttaacagattgcaaaatgtatcttaaaatggttctaaaaattgcattcaaacataatttacataggaaatgtactgtgggaactattctatggatatatggtaaagttgttttggacttgtttttgctcagcatgaagttttatatgctgcattttactaattccatatttaaccatatttttaatacaaaagaacattagagtatagatcatgtgaaatgaagggtgcctttggggaaaattaactttttcttttgataagtatgatattcaataaaattttctaaataggaattgtgtacccctttgtctaagtataacaattcacacaaaattatagtgctgaaaacaattttaataaaggaaaaagtccataaatgtattttaagtaaa

SEQ ID NO: 5838 - protein, 74 aa, Homo sapiens; identical to SEQ ID NO: 5834

SEQ ID NO: 5839 - DNA, 1741 bp, Homo sapiens
gattatgtcggccccgtttgaggagcggagtggggtggtaccgtgcgggaccccgtggggccagtggtaccagaccttggaggaggtgttcattgaagttcaggtgccgccaggcacgcgcgcccaggatatccagtgcggcctccagagccggcatgtggcgctgtcggtgggcggccgcgagatcctcaaggtagcggcagctcggggcttgtgttcagtttcctcttcccagacgcccccagccccgtttccctgaacgactgttgggtgtcccgacggctcctgtggctggcagaaagagaaagaggataacactgaccaggtttgggtctggtcagagcccccgcctcttcagggcaggtgctgagttgtggaaatttgaggagcctattttcgtgtttagttttcaaactaagactgctgcttctgcttctctgacgggcttcagctgggaacagattaactaggttgctaaaggaacaaatatttcttccgtgcactgaagacaggcaggaagacaacagataacgtacctgcagtggagaggttaagctcctgtacggaagcgtaattcataaatagataaatataggaaaggacaacaaagaaaatagggatagaataacgggcagagaatttagagatgatgtcaggtgattagttttctcatctaaaagcttgaaaatcctgcatgtttgtggagtggtcaagcaggtggtgaagaggtgtgtgcataaaataagtagtactccttttatttcttttcaccaatgctctttggatctggacccgctttttctttgttaagtgtataattaaactaacaggttgaaattagatttagttctcaggttagatgcccaagatgtttgatggcagtgtaatatggtgaagggagactacttgtttcctagttttgtaaacttgggcgagagattgttcagtgtctctatatcttccttatccacaagataaggtagttatagtacccttctcatgggattgttttgagcttaacatggtattcacgtgtatgaagagcttggagtattcactgggcaaactctttgattctacaatagctgatgagggaacatggactttggaggacagaaaaatggttcgtattgttcttacaaagacaaagagagatgcagcaaattgttggacttctctactagaatctgaatatgcagcggatccttgggtgcaagaccaaatgcagagaaagcttacattagagagattccaaaaagaaaatcctggttttgacttcagtggagcagaaatctcaggaaactacactaaaggtggaccagatttctcaaaccttgagaaataactgctttttttcctgcattctgtggatcctagcagatattgccaacttaatcagataaacagattatgtaatggaagaaaaatgcggatgcctacagttaacagattgcaaaatgtatcttaaaatggttctaaaaattgcattcaaacataatttacataggaaatgtactgtgggaactattctatggatatatggtaaagttgttttggacttgtttttgctcagcatgaagttttatatgctgcattttactaattccatatttaaccatatttttaatacaaaagaacattagagtatagatcatgtgaaatgaagggtgcctttggggaaaattaactttttcttttgataagtatgatattcaataaaattttctaaataggaattgtg

SEQ ID NO: 5840 - protein, 107 aa, Homo sapiens; identical to SEQ ID NO: 5836

SEQ ID NO: 5841 - DNA, 1409 bp, Homo sapiens
gattatgtcggccccgtttgaggagcggagtggggtggtaccgtgcgggaccccgtggggccagtggtaccagaccttggaggaggtgttcattgaagttcaggtgccgccaggcacgcgcgcccaggatatccagtgcggcctccagagccggcatgtggcgctgtcggtgggcggccgcgagatcctcaaggtagcggcagctcggggcttgtgttcagtttcctcttcccagacgcccccagccccgtttccctgaacgactgttgggtgtcccgacggctcctgtggctggcagaaagagaaagaggataacactgaccaggtttgggtctggtcagagcccccgcctcttcagggcaggtgctgagttgtggaaatttgaggagcctattttcgtgtttagttttcaaactaagactgctgcttctgcttctctgacgggcttcagctgggaacagattaactaggttgctaaaggaacaaatatttcttccgtgcactgaagacaggcaggaagacaacagataacgtacctgcagtggagaggttaagctcctgtacggaagcgtaattcataaatagataaatataggaaaggacaacaaagaaaatagggatagaataacgggcagagaatttagagatgatgtcaggtgattagttttctcatctaaaagcttgaaaatcctgcatgtttgtggagtggtcaagcaggtggtgaagagggcaaactctttgattctacaatagctgatgagggaacatggactttggaggacagaaaaatggttcgtattgttcttacaaagacaaagagagatgcagcaaattgttggacttctctactagaatctgaatatgcagcggatccttgggtgcaagaccaaatgcagagaaagcttacattagagagattccaaaaagaaaatcctggttttgacttcagtggagcagaaatctcaggaaactacactaaaggtggaccagatttctcaaaccttgagaaataactgctttttttcctgcattctgtggatcctagcagatattgccaacttaatcagataaacagattatgtaatggaagaaaaatgcggatgcctacagttaacagattgcaaaatgtatcttaaaatggttctaaaaattgcattcaaacataatttacataggaaatgtactgtgggaactattctatggatatatggtaaagttgttttggacttgtttttgctcagcatgaagttttatatgctgcattttactaattccatatttaaccatatttttaatacaaaagaacattagagtatagatcatgtgaaatgaagggtgcctttggggaaaattaactttttcttttgataagtatgatattcaataaaattttctaaataggaattgtg

SEQ ID NO: 5842 - protein, 74 aa, Homo sapiens; identical to SEQ ID NO: 5834

SEQ ID NO: 5843 - DNA, 1047 bp, Homo sapiens
ctggattatgtcggccccgtttgaggagcggagtggggtggtaccgtgcgggaccccgtggggccagtggtaccagaccttggaggaggtgttcattgaagttcaggtgccgccaggcacgcgcgcccaggatatccagtgcggcctccagagccggcatgtggcgctgtcggtgggcggccgcgagatcctcaaggtagcggcagctcggggcttgtgttcagtttcctcttcccagacgcccccagccccgtttccctgaacgactgttgggtgtcccgacggctcctgtggctggcagaaagagaaagaggataacactgaccaggtttgggtctggtcagagcccccgcctcttcagggcagggcaaactctttgattctacaatagctgatgagggaacatggactttggaggacagaaaaatggttcgtattgttcttacaaagacaaagagagatgcagcaaattgttggacttctctactagaatctgaatatgcagcggatccttgggtgcaagaccaaatgcagagaaagcttacattagagagattccaaaaagaaaatcctggttttgacttcagtggagcagaaatctcaggaaactacactaaaggtggaccagatttctcaaaccttgagaaataactgctttttttcctgcattctgtggatcctagcagatattgccaacttaatcagataaacagattatgtaatggaagaaaaatgcggatgcctacagttaacagattgcaaaatgtatcttaaaatggttctaaaaattgcattcaaacataatttacataggaaatgtactgtgggaactattctatggatatatggtaaagttgttttggacttgtttttgctcagcatgaagttttatatgctgcattttactaattccatatttaaccatatttttaatacaaaagaacattagagtatagatcatgtgaaatgaagggtgcctttggggaaaattaactttttcttttgataagtatgatattcaataaaattttctaaataggaattgtg

SEQ ID NO: 5844 - protein, 74 aa, Homo sapiens; identical to SEQ ID NO: 5834

SEQ ID NO: 5845 - DNA, 1149 bp, Homo sapiens
aggggacggtgtagtgagttccggcttcactggttccaattctgtcccattgttcgttgcatgtgaacttttctggatttcagttctttcatccggggcctgccggtgccgtaaacggccattcaaagggaaaaacgaacacgcacaccaaagcgctagcttgcgttcctgcgcatgcgcagtgacccgagcggagaggccgaggcgtagcctaagcgtgggattccgcgcgtgcgctcggctccgcctggtgcggccgcggccgggagggactggattatgtcggccccgtttgaggagcggagtggggtggtaccgtgcgggaccccgtggggccagtggtaccagaccttggaggaggtgttcattgaagttcaggtgccgccaggcacgcgcgcccaggatatccagtgcggcctccagagccggcatgtggcgctgtcggtgggcggccgcgagatcctcaagggcaaactctttgattctacaatagctgatgagggaacatggactttggaggacagaaaaatggttcgtattgttcttacaaagacaaagagagatgcagcaaattgttggacttctctactagaatctgaatatgcagcggatccttgggtgcaagaccaaatgcagagaaagcttacattagagagattccaaaaagaaaatcctggttttgacttcagtggagcagaaatctcaggaaactacactaaaggtggaccagatttctcaaaccttgagaaataactgctttttttcctgcattctgtggatcctagcagatattgccaacttaatcagataaacagattatgtaatggaagaaaaatgcggatgcctacagttaacagattgcaaaatgtatcttaaaatggttctaaaaattgcattcaaacataatttacataggaaatgtactgtgggaactattctatggatatatggtaaagttgttttggacttgtttttgctcagcatgaagttttatatgctgcattttactaattccatatttaaccatatttttaatacaaaagaacattagagtatagatcatgtgaaatgaagggtgcctttggggaaaattaactttttcttttgataagtatgatattcaataaaattttctaaataggaattgtg

SEQ ID NO: 5846 - protein, 157 aa, Homo sapiens; identical to SEQ ID NO: 689

SEQ ID NO: 5847 - DNA, 1390 bp, Homo sapiens
gcggccatgccgccgcggcgcagcatcgtggaggtgaaggtgctagacgtgcagaagcggcgggtgcccaacaagcattatgtctacatcatccgggtcacgtggtccagcggctccaccgaggccatttaccggcgctacagcaagttttttgacctccagatgcagatgttggacaaatttcccatggaaggaggacagaaggaccccaagcagcggatcatcccctttctgccaggtaagattctcttcagacgaagccacatccgggacgtggctgtcaaacgcctgataccaattgatgaatactgtaaggccctcatccagctgcccccctacatctctcagtgtgatgaggtgctgcagttctttgagacaagacctgaggacctgaatccccccaaagaggagcacattgggaaaaagaaatctgggggtgaccaaacctcagtggaccccatggtcctggagcagtatgtggtggtagccaactaccagaagcaggagagttcggagatcagcctcagcgtggggcaggtggtggacatcatcgagaagaatgagtcaggttggtggttcgtcagcactgccgaggagcaaggctgggtccctgcaacgtgcctcgaaggccaggatggggtgcaggatgagttttctctgcagcctgaagaagaggagaagtacacagtcatctacccgtacacagctcgggaccaggatgaaatgaacctggagagaggggctgtggtggaggtcatccagaaaaacctggaaggctggtggaagatcaggtaccagggcaaagaaggctgggcccccgcctcctacctaaagaagaacagtggggagcccttgcccccgaagccaggccctggctcaccctcccacccgggtgcccttgacttggatggtgtttcccggcagcagaacgcggtgggcagggagaaggagctgctcagcagccagagggacgggcggtttgaaggccgcccggtgcccgacggtgacgccaagcagagatcaccaaagatgaggcagagaccccctcctcgccgggacatgaccattcctcgaggcctcaacctgccgaagccgcccatcccgccccaagtggaggaagagtattacaccatcgccgaattccagacaaccatcccagacggcatcagcttccaggcaggcctgaaggtcgaggatcataagaatgttcacttggagagccctgtggaagtccctcttagaagaatcaagatgcggacagcacttgggaagcacgtggcagcttccatggagatgtgagaaccacgtcatgtccttgctgctgtgaacatgaatttgctaaactgcttttactgtatttttttttgtcgtggtaaaatatgcgtaatac

SEQ ID NO: 5848 - protein, 430 aa, Homo sapiens
MPPRRSIVEVKVLDVQKRRVPNKHYVYIIRVTWSSGSTEAIYRRYSKFFDLQMQMLDKFPMEGGQKDPKQRIIPFLPGKILFRRSHIRDVAVKRLIPIDEYCKALIQLPPYISQCDEVLQFFETRPEDLNPPKEEHIGKKKSGGDQTSVDPMVLEQYVVVANYQKQESSEISLSVGQVVDIIEKNESGWWFVSTAEEQGWVPATCLEGQDGVQDEFSLQPEEEEKYTVIYPYTARDQDEMNLERGAVVEVIQKNLEGWWKIRYQGKEGWAPASYLKKNSGEPLPPKPGPGSPSHPGALDLDGVSRQQNAVGREKELLSSQRDGRFEGRPVPDGDAKQRSPKMRQRPPPRRDMTIPRGLNLPKPPIPPQVEEEYYTIAEFQTTIPDGISFQAGLKVEDHKNVHLESPVEVPLRRIKMRTALGKHVAASMEM

SEQ ID NO: 5849 - DNA, 4320 bp, Homo sapiens
agtgcgcgccgagcgaagggcggcggcggtggcggcggcggctcgtgctcggccccggctgcgattgcgctcagctccaggttccctgcccgcggcggcgcgcccccagcgctccctgcaccccgcgccacccgcacccgcgctcggcccgctgcgggcggaggagcggccatgccgccgcggcgcagcatcgtggaggtgaaggtgctagacgtgcagaagcggcgggtgcccaacaagcattatgtctacatcatccgggtcacgtggtccagcggctccaccgaggccatttaccggcgctacagcaagttttttgacctccagatgcagatgttggacaaatttcccatggaaggaggacagaaggaccccaagcagcggatcatcccctttctgccaggtaagattctcttcagacgaagccacatccgggacgtggctgtcaaacgcctgataccaattgatgaatactgtaaggccctcatccagctgcccccctacatctctcagtgtgatgaggtgctgcagttctttgagacaagacctgaggacctgaatccccccaaagagtaagtttgtttgtgggcttccccagatggagccccacagccctccctcctgccagtccagccacccccaagtaaagcaaagtgcagccaaaagtgggtttcgtcggctgagcccctgtgagaccgcacttcacttagccttcagagttgctgtaagtgggtagcgatcgtccgtttgacaggtgaaggaaactggctgagtgccactcctgtcatcccatcatactctccacctgcccacagcacttatcgaggtgtgtcggaactgagcaggctgagcccgtgaggcaggggctgagccgtagattcatctagcttctgtccacagaggtggaggtgggtgtgctcgggaactgccagggatgtgaatgcgggagcaacccaaaccaacgaagaccccactgccggtgagcaacggggccgggatttcatcctgaccagccaggctccgaagctctccaaaatgcccaccacagccctgcctccctgtcacttctccctgcagtggacaggccacttgcccagacgcctgtcgctacacagccagcagccccagccacacagtgcacaccacataaaactctagcaccgcctgcttacccgcacttacgcaccaacactctggccggcccgggtgctttggggaaagcaggaagggatctggctaacggagaaatagcagtggggaaaagagatcagcccaaggtgctgggagtgtcctggggtcacaggagcaagagcgggcagagtttggggtccgtctgggctcattcgagaagggctgaaaagtaccagccaggctctgttccagaagtagatgctgctgctcttggcgctgcgttcgctggatgccccaggcagcagccgtaaccaaggctgagtttgctgagcagccagcgtggcgggcagtgtgccaagcactgtatgtgtatcaagagagaaagacacatgctcccttttggaaatgatcttgctgggattacaggcatgagccaccatgcccggcctataggagccactttcaagctgggtaagattgggcaggtttttctgccccttgcctcagtctcctcttatgtaagatgggcctgatgacacctccctcacagaattgcttggggaatcaaatgagaagatgtggagaaaatcacttggaactgctctacagaccatattgcccaagggcagaggaaggagcagacagcagccacgagggtagtattggcattggtgtgcattccttgggcccctggattcaatgatagccagattttcttctactttaactttggggagcatcttggaccacttagagaatccaagtttaactttggggagcatcatggaccacttagagattccaacaaaagctttcttccctcttcctggaagagcacctgcagtttcaggaggtccttatttgtgcagaatcctgtacatggacctgaggtgaagaagccccgcgctggcggcccttcccagtgttagtgctgggatgcctctgccctctccctggcaagggtggttgcagtggccccagcctctgagcaagcatcagaccaacttagacacacagaggggagagggccaggccaggggcagctgctgtgcttgggaggagtctggtcatcttcattcaagaaggaaggacactcggggacaaagggtgtgagccagccctcgagaggaggtgggaagtcccggaggctgcatggtggctttgtggtactctctggcttcctctctttggtggcagaggcagcctcactagcttgctggcttgggcttgtagaaatagcgcaggacaggagctctcagcccatgctgcatccagccaagggcactggcattgttcattcatcagccagatagggagggcctgctgactttcacagtggtgggaaaagctgtgtgaacatgtgggtacacaggcacccatgcatacacaaatagaacatccactgaaaatacaaaacacagcccagactgtaccaaagaaagcaccaagtaacagctgagataagctagcatgcttatctcatatcttatatacgtccatcatgctggagtatatgtatctggttctgagagccttcctgaaaagaaagggaaggttcaaatctctttgtcccttcccagctgtgtgaccttggacaaatgacttgacttctctgagcttattttctcatcagtaaagcgggcgtcactaccctggctcacagcttggttgtgaggactaagcaagaccctgcccataaaggatggtgtctggcacagggcaggtgcttacctagtgatgccttcctgtctttaagccaggatttgaaaaggaaggaaggtggttgccaagggcccaagggatggttctggggccacagcaggcagtctcagctgggtcctggttgttggtttagggatggtgaacttgagggttatacccattggggttggtctgttggtcaggatcctgaaggtcaacccatgttagggcttgacatggactttgggcgtctttcctagccagctggtgctattggaggagggttttggccgccatgagtaggaaaacttgggaacaccccaagcatgtcacaccaagaagatgacccacctgcttgagcaaacgcatgctgtggctgcctgaacccaagagtcccctgccgcccccactcctctgctctggctgggacagtggaagcaggggtgcatggctcagcaggagcccgggtcttaagcccagaccacggctcaggtcgcaggcctggatggcaactctggcagctggtgctttctgtagaagcagcctggtggaaccttcgttagtgtgtcttgatgcagcagccaagaggggagcttcagtcactggatggtccaggtggtggtcaggagagtgggctccagccagacttcctgggttccagtcctgggcctggtacctcacctctctgggcgtcagtatcttcatctgcaaaatggagtaaccctcaaagggatgtatgcggacgcagtgaggcagtccaagtgtagctttctgaccaggacccagtgagtgccagtgaaggtgagctaggacattccactctgaccctcacccttctctgcatgggcgctgtgaaggtcaacctcagtgatgttatccctggagggaggacatcaccaccagcccagcccgacctggccagactctgctgcgcctcccagacatacaggaggactgtagcccctgctcttgggcttggctccctcactgctctctcccaggttgctctgaagcattattacatggtggttaaaaacccagacacattgagtagacatttctccaaagaaaatgcacaaatagccagtaagcatatgagaagatcctggcatcattatccatcaggaaatgcaaatccaagctacagtgaaatatcattagatccaattcacacccactagaatggctgtaatcaagaagatagataggccaggcatggtggctcatacgtgtaatcccagcagtttgagaggccaaagcgggcaaatcacctgaggtcaggacttcaagaccagcctggccaacatagcaaaaccccgtctctactaaaaatacaaaaagagccaggcgtggtggtgggcgtctataatcccagctacatgggaggctgaggcaggagaatcgtttgaacctgggaggcagaggttgcagtgagccaagatcacaccactgcactccagcctgcgcaacagagtgagactccacctc

SEQ ID NO: 5850 - protein, 134 aa, Homo sapiens
MPPRRSIVEVKVLDVQKRRVPNKHYVYIIRVTWSSGSTEAIYRRYSKFFDLQMQMLDKFPMEGGQKDPKQRIIPFLPGKILFRRSHIRDVAVKRLIPIDEYCKALIQLPPYISQCDEVLQFFETRPEDLNPPKE

SEQ ID NO: 5851 - DNA, 416 bp, Homo sapiens
gaggccctttccatattccgcttcattctcccctcctggcgtgcctcaaggaacgaccactgtccccaggttacaggtgcttcttcaccccaacaaggctcaatcaagtgtgttcttctctgggaagctgcagacatctgaccccaggccacagagtcatacccagtctggctcccacagccctcccaggctgtctggtgtcagtgcagtgctgtggatgggaacacacctctaccatgttgagctgctctgaggtttaaatgcgttactgctaattgggatcttggaacaactcctggtgcatagacacacacaggacagactggaataaatactggtggtttatcacaggaaggctggcctcagcttgggagagtaagcgtgcatgcatacacagccagctgatttattgtgac

SEQ ID NO: 5852 - protein, 46 aa, Homo sapiens
EALSIFRFILPSWRASRNDHCPQVTGASSPQQGSIKCVLLWEAADI

SEQ ID NO: 5853 - DNA, 1974 bp, Homo sapiens
atgctgggacaaggatcactcagagggtgtagcgtggggcccactatgcggctggcactttgtaaccagcaactgaaaaatgatgctttttcagagcgcgccgccgccaacgccgcgcccgacgcagcgatgggcaacacggtgcaccggaccctgccagcgggctggagtctccggtacctcccggacctcagctcggcgcgcgccccgcggctgggctttgcgccccgggagggcgggtaccgcgtcctggttaccttggggaccccagtcctcattctcccggctttggccagatgcgcaaaaagggccgctggggcgatgccgcgcgccccctcgcctttgttccagcccgagggcgctgatgagcaaactcaaggcgacctgggtgggggtgactggagccgggctcgccagggcttccgacggtcagaagccacccgtggtgccaagactgcagctgccgagaacccgagcccaccggcgcgcctcctggccacccggccgtgctgcggccccggccccgagcgacgcccggtcctgggcgaggcgccgcgcttccacgcgcaggccaaaggcaagaacgtgcggctggacggccactcgcgccgggccacacggcgcaacagcttctgcaatggcgtcacgttcacgcagcggcccatccggctgtacgagcaggtgcggctgcgcctggtggccgtgcgccctggctggagcggcgcgctgcgcttcggcttcaccgcgcacgatccgtcgctcatgagcgcccaggacatccccaagtacgcctgcccggacctggtcacgcggccgggctactgggccaaggcactgcccgagaacctggcgctgcgcgacacggtgctggcctactgggccgaccgccacggccgcgtgttctacagcgtgaacgacggcgagccggtgctcttccactgcggcgtggccgtgggcggcccgctctgggcgctcattgatgtctacggcatcaccgacgaggtgcagcttctggagagcgccttcgctgacacgctgacgcccgcgcgcctcagccaggcccgcttcagcgcctgcctgccgcccagcagccacgacgcggccaacttcgacaacaacgagctcgagaacaaccaggccgacctgcgcttccacgcaacacgcgggcccgacgtgagcctgtcggccgaccgcaaagtggcctgcgcaccgcggcccgacggcggccgcacgctggtcttctccgagcgcccgctgcggcccggcgagagcctcttcgtggaggtgggccgtccggggctggcggcgcccggcgcgctggccttcggcatcacgtcgtgcgacccgggcgtgctacggcccaacgagctgcccgccgacccagacgcgctgctcgaccgcaaagagtactgggtggtggcgcgcgccgggcccgtgccgagcggcggcgacgcgctcagcttcacgctgcggcccggcggcgacgtgctcctgggcatcaacgggcgtccgcgcggccgcctgctgtgcgtcgacaccacgcaggcgctctgggccttcttcgccgtgcgcggcggcgtcgcgggccagctgcgtctcctcggtaccctgcagtccagccctgcgaccacgactccatcagggtccctcagcggctcccaggacgatagtgattcagatatgaccttcagtgtcaaccagtcctcctcggcatctgagtcatccctggtgacggcccccagctccccgctgagccccccggtgtcccccgtgttctccccaccggagccggcaggcatcaagaatggcgagtgcacggtgtgcttcgatggcgaggtggacacggtcatctacacgtgtggacacatgtgcctgtgccacagctgcggcctgcggctcaagcgacaggcccgggcctgctgccccatctgccggcggcccatcaaggacgtcattaagatctacaggccatag

SEQ ID NO: 5854 - protein, 657 aa, Homo sapiens
MLGQGSLRGCSVGPTMRLALCNQQLKNDAFSERAAANAAPDAAMGNTVHRTLPAGWSLRYLPDLSSARAPRLGFAPREGGYRVLVTLGTPVLILPALARCAKRAAGAMPRAPSPLFQPEGADEQTQGDLGGGDWSRARQGFRRSEATRGAKTAAAENPSPPARLLATRPCCGPGPERRPVLGEAPRFHAQAKGKNVRLDGHSRRATRRNSFCNGVTFTQRPIRLYEQVRLRLVAVRPGWSGALRFGFTAHDPSLMSAQDIPKYACPDLVTRPGYWAKALPENLALRDTVLAYWADRHGRVFYSVNDGEPVLFHCGVAVGGPLWALIDVYGITDEVQLLESAFADTLTPARLSQARFSACLPPSSHDAANFDNNELENNQADLRFHATRGPDVSLSADRKVACAPRPDGGRTLVFSERPLRPGESLFVEVGRPGLAAPGALAFGITSCDPGVLRPNELPADPDALLDRKEYWVVARAGPVPSGGDALSFTLRPGGDVLLGINGRPRGRLLCVDTTQALWAFFAVRGGVAGQLRLLGTLQSSPATTTPSGSLSGSQDDSDSDMTFSVNQSSSASESSLVTAPSSPLSPPVSPVFSPPEPAGIKNGECTVCFDGEVDTVIYTCGHMCLCHSCGLRLKRQARACCPICRRPIKDVIKIYRP

SEQ ID NO: 5855 - DNA, 517 bp, Homo sapiens
acgcagcggcccatccggctgtacgagcaggtgcggctgcgcctggtggccgtgcgccctggctggagcggcgcgctgcgcttcggcttcaccgcgcacgatccgtcgctcatgagcgcccaggacatccccaagtacgcctgcccggacctggtcacgcggccgggctactgggccaaggcactgcccgagaacctggcgctgcgcgacacggtgctggcctactgggccgaccgccacggccgcgtgttctacagcgtgaacgacggcgagccggtgctcttccactgcggcgtggccgtgggcggcccgctctgggcgctcattgatgtctacggcatcaccgacgaggtgcagcttctggagagcgccttcgctgacacgctgacgcccgcgcgcctcagccaggcccgcttcagcgcctgcctgccgcccagcagccacgacgcggccaacttcgacaacaacgagctcgagaacaaccaggtggtggccaagctgggccacctggcgctgg

SEQ ID NO: 5856 - protein, 134 aa, Homo sapiens
MSAQDIPKYACPDLVTRPGYWAKALPENLALRDTVLAYWADRHGRVFYSVNDGEPVLFHCGVAVGGPLWALIDVYGITDEVQLLESAFADTLTPARLSQARFSACLPPSSHDAANFDNNELENNQVVAKLGHLA

SEQ ID NO: 5857 - DNA, 692 bp, Homo sapiens
caaggagaagaccagcagtaagttctgtttttctgtgggagagaaagaatcctagaggcaggtgacccacctggagctggaaagcccactccacgatgcaataacctcccattgctcggccctgcgcctgccccagtcctggcagggggcaccggctcaggaacatgcggcctcctggcatttctcggtatttaactgtctcgctgtcttatccgagtccctaatgaaacgacttgtgtgacaatctgtctgtgccttacgaaagtgtctgtgcactttttatcctttttaaaagcaacttttaaaagtggatggggaggggggctagcatacgtggtagggttctagaaatctgtggtcatcgctgaaatcctttttgcatcatgttttttgatgttggagtgatgaagtgtacatcccccaccccacacaccactacctgtgtacagaccttttaaaacatgtcttctttttctgattcaatactgtgacctctccgatacagtctaatccttggggatctgtaatcaaggttttaaaacctgggaagtgggttgggaagggtttgcactggtcttgagtgttgtgcttttctgtgttgtgtgttttgatttttgtctttttatctgttttatattgacataattttcctgtttaaaaaaatacaactttggcttgttaaaaaaaaaaaa

SEQ ID NO: 5858 - protein, 57 aa, Homo sapiens
VLFFCGRERILEAGDPPGAGKPTPRCNNLPLLGPAPAPVLAGGTGSGTCGLLAFLGI

SEQ ID NO: 5859 - DNA, 3644 bp, Homo sapiens
tgacccacctggagctggaaagcccactccacgatgcagacagctctctaccttcctgtggtggcccctgggcctggcattcccaggggacctgctggcaggaggaggaacgagggctttataactttggttataacttttggtctttgttctgattctcagtgtatcttcctccgctggttactaaagtgttcactgataagtatgttaactaatgatcgagacagtaacgaaaaatgctggcactgggattctctcccttcccagacctacctgctggtatttcctgggaccttgaccctgccccaccccctcagccgtgcccatctctgcagactcccagatcacatctgggctgatgggctggcccaggcctgtctatttttcagttcccaattagaagtctagaacctgacaactccaggagttcttgggaggaccagtacaacgttctaaaaagcctgagacgccttacaaaaagcaagtatcatttggagtacaattcctaatctgttcatgtcctgctgaaggagggaaggagggagaggaaggcaggggagttgatgcattcatataacaaacactgctgggtgtctgggtgcccagagcaaagctgggccaggccttcaccagatcaagccccacagaccagctggtgcccatgcgctgctggtggtttggggcctcctgttcctcctctagctgggagtaatcacagttgtctgacctgattccaacttaaggtccccactctcttgccccatcaagaatccctgattatttacttttccctagaaaatctggggaaattcccacattttaattttgcagcagaatcttttgagcagcttttggaaccacagtgtttgccaagataagagtttgagaatccagcagccctgggtgcctggctgaatttggtttcctgcatgtgctgggtgtgggcggggccacgcacaggccctgcatgggaggactcctcaccccaggcctgtggtgctgcagacaaccgtctcctgtctacactgcgacccagccacaagctgtggggtctcagtggcctgggggaaagcagctccactctcctgcccttcctggctgcccctttgggttccagccggggtcacgtccagcctccactgggaaaccagtgactgaggcctggacccagaggtggaccaggcatctcctggccacctgtgacctgggaagaagcgagtcagtggcccgttcaacctgctctgcagctgctataaatagcctccctgtttccaagaggaggtaaggaagtgtttatcttctaaaaaccagacgtttcctgatgctctgagcgttactcagtgctacagaggagatgcacacgtccccactatgttctgtcttgagaaggggacaagagaaagaggaaaaggagccactgtactttattttgcacctacagcgtgccttggcactgggctagagaggcaccttcctgcgtgaatcctgtgcggcaggtcttattgccataataagtcacatcaaagacactgctggtcataaaacactgttttacataccatagggaaaaacgctgccaatcttaactaagatgctacaactgtacagttccttccaatcagagatgttcacgtgtgaaaaaaaaactgtgctacttacaatctatgaaagctggtgttatcccacttggcaggtaaggaaactgaggtcctgtgagtgaagtgacctcatgatcacacaacaggagatggcagggctgggattcaaacccgggagtgtctgctgccacatcccacactcccactgcctggctccaagtcccaggaagctcgagactgtgagttttctcccttgaaactcacctggagagagtccgggcacctgtgcctatgtggagggttccagccccagccaggcccctccgctgcccacaccctgggaggagaagcggcctcccttccaggctcatctgctcactgcccgcattctcctggcagagctgaggtctgagagatctggactccaacccaagggccctctcttgttattcaggggtgtccacagttaggaagggacctggggccttgtcccaccaccttcctaggccccgtgatcaccaccccctcaagcggggccccagccccctgagcaccccctcacgtgacccagccctcggctgttccaggctcactgcccatggtgtgctcttctgggccacagcagccagggctccagggcgaggacaggggacacctgaaaacaccccgttgttcatggtcttgtgcccattcattcggagactcctgaaaaactgggctgtttgcaaagcaaatccagctccttgtcctagcaggttctcagaacggggagtcccctgggatggagctgctcccctcacggcagcaccacgtttccagtccctcgatgccactaatcagcatggactgtgttcaggacacagggtgaacttttctctgacccccggtgctggtcctgtgccagcacgtagtagttactcagtagaggtttgctgagtaaaccagaaatcagattatgagtgttcaggggtttgataaaacagcaccacataacgcacacaaagatactccagaaacatttgctgagtacctagtacgtgtgaggtgctgtgaggatagagcagagaggactgtgccccagctgtgatgctggcagaggtgacactaagagggaaatgagatatttggggcagaatccactgggctctcttggccatccgctgccttgggtctgttgaggtgggtgcccaaaggctgccttcttgaccagaacctgctgtgcgcttcacagaacctcctcttcattggaaatgctgggcacattgcagtcagtgagctgctgccaaaacggcgttaagtagaacccccagaggccccgccggttggtgatcaccctcaggtcctgccagggagacacagtgaggaggttggctaattgctgctttcaggccctggaaatcagtcgccaaggcccaggagaaccccggtgagtccgtccagttgaggcagaggcaataacctcccattgctcggccctgcgcctgccccagtcctggcagggggcaccggctcaggaacatgcggcctcctggcatttctcggtatttaactgtctcgctgtcttatccgagtccctaatgaaacgacttgtgtgacaatctgtctgtgccttacgaaagtgtctgtgcactttttatcctttttaaaagcaacttttaaaagtggatggggaggggggctagcatacgtggtagggttctagaaatctgtggtcatcgctgaaatcctttttgcatcatgttttttgatgttggagtgatgaagtgtacatcccccaccccacacaccactacctgtgtacagaccttttaaaacatgtcttctttttctgattcaatactgtgacctctccgatacagtctaatccttggggatctgtaatcaaggttttaaaacctgggaagtgggttgggaagggtttgcactggtcttgagtgttgtgcttttctgtgttgtgtgttttgatttttgtctttttatctgttttatattgacataattttcctgtttaaaaaaatacaactttggcttgttaaaaaaaaaaaa

SEQ ID NO: 5860 - protein, 124 aa, Homo sapiens
MQTALYLPVVAPGPGIPRGPAGRRRNEGFITLVITFGLCSDSQCIFLRWLLKCSLISMLTNDRDSNEKCWHWDSLPSQTYLLVFPGTLTLPHPLSRAHLCRLPDHIWADGLAQACLFFSSQLEV

SEQ ID NO: 5861 - DNA, 407 bp, Homo sapiens
tcttctgtgctgtcccattagggaagtcccttggcctgtctatttttcagttcccaattagaaaaatctgtggtcatcgctgaaatcctttttgcatcatgttttttgatgttggagtgatgaagtgtacatcccccaccccacacaccactacctgtgtacagaccttttaaaacatgtcttctttttctgattcaatactgtgacctctccgatacagtctaatccttggggatctgtaatcaaggttttaaaacctgggaagtgggttgggaagggtttgcactggtcttgagtgttgtgcttttctgtgttgtgtgttttgatttttgtctttttatctgttttatattgacataattttcctgtttaaaaaaatacaactttggcttgttaaaaaaaaaaaa

SEQ ID NO: 5862 - protein, 44 aa, Homo sapiens
SLGICNQGFKTWEVGWEGFALVLSVVLFCVVCFDFCLFICFILT

SEQ ID NO: 5863 - DNA, 996 bp, Homo sapiens
gtacaacgttctaaaaagcctgagacgccttacaaaaagcaagaaactgaggtcctgtgagtgaagtgacctcatgatcacacaacaggagatggcagggctgggattcaaacccgggagtgtctgctgccacatcccacactcccactgcctggctccaagtcccaggaagctcgagactaacctcctcttcattggaaatgctgggcacattgcagtcagtgagctgctgccaaaacggcgttaagtagaacccccagaggccccgccggttggtgatcaccctcaggtcctgccagggagacacagtgaggaggttggctaattgctgctttcaggccctggaaatcagtcgccaaggcccaggagaaccccggtgagtccgtccagttgaggcagaggcaataacctcccattgctcggccctgcgcctgccccagtcctggcagggggcaccggctcaggaacatgcggcctcctggcatttctcggtatttaactgtctcgctgtcttatccgagtccctaatgaaacgacttgtgtgacaatctgtctgtgccttacgaaagtgtctgtgcactttttatcctttttaaaagcaacttttaaaagtggatggggaggggggctagcatacgtggtagggttctagaaatctgtggtcatcgctgaaatcctttttgcatcatgttttttgatgttggagtgatgaagtgtacatcccccaccccacacaccactacctgtgtacagaccttttaaaacatgtcttctttttctgattcaatactgtgacctctccgatacagtctaatccttggggatctgtaatcaaggttttaaaacctgggaagtgggttgggaagggtttgcactggtcttgagtgttgtgcttttctgtgttgtgtgttttgatttttgtctttttatctgttttatattgacataattttcctgtttaaaaaaatacaactttggcttgttaaaaaaaaaaaa

SEQ ID NO: 5864 - protein, 57 aa, Homo sapiens
MITQQEMAGLGFKPGSVCCHIPHSHCLAPSPRKLETNLLFIGNAGHIAVSELLPKRR

SEQ ID NO: 5865 - DNA, 274 bp, Homo sapiens
caggactggggcaggcgcagggccgagcaatgggaggttattgcctctgcctcaactggacggactcaccggggttctcctgggccttggcgactgatttccagggcctgaaagcagcaattagccaacctcctcactgtgtctccctggcaggacctgagggtgatcaccaaccggcggggctggatttgctttgcaaacagcccagtttttcaggagtctccgaatgaatgggcacaagaccatgaacaacggggtgttttcaggtgtcccc

SEQ ID NO: 5866 - protein, 66 aa, Homo sapiens
MGGYCLCLNWTDSPGFSWALATDFQGLKAAISQPPHCVSLAGPEGDHQPAGLDLLCKQPSFSGVSE

SEQ ID NO: 5867 - DNA, 478 bp, Homo sapiens
gccttgacgaaagagatttccaggagactcagcatagatgttgaatcttcctattggaggagaagctcccgactcccttctagtcatggcagagcacggaattcagaacaattctactggtgaggacaaggcctctattgtagtcagagtcctctcaaaggacaaaagcagatatggctgccttggatcagctgcacgcagtgcactcccgacctggccgctggaggcgcggctcccatcacctgcaccgcgactgctagggactgtcaaagcggcagcatgccatcgccttctccagcccttctccagcagcacaaccagtcctcccagctggtcctctgaggaccagccgtcatggcgacgtggtggcaatgtccccaggcagccgaccatcctgggcttctctttggacaggcctgggccaggaccttaggggatctctgtgtccatggtataaatctgaatgagatcagacaca

SEQ ID NO: 5868 - protein, 131 aa, Homo sapiens
MLNLPIGGEAPDSLLVMAEHGIQNNSTGEDKASIVVRVLSKDKSRYGCLGSAARSALPTWPLEARLPSPAPRLLGTVKAAACHRLLQPFSSSTTSPPSWSSEDQPSWRRGGNVPRQPTILGFSLDRPGPGP

SEQ ID NO: 5869 - DNA, 350 bp, Homo sapiens
gatgtcatgagtccgcaggtgctgcttttccgctttgccggccaagtaaatggaagacacggcaatcagtacagatctcaaagcaaggcttgttggacaaataaatgaagatgagcccaagagcccaggagagggaccgggaacagcagggcctccgtgactcacacaagcttcatccctgaaccaaggacgcagcctgccaacaatggccccaagccacaccccgccacagggggaactgatgctgcggtgagaagtgacagctttctgttgactcttttttttttcaagcagaatatgaattgagacatactttcattttcataatcagaacctaacacttagtaacc

SEQ ID NO: 5870 - protein, 36 aa, Homo sapiens
MEDTAISTDLKARLVGQINEDEPKSPGEGPGTAGPP

SEQ ID NO: 5871 - DNA, 2207 bp, Homo sapiens
actgagttcactcggtatctgaaattgacttttccagcagaaagtttttgtgggtatgggcactggccttggctttgagcaagcttgatgaatgttggatatttctggatttcagggtggcccggtggaaatcctgccctttctgtacctgggcagtgcgtatcacgcttcccgcaaggacatgctggatgccttgggcatcactgccttgatcaacgtctcagccaattgtcccaaccattttgagggtcactaccagtacaagagcatccctgtggaggacaaccacaaggcagacatcagctcctggttcaacgaggccattgacttcataggtaaatggaatggatgcctggggcttttctgcctttctcttctcattttagccactaagcccaacctctgtggcaagagcttgaagttttctgagccttcttccacacattcagtatcagtctggtgtgggcaacattcctgtaaaatatgaatttgattcgatgtcccactttacagatttgcaaagtggggctcacaaagttgaattgactggtctgagatctatctgctaagtggaaatccccagtctgagtttaaatcctgtgccatcctttgcacagtgcccacgttgcctccatgaacagtatccatgtgatggcatgtggtgatgttgaccatttctagacaagacacacatgacctttctcagatacactgtacctgggcttggggtggttctcctgaactctcaagtaaccagccgctcctttggttttccagactccatcaagaatgctggaggaagggtgtttgtccactgccaggcaggcatttcccggtcagccaccatctgccttgcttaccttatgaggactaatcgagtcaagctggacgaggcctttgagtttgtgaagcagaggcgaagcatcatctctcccaacttcagcttcatgggccagctgctgcagtttgagtcccaggtgctggctccgcactgttcggcagaggctgggagccccgccatggctgtgctcgaccgaggcacctccaccaccaccgtgttcaacttccccgtctccatccctgtccactccacgaacagtgcgctgagctaccttcagagccccattacgacctctcccagctgctgaaaggccacgggaggtgaggctcttcacatcccattgggactccatgctccttgagaggagaaatgcaataactctgggaggggctcgagagggctggtccttatttatttaacttcacccgagttcctctgggtttctaagcagttatggtgatgacttagcgtcaagacatttgctgaactcagcacattcgggaccaatatatagtgggtacatcaagtccatctgacaaaatggggcagaagagaaaggactcaaatctcttcatgcttgacatacctaccagtattattcccgacgacacatatacatatgagaatataccttatttatttttgtgtaggtgtctgccttcacaaatgtcattgtctactcctagaagaaccaaatacctcaatttttgtttttgagtactgtactatcctgtaaatatatcttaagcaggtttgttttcagcactgatggaaaataccagtgttgggttttttttttagttgccaacagttgtatgtttgctgattatttatgacctgaaataatatatttcttcttctaagaagacattttgttacataaggatgacttttttatacaatggaataaattatggcatttctattgaaatttcaacgcttttatttctttggcaaccacacccaatccctctcccactagtgaactagggaagaatttcgacaagggcctgcagaatgtgttgagatctgatcccatgccctgtggtggcccgttggtcccatgaaatggctgggttgcaagggaggaagacaagtgagtatcatgaaacaccggacgctacagctgaactcttagtattggatcagtgtgtctgcccatgcccattttagcggctctgtaacctaccatgtcacccaggatgccaaggtgtccccagagccaaagctaggaggaaatagccacttgtctggattgccttcttcatttaataccctcctcaggttaatataaaaagtcgccttcccatctctgagctgtgctggagttatgaggagacaaaagtttttccaaacacatgacata

SEQ ID NO: 5872 - protein, 58 aa, Homo sapiens
MGQKRKDSNLFMLDIPTSIIPDDTYTYENIPYLFLCRCLPSQMSLSTPRRTKYLNFCF

SEQ ID NO: 5873 - DNA, 2198 bp, Homo sapiens
cgaagcgttttcggcttcctgcccggagctgtgcagcaaacagtcgacccccatggggctcagccttcccctgagtactagcgtccctgacagcgcggaatctgggtgcagttcctgcagtaccccactctacgatcaggttagtaggtgtccctgccacagggaagaagtaagaactggcaaaggcatggaagagtagtgccagggagaatatagaaagtgacctgcagcattatttataacggaggggacacagggatatgatttattccacagttaagtggtctgacggagccgagtctccaattgtaggctctacggaaatgaacttgctggtcctgcccaggcaaatgggcttagttccctatttatttatcctccagcaacagaactgagttcactcggtatctgaaattgacttttccagcagaaagtttttgtgggtatgggcactggccttggctttgagcaagcttgatgaatgttggatatttctggatttcagggtggcccggtggaaatcctgccctttctgtacctgggcagtgcgtatcacgcttcccgcaaggacatgctggatgccttgggcatcactgccttgatcaacgtctcagccaattgtcccaaccattttgagggtcactaccagtacaagagcatccctgtggaggacaaccacaaggcagacatcagctcctggttcaacgaggccattgacttcatagactccatcaagaatgctggaggaagggtgtttgtccactgccaggcaggcatttcccggtcagccaccatctgccttgcttaccttatgaggactaatcgagtcaagctggacgaggcctttgagtttgtgaagcagaggcgaagcatcatctctcccaacttcagcttcatgggccagctgctgcagtttgagtcccaggtgctggctccgcactgttcggcagaggctgggagccccgccatggctgtgctcgaccgaggcacctccaccaccaccgtgttcaacttccccgtctccatccctgtccactccacgaacagtgcgctgagctaccttcagagccccattacgacctctcccagctgctgaaaggccacgggaggtgaggctcttcacatcccattgggactccatgctccttgagaggagaaatgcaataactctgggaggggctcgagagggctggtccttatttatttaacttcacccgagttcctctgggtttctaagcagttatggtgatgacttagcgtcaagacatttgctgaactcagcacattcgggaccaatatatagtgggtacatcaagtccatctgacaaaatggggcagaagagaaaggactcagtgtgtgatccggtttctttttgctcgcccctgttttttgtagaatctcttcatgcttgacatacctaccagtattattcccgacgacacatatacatatgagaatataccttatttatttttgtgtaggtgtctgccttcacaaatgtcattgtctactcctagaagaaccaaatacctcaatttttgtttttgagtactgtactatcctgtaaatatatcttaagcaggtttgttttcagcactgatggaaaataccagtgttgggttttttttttagttgccaacagttgtatgtttgctgattatttatgacctgaaataatatatttcttcttctaagaagacattttgttacataaggatgacttttttatacaatggaataaattatggcatttctattgaaatttcaacgcttttatttctttggcaaccacacccaatccctctcccactagtgaactagggaagaatttcgacaagggcctgcagaatgtgttgagatctgatcccatgccctgtggtggcccgttggtcccatgaaatggctgggttgcaagggaggaagacaagtgagtatcatgaaacaccggacgctacagctgaactcttagtattggatcagtgtgtctgcccatgcccattttagcggctctgtaacctaccatgtcacccaggatgccaaggtgtccccagagccaaagctaggaggaaatagccacttgtctggattgccttcttcatttaataccctcctcaggttaatataaaaagtcgccttcccatctctgagctgtgctggagttatgaggagacaaaagtttttccaaacacatgacata

SEQ ID NO: 5874 - protein, 204 aa, Homo sapiens
MLDISGFQGGPVEILPFLYLGSAYHASRKDMLDALGITALINVSANCPNHFEGHYQYKSIPVEDNHKADISSWFNEAIDFIDSIKNAGGRVFVHCQAGISRSATICLAYLMRTNRVKLDEAFEFVKQRRSIISPNFSFMGQLLQFESQVLAPHCSAEAGSPAMAVLDRGTSTTTVFNFPVSIPVHSTNSALSYLQSPITTSPSC

SEQ ID NO: 5875 - DNA, 2234 bp, Homo sapiens
gttgctggacgagcgcagcgccgccctggacggcgccaagcgcgacggcaccctggccctggcggccggcgcgctctgccgcgaggcgcgcgccgcgcaagtcttcttcctcaaaggtacgccctcggggaagctcggggcgggccgcacacccctgaggttttgcccggtacccctggctctcggctcccgggggatcgccccacctgcagcgcgtgggcgctggagtacatttatctctggaacttgtcattggctttgtttggctctggaaacaaagacttgcctgggcctttccgatgtaaacttccagcccttggtgggtgggggagttgtatgaaggtgccgtgtcccggtgtcactaatggggaaaaaaaatgtctttgtattcccaggaggatacgaagcgttttcggcttcctgcccggagctgtgcagcaaacagtcgacccccatggggctcagccttcccctgagtactagcgtccctgacagcgcggaatctgggtgcagttcctgcagtaccccactctacgatcagggtggcccggtggaaatcctgccctttctgtacctgggcagtgcgtatcacgcttcccgcaaggacatgctggatgccttgggcatcactgccttgatcaacgtctcagccaattgtcccaaccattttgagggtcactaccagtacaagagcatccctgtggaggacaaccacaaggcagacatcagctcctggttcaacgaggccattgacttcatagactccatcaagaatgctggaggaagggtgtttgtccactgccaggcaggcatttcccggtcagccaccatctgccttgcttaccttatgaggactaatcgagtcaagctggacgaggcctttgagtttgtgaagcagaggcgaagcatcatctctcccaacttcagcttcatgggccagctgctgcagtttgagtcccaggtgctggctccgcactgttcggcagaggctgggagccccgccatggctgtgctcgaccgaggcacctccaccaccaccgtgttcaacttccccgtctccatccctgtccactccacgaacagtgcgctgagctaccttcagagccccattacgacctctcccagctgctgaaaggccacgggaggtgaggctcttcacatcccattgggactccatgctccttgagaggagaaatgcaataactctgggaggggctcgagagggctggtccttatttatttaacttcacccgagttcctctgggtttctaagcagttatggtgatgacttagcgtcaagacatttgctgaactcagcacattcgggaccaatatatagtgggtacatcaagtccatctgacaaaatggggcagaagagaaaggactcagtgtgtgatccggtttctttttgctcgcccctgttttttgtagaatctcttcatgcttgacatacctaccagtattattcccgacgacacatatacatatgagaatataccttatttatttttgtgtaggtgtctgccttcacaaatgtcattgtctactcctagaagaaccaaatacctcaatttttgtttttgagtactgtactatcctgtaaatatatcttaagcaggtttgttttcagcactgatggaaaataccagtgttgggttttttttttagttgccaacagttgtatgtttgctgattatttatgacctgaaataatatatttcttcttctaagaagacattttgttacataaggatgacttttttatacaatggaataaattatggcatttctattgaaatttcaacgcttttatttctttggcaaccacacccaatccctctcccactagtgaactagggaagaatttcgacaagggcctgcagaatgtgttgagatctgatcccatgccctgtggtggcccgttggtcccatgaaatggctgggttgcaagggaggaagacaagtgagtatcatgaaacaccggacgctacagctgaactcttagtattggatcagtgtgtctgcccatgcccattttagcggctctgtaacctaccatgtcacccaggatgccaaggtgtccccagagccaaagctaggaggaaatagccacttgtctggattgccttcttcatttaataccctcctcaggttaatataaaaagtcgccttcccatctctgagctgtgctggagttatgaggagacaaaagtttttccaaacacatgacata

SEQ ID NO: 5876 - protein, 255 aa, Homo sapiens [sequence omitted]

SEQ ID NO: 5877 - DNA, 1789 bp, Homo sapiens
tgcgacgcgggtcggaggggcagtcgggggaaccgcgaagaagccgaggacgcggaatctgggtgcagttcctgcagtaccccactctacgatcagggtggcccggtggaaatcctgccctttctgtacctgggcagtgcgtatcacgcttcccgcaaggacatgctggatgccttgggcatcactgccttgatcaacgtctcagccaattgtcccaaccattttgagggtcactaccagtacaagagcatccctgtggaggacaaccacaaggcagacatcagctcctggttcaacgaggccattgacttcatagactccatcaagaatgctggaggaagggtgtttgtccactgccaggcaggcatttcccggtcagccaccatctgccttgcttaccttatgaggactaatcgagtcaagctggacgaggcctttgagtttgtgaagcagaggcgaagcatcatctctcccaacttcagcttcatgggccagctgctgcagtttgagtcccaggtgctggctccgcactgttcggcagaggctgggagccccgccatggctgtgctcgaccgaggcacctccaccaccaccgtgttcaacttccccgtctccatccctgtccactccacgaacagtgcgctgagctaccttcagagccccattacgacctctcccagctgctgaaaggccacgggaggtgaggctcttcacatcccattgggactccatgctccttgagaggagaaatgcaataactctgggaggggctcgagagggctggtccttatttatttaacttcacccgagttcctctgggtttctaagcagttatggtgatgacttagcgtcaagacatttgctgaactcagcacattcgggaccaatatatagtgggtacatcaagtccatctgacaaaatggggcagaagagaaaggactcagtgtgtgatccggtttctttttgctcgcccctgttttttgtagaatctcttcatgcttgacatacctaccagtattattcccgacgacacatatacatatgagaatataccttatttatttttgtgtaggtgtctgccttcacaaatgtcattgtctactcctagaagaaccaaatacctcaatttttgtttttgagtactgtactatcctgtaaatatatcttaagcaggtttgttttcagcactgatggaaaataccagtgttgggttttttttttagttgccaacagttgtatgtttgctgattatttatgacctgaaataatatatttcttcttctaagaagacattttgttacataaggatgacttttttatacaatggaataaattatggcatttctattgaaatttcaacgcttttatttctttggcaaccacacccaatccctctcccactagtgaactagggaagaatttcgacaagggcctgcagaatgtgttgagatctgatcccatgccctgtggtggcccgttggtcccatgaaatggctgggttgcaagggaggaagacaagtgagtatcatgaaacaccggacgctacagctgaactcttagtattggatcagtgtgtctgcccatgcccattttagcggctctgtaacctaccatgtcacccaggatgccaaggtgtccccagagccaaagctaggaggaaatagccacttgtctggattgccttcttcatttaataccctcctcaggttaatataaaaagtcgccttcccatctctgagctgtgctggagttatgaggagacaaaagtttttccaaacacatgacata

SEQ ID NO: 5878 - protein, 174 aa, Homo sapiens [sequence omitted]

SEQ ID NO: 5879 - DNA, 3260 bp, Homo sapiens
gctgcgaaggacatttgggctgtgtgtgcgacgcgggtcggaggggcagtcgggggaaccgcgaagaagccgaggagcccggagccccgcgtgacgctcctctctcagtccaaaagcggcttttggttcggcgcagagagacccgggggtctagcttttcctcgaaaagcgccgccctgcccttggccccgagaacagacaaagagcaccgcagggccgatcacgctgggggcgctgaggccggccatggtcatggaagtgggcaccctggacgctggaggcctgcgggcgctgctgggggagcgagcggcgcaatgcctgctgctggactgccgctccttcttcgctttcaacgccggccacatcgccggctctgtcaacgtgcgcttcagcaccatcgtgcggcgccgggccaagggcgccatgggcctggagcacatcgtgcccaacgccgagctccgcggccgcctgctggccggcgcctaccacgccgtggtgttgctggacgagcgcagcgccgccctggacggcgccaagcgcgacggcaccctggccctggcggccggcgcgctctgccgcgaggcgcgcgccgcgcaagtcttcttcctcaaaggaggatacgaagcgttttcggcttcctgcccggagctgtgcagcaaacagtcgacccccatggggctcagccttcccctgagtactagcgtccctgacagcgcggaatctgggtgcagttcctgcagtaccccactctacgatcaggttagtaggtgtccctgccacagggaagaagtaagaactggcaaaggcatggaagagtagtgccagggagaatatagaaagtgacctgcagcattatttataacggaggggacacagggatatgatttattccacagttaagtggtctgacggagccgagtctccaattgtaggctctacggaaatgaacttgctggtcctgcccaggcaaatgggcttagttccctatttatttatcctccagcaacagaactgagttcactcggtatctgaaattgacttttccagcagaaagtttttgtgggtatgggcactggccttggctttgagcaagcttgatgaatgttggatatttctggatttcagggtggcccggtggaaatcctgccctttctgtacctgggcagtgcgtatcacgcttcccgcaaggacatgctggatgccttgggcatcactgccttgatcaacgtctcagccaattgtcccaaccattttgagggtcactaccagtacaagagcatccctgtggaggacaaccacaaggcagacatcagctcctggttcaacgaggccattgacttcataggtaaatggaatggatgcctggggcttttctgcctttctcttctcattttagccactaagcccaacctctgtggcaagagcttgaagttttctgagccttcttccacacattcagtatcagtctggtgtgggcaacattcctgtaaaatatgaatttgattcgatgtcccactttacagatttgcaaagtggggctcacaaagttgaattgactggtctgagatctatctgctaagtggaaatccccagtctgagtttaaatcctgtgccatcctttgcacagtgcccacgttgcctccatgaacagtatccatgtgatggcatgtggtgatgttgaccatttctagacaagacacacatgacctttctcagatacactgtacctgggcttggggtggttctcctgaactctcaagtaaccagccgctcctttggttttccagactccatcaagaatgctggaggaagggtgtttgtccactgccaggcaggcatttcccggtcagccaccatctgccttgcttaccttatgaggactaatcgagtcaagctggacgaggcctttgagtttgtgaagcagaggcgaagcatcatctctcccaacttcagcttcatgggccagctgctgcagtttgagtcccaggtgctggctccgcactgttcggcagaggctgggagccccgccatggctgtgctcgaccgaggcacctccaccaccaccgtgttcaacttccccgtctccatccctgtccactccacgaacagtgcgctgagctaccttcagagccccattacgacctctcccagctgctgaaaggccacgggaggtgaggctcttcacatcccattgggactccatgctccttgagaggagaaatgcaataactctgggaggggctcgagagggctggtccttatttatttaacttcacccgagttcctctgggtttctaagcagttatggtgatgacttagcgtcaagacatttgctgaactcagcacattcgggaccaatatatagtgggtacatcaagtccatctgacaaaatggggcagaagagaaaggactcagtgtgtgatccggtttctttttgctcgcccctgttttttgtagaatctcttcatgcttgacatacctaccagtattattcccgacgacacatatacatatgagaatataccttatttatttttgtgtaggtgtctgccttcacaaatgtcattgtctactcctagaagaaccaaatacctcaatttttgtttttgagtactgtactatcctgtaaatatatcttaagcaggtttgttttcagcactgatggaaaataccagtgttgggttttttttttagttgccaacagttgtatgtttgctgattatttatgacctgaaataatatatttcttcttctaagaagacattttgttacataaggatgacttttttatacaatggaataaattatggcatttctattgaaatttcaacgcttttatttctttggcaaccacacccaatccctctcccactagtgaactagggaagaatttcgacaagggcctgcagaatgtgttgagatctgatcccatgccctgtggtggcccgttggtcccatgaaatggctgggttgcaagggaggaagacaagtgagtatcatgaaacaccggacgctacagctgaactcttagtattggatcagtgtgtctgcccatgcccattttagcggctctgtaacctaccatgtcacccaggatgccaaggtgtccccagagccaaagctaggaggaaatagccacttgtctggattgccttcttcatttaataccctcctcaggttaatataaaaagtcgccttcccatctctgagctgtgctggagttatgaggagacaaaagtttttccaaacacatgacata

SEQ ID NO: 5880 - protein, 190 aa, Homo sapiens [sequence omitted]

SEQ ID NO: 5881 - DNA, 2488 bp, Homo sapiens
gaggccgcatataaacgcgctccccgggccaggctcgctgcgaaggacatttgggctgtgtgtgcgacgcgggtcggaggggcagtcgggggaaccgcgaagaagccgaggagcccggagccccgcgtgacgctcctctctcagtccaaaagcggcttttggttcggcgcagagagacccgggggtctagcttttcctcgaaaagcgccgccctgcccttggccccgagaacagacaaagagcaccgcagggccgatcacgctgggggcgctgaggccggccatggtcatggaagtgggcaccctggacgctggaggcctgcgggcgctgctgggggagcgagcggcgcaatgcctgctgctggactgccgctccttcttcgctttcaacgccggccacatcgccggctctgtcaacgtgcgcttcagcaccatcgtgcggcgccgggccaagggcgccatgggcctggagcacatcgtgcccaacgccgagctccgcggccgcctgctggccggcgcctaccacgccgtggtgttgctggacgagcgcagcgccgccctggacggcgccaagcgcgacggcaccctggccctggcggccggcgcgctctgccgcgaggcgcgcgccgcgcaagtcttcttcctcaaaggaggatacgaagcgttttcggcttcctgcccggagctgtgcagcaaacagtcgacccccatggggctcagccttcccctgagtactagcgtccctgacagcgcggaatctgggtgcagttcctgcagtaccccactctacgatcagggtggcccggtggaaatcctgccctttctgtacctgggcagtgcgtatcacgcttcccgcaaggacatgctggatgccttgggcatcactgccttgatcaacgtctcagccaattgtcccaaccattttgagggtcactaccagtacaagagcatccctgtggaggacaaccacaaggcagacatcagctcctggttcaacgaggccattgacttcatagactccatcaagaatgctggaggaagggtgtttgtccactgccaggcaggcatttcccggtcagccaccatctgccttgcttaccttatgaggactaatcgagtcaagctggacgaggcctttgagtttgtgaagcagaggcgaagcatcatctctcccaacttcagcttcatgggccagctgctgcagtttgagtcccaggtgctggctccgcactgttcggcagaggctgggagccccgccatggctgtgctcgaccgaggcacctccaccaccaccgtgttcaacttccccgtctccatccctgtccactccacgaacagtgcgctgagctaccttcagagccccattacgacctctcccagctgctgaaaggccacgggaggtgaggctcttcacatcccattgggactccatgctccttgagaggagaaatgcaataactctgggaggggctcgagagggctggtccttatttatttaacttcacccgagttcctctgggtttctaagcagttatggtgatgacttagcgtcaagacatttgctgaactcagcacattcgggaccaatatatagtgggtacatcaagtccatctgacaaaatggggcagaagagaaaggactcagtgtgtgatccggtttctttttgctcgcccctgttttttgtagaatctcttcatgcttgacatacctaccagtattattcccgacgacacatatacatatgagaatataccttatttatttttgtgtaggtgtctgccttcacaaatgtcattgtctactcctagaagaaccaaatacctcaatttttgtttttgagtactgtactatcctgtaaatatatcttaagcaggtttgttttcagcactgatggaaaataccagtgttgggttttttttttagttgccaacagttgtatgtttgctgattatttatgacctgaaataatatatttcttcttctaagaagacattttgttacataaggatgacttttttatacaatggaataaattatggcatttctattgaaatttcaacgcttttatttctttggcaaccacacccaatccctctcccactagtgaactagggaagaatttcgacaagggcctgcagaatgtgttgagatctgatcccatgccctgtggtggcccgttggtcccatgaaatggctgggttgcaagggaggaagacaagtgagtatcatgaaacaccggacgctacagctgaactcttagtattggatcagtgtgtctgcccatgcccattttagcggctctgtaacctaccatgtcacccaggatgccaaggtgtccccagagccaaagctaggaggaaatagccacttgtctggattgccttcttcatttaataccctcctcaggttaatataaaaagtcgccttcccatctctgagctgtgctggagttatgaggagacaaaagtttttccaaacacatgacata

SEQ ID NO: 5882 - protein, 367 aa, Homo sapiens; identical to SEQ ID NO: 695

SEQ ID NO: 5883 - DNA, 2295 bp, Homo sapiens
gaggccgcatataaacgcgctccccgggccaggctcgctgcgaaggacatttgggctgtgtgtgcgacgcgggtcggaggggcagtcgggggaaccgcgaagaagccgaggagcccggagccccgcgtgacgctcctctctcagtccaaaagcggcttttggttcggcgcagagagacccgggggtctagcttttcctcgaaaagcgccgccctgcccttggccccgagaacagacaaagagcaccgcagggccgatcacgctgggggcgctgaggccggccatggtcatggaagtgggcaccctggacgctggaggcctgcgggcgctgctgggggagcgagcggcgcaatgcctgctgctggactgccgctccttcttcgctttcaacgccggccacatcgccggctctgtcaacgtgcgcttcagcaccatcgtgcggcgccgggccaagggcgccatgggcctggagcacatcgtgcccaacgccgagctccgcggccgcctgctggccggcgcctaccacgccgtggtgttgctggacgagcgcagcgccgccctggacggcgccaagcgcgacggcaccctggccctggcggccggcgcgctctgccgcgaggcgcgcgccgcgcaagtcttcttcctcaaaggaggatacgaagcgttttcggcttcctgcccggagctgtgcagcaaacaatcaacgtctcagccaattgtcccaaccattttgagggtcactaccagtacaagagcatccctgtggaggacaaccacaaggcagacatcagctcctggttcaacgaggccattgacttcatagactccatcaagaatgctggaggaagggtgtttgtccactgccaggcaggcatttcccggtcagccaccatctgccttgcttaccttatgaggactaatcgagtcaagctggacgaggcctttgagtttgtgaagcagaggcgaagcatcatctctcccaacttcagcttcatgggccagctgctgcagtttgagtcccaggtgctggctccgcactgttcggcagaggctgggagccccgccatggctgtgctcgaccgaggcacctccaccaccaccgtgttcaacttccccgtctccatccctgtccactccacgaacagtgcgctgagctaccttcagagccccattacgacctctcccagctgctgaaaggccacgggaggtgaggctcttcacatcccattgggactccatgctccttgagaggagaaatgcaataactctgggaggggctcgagagggctggtccttatttatttaacttcacccgagttcctctgggtttctaagcagttatggtgatgacttagcgtcaagacatttgctgaactcagcacattcgggaccaatatatagtgggtacatcaagtccatctgacaaaatggggcagaagagaaaggactcagtgtgtgatccggtttctttttgctcgcccctgttttttgtagaatctcttcatgcttgacatacctaccagtattattcccgacgacacatatacatatgagaatataccttatttatttttgtgtaggtgtctgccttcacaaatgtcattgtctactcctagaagaaccaaatacctcaatttttgtttttgagtactgtactatcctgtaaatatatcttaagcaggtttgttttcagcactgatggaaaataccagtgttgggttttttttttagttgccaacagttgtatgtttgctgattatttatgacctgaaataatatatttcttcttctaagaagacattttgttacataaggatgacttttttatacaatggaataaattatggcatttctattgaaatttcaacgcttttatttctttggcaaccacacccaatccctctcccactagtgaactagggaagaatttcgacaagggcctgcagaatgtgttgagatctgatcccatgccctgtggtggcccgttggtcccatgaaatggctgggttgcaagggaggaagacaagtgagtatcatgaaacaccggacgctacagctgaactcttagtattggatcagtgtgtctgcccatgcccattttagcggctctgtaacctaccatgtcacccaggatgccaaggtgtccccagagccaaagctaggaggaaatagccacttgtctggattgccttcttcatttaataccctcctcaggttaatataaaaagtcgccttcccatctctgagctgtgctggagttatgaggagacaaaagtttttccaaacacatgacata

SEQ ID NO: 5884 - protein, 280 aa, Homo sapiens
MPAAGLPLLLRFQRRPHRRLCQRALQHHRAAPGQGRHGPGAHRAQRRAPRPPAGRRLPRRGVAGRAQRRPGRRQARRHPGPGGRRALPRGARRASLLPQRRIRSVFGFLPGAVQQTINVSANCPNHFEGHYQYKSIPVEDNHKADISSWFNEAIDFIDSIKNAGGRVFVHCQAGISRSATICLAYLMRTNRVKLDEAFEFVKQRRSIISPNFSFMGQLLQFESQVLAPHCSAEAGSPAMAVLDRGTSTTTVFNFPVSIPVHSTNSALSYLQSPITTSPSC

SEQ ID NO: 5885 - DNA, 1767 bp, Homo sapiens
cgaagcgttttcggcttcctgcccggagctgtgcagcaaacagtcgacccccatggggctcagccttcccctgagtactagcgtccctgacagcgcggaatctgggtgcagttcctgcagtaccccactctacgatcaggttagtaggtgtccctgccacagggaagaagtaagaactggcaaaggcatggaagagtagtgccagggagaatatagaaagtgacctgcagcattatttataacggaggggacacagggatatgatttattccacagttaagtggtctgacggagccgagtctccaattgtaggctctacggaaatgaacttgctggtcctgcccaggcaaatgggcttagttccctatttatttatcctccagcaacagaactgagttcactcggtatctgaaattgacttttccagcagaaagtttttgtgggtatgggcactggccttggctttgagcaagcttgatgaatgttggatatttctggatttcagggtggcccggtggaaatcctgccctttctgtacctgggcagtgcgtatcacgcttcccgcaaggacatgctggatgccttgggcatcactgccttgatcaacgtctcagccaattgtcccaaccattttgagggtcactaccagtacaagagcatccctgtggaggacaaccacaaggcagacatcagctcctggttcaacgaggccattgacttcatagactccatcaagaatgctggaggaagggtgtttgtccactgccaggcaggcatttcccggtcagccaccatctgccttgcttaccttatgaggactaatcgagtcaagctggacgaggcctttgagtttgtgaagcagaggcgaagcatcatctctcccaacttcagcttcatgggccagctgctgcagtttgagtcccaggtgctggctccgcactgttcggcagaggctgggagccccgccatggctgtgctcgaccgaggcacctccaccaccaccgtgttcaacttccccgtctccatccctgtccactccacgaacagtgcgctgagctaccttcagagccccattacgacctctcccagctgctgaaaggccacgggaggtgaggctcttcacatcccattgggactccatgctccttgagaggagaaatgcaataactctgggaggggctcgagagggctggtccttatttatttaacttcacccgagttcctctgggtttctaagcagttatggtgatgacttagcgtcaagacatttgctgaactcagcacattcgggaccaatatatagtgggtacatcaagtccatctgacaaaatggggcagaagagaaaggactcagtgtgtgatccggtttctttttgctcgcccctgttttttgtagaatctcttcatgcttgacatacctaccagtattattcccgacgacacatatacatatgagaatataccttatttatttttgtgtaggtgtctgccttcacaaatgtcattgtctactcctagaagaaccaaatacctcaatttttgtttttgagtactgtactatcctgtaaatatatcttaagcaggtttgttttcagcactgatggaaaataccagtgttgggttttttttttagttgccaacagttgtatgtttgctgattatttatgacctgaaataatatatttcttcttctaagaagacattttgttacataaggatgacttttttatacaatggaataaattatggcatttctattgaaatttc

SEQ ID NO: 5886 - protein, 204 aa, Homo sapiens; identical to SEQ ID NO: 5874

SEQ ID NO: 5887 - DNA, 1803 bp, Homo sapiens
gttgctggacgagcgcagcgccgccctggacggcgccaagcgcgacggcaccctggccctggcggccggcgcgctctgccgcgaggcgcgcgccgcgcaagtcttcttcctcaaaggtacgccctcggggaagctcggggcgggccgcacacccctgaggttttgcccggtacccctggctctcggctcccgggggatcgccccacctgcagcgcgtgggcgctggagtacatttatctctggaacttgtcattggctttgtttggctctggaaacaaagacttgcctgggcctttccgatgtaaacttccagcccttggtgggtgggggagttgtatgaaggtgccgtgtcccggtgtcactaatggggaaaaaaaatgtctttgtattcccaggaggatacgaagcgttttcggcttcctgcccggagctgtgcagcaaacagtcgacccccatggggctcagccttcccctgagtactagcgtccctgacagcgcggaatctgggtgcagttcctgcagtaccccactctacgatcagggtggcccggtggaaatcctgccctttctgtacctgggcagtgcgtatcacgcttcccgcaaggacatgctggatgccttgggcatcactgccttgatcaacgtctcagccaattgtcccaaccattttgagggtcactaccagtacaagagcatccctgtggaggacaaccacaaggcagacatcagctcctggttcaacgaggccattgacttcatagactccatcaagaatgctggaggaagggtgtttgtccactgccaggcaggcatttcccggtcagccaccatctgccttgcttaccttatgaggactaatcgagtcaagctggacgaggcctttgagtttgtgaagcagaggcgaagcatcatctctcccaacttcagcttcatgggccagctgctgcagtttgagtcccaggtgctggctccgcactgttcggcagaggctgggagccccgccatggctgtgctcgaccgaggcacctccaccaccaccgtgttcaacttccccgtctccatccctgtccactccacgaacagtgcgctgagctaccttcagagccccattacgacctctcccagctgctgaaaggccacgggaggtgaggctcttcacatcccattgggactccatgctccttgagaggagaaatgcaataactctgggaggggctcgagagggctggtccttatttatttaacttcacccgagttcctctgggtttctaagcagttatggtgatgacttagcgtcaagacatttgctgaactcagcacattcgggaccaatatatagtgggtacatcaagtccatctgacaaaatggggcagaagagaaaggactcagtgtgtgatccggtttctttttgctcgcccctgttttttgtagaatctcttcatgcttgacatacctaccagtattattcccgacgacacatatacatatgagaatataccttatttatttttgtgtaggtgtctgccttcacaaatgtcattgtctactcctagaagaaccaaatacctcaatttttgtttttgagtactgtactatcctgtaaatatatcttaagcaggtttgttttcagcactgatggaaaataccagtgttgggttttttttttagttgccaacagttgtatgtttgctgattatttatgacctgaaataatatatttcttcttctaagaagacattttgttacataaggatgacttttttatacaatggaataaattatggcatttctattgaaatttc

SEQ ID NO: 5888 - protein, 255 aa, Homo sapiens [sequence omitted]

SEQ ID NO: 5889 - DNA, 1358 bp, Homo sapiens
tgcgacgcgggtcggaggggcagtcgggggaaccgcgaagaagccgaggacgcggaatctgggtgcagttcctgcagtaccccactctacgatcagggtggcccggtggaaatcctgccctttctgtacctgggcagtgcgtatcacgcttcccgcaaggacatgctggatgccttgggcatcactgccttgatcaacgtctcagccaattgtcccaaccattttgagggtcactaccagtacaagagcatccctgtggaggacaaccacaaggcagacatcagctcctggttcaacgaggccattgacttcatagactccatcaagaatgctggaggaagggtgtttgtccactgccaggcaggcatttcccggtcagccaccatctgccttgcttaccttatgaggactaatcgagtcaagctggacgaggcctttgagtttgtgaagcagaggcgaagcatcatctctcccaacttcagcttcatgggccagctgctgcagtttgagtcccaggtgctggctccgcactgttcggcagaggctgggagccccgccatggctgtgctcgaccgaggcacctccaccaccaccgtgttcaacttccccgtctccatccctgtccactccacgaacagtgcgctgagctaccttcagagccccattacgacctctcccagctgctgaaaggccacgggaggtgaggctcttcacatcccattgggactccatgctccttgagaggagaaatgcaataactctgggaggggctcgagagggctggtccttatttatttaacttcacccgagttcctctgggtttctaagcagttatggtgatgacttagcgtcaagacatttgctgaactcagcacattcgggaccaatatatagtgggtacatcaagtccatctgacaaaatggggcagaagagaaaggactcagtgtgtgatccggtttctttttgctcgcccctgttttttgtagaatctcttcatgcttgacatacctaccagtattattcccgacgacacatatacatatgagaatataccttatttatttttgtgtaggtgtctgccttcacaaatgtcattgtctactcctagaagaaccaaatacctcaatttttgtttttgagtactgtactatcctgtaaatatatcttaagcaggtttgttttcagcactgatggaaaataccagtgttgggttttttttttagttgccaacagttgtatgtttgctgattatttatgacctgaaataatatatttcttcttctaagaagacattttgttacataaggatgacttttttatacaatggaataaattatggcatttctattgaaatttc

SEQ ID NO: 5890 - protein, 174 aa, Homo sapiens [sequence omitted]

SEQ ID NO: 5891 - DNA, 2829 bp, Homo sapiens
gctgcgaaggacatttgggctgtgtgtgcgacgcgggtcggaggggcagtcgggggaaccgcgaagaagccgaggagcccggagccccgcgtgacgctcctctctcagtccaaaagcggcttttggttcggcgcagagagacccgggggtctagcttttcctcgaaaagcgccgccctgcccttggccccgagaacagacaaagagcaccgcagggccgatcacgctgggggcgctgaggccggccatggtcatggaagtgggcaccctggacgctggaggcctgcgggcgctgctgggggagcgagcggcgcaatgcctgctgctggactgccgctccttcttcgctttcaacgccggccacatcgccggctctgtcaacgtgcgcttcagcaccatcgtgcggcgccgggccaagggcgccatgggcctggagcacatcgtgcccaacgccgagctccgcggccgcctgctggccggcgcctaccacgccgtggtgttgctggacgagcgcagcgccgccctggacggcgccaagcgcgacggcaccctggccctggcggccggcgcgctctgccgcgaggcgcgcgccgcgcaagtcttcttcctcaaaggaggatacgaagcgttttcggcttcctgcccggagctgtgcagcaaacagtcgacccccatggggctcagccttcccctgagtactagcgtccctgacagcgcggaatctgggtgcagttcctgcagtaccccactctacgatcaggttagtaggtgtccctgccacagggaagaagtaagaactggcaaaggcatggaagagtagtgccagggagaatatagaaagtgacctgcagcattatttataacggaggggacacagggatatgatttattccacagttaagtggtctgacggagccgagtctccaattgtaggctctacggaaatgaacttgctggtcctgcccaggcaaatgggcttagttccctatttatttatcctccagcaacagaactgagttcactcggtatctgaaattgacttttccagcagaaagtttttgtgggtatgggcactggccttggctttgagcaagcttgatgaatgttggatatttctggatttcagggtggcccggtggaaatcctgccctttctgtacctgggcagtgcgtatcacgcttcccgcaaggacatgctggatgccttgggcatcactgccttgatcaacgtctcagccaattgtcccaaccattttgagggtcactaccagtacaagagcatccctgtggaggacaaccacaaggcagacatcagctcctggttcaacgaggccattgacttcataggtaaatggaatggatgcctggggcttttctgcctttctcttctcattttagccactaagcccaacctctgtggcaagagcttgaagttttctgagccttcttccacacattcagtatcagtctggtgtgggcaacattcctgtaaaatatgaatttgattcgatgtcccactttacagatttgcaaagtggggctcacaaagttgaattgactggtctgagatctatctgctaagtggaaatccccagtctgagtttaaatcctgtgccatcctttgcacagtgcccacgttgcctccatgaacagtatccatgtgatggcatgtggtgatgttgaccatttctagacaagacacacatgacctttctcagatacactgtacctgggcttggggtggttctcctgaactctcaagtaaccagccgctcctttggttttccagactccatcaagaatgctggaggaagggtgtttgtccactgccaggcaggcatttcccggtcagccaccatctgccttgcttaccttatgaggactaatcgagtcaagctggacgaggcctttgagtttgtgaagcagaggcgaagcatcatctctcccaacttcagcttcatgggccagctgctgcagtttgagtcccaggtgctggctccgcactgttcggcagaggctgggagccccgccatggctgtgctcgaccgaggcacctccaccaccaccgtgttcaacttccccgtctccatccctgtccactccacgaacagtgcgctgagctaccttcagagccccattacgacctctcccagctgctgaaaggccacgggaggtgaggctcttcacatcccattgggactccatgctccttgagaggagaaatgcaataactctgggaggggctcgagagggctggtccttatttatttaacttcacccgagttcctctgggtttctaagcagttatggtgatgacttagcgtcaagacatttgctgaactcagcacattcgggaccaatatatagtgggtacatcaagtccatctgacaaaatggggcagaagagaaaggactcagtgtgtgatccggtttctttttgctcgcccctgttttttgtagaatctcttcatgcttgacatacctaccagtattattcccgacgacacatatacatatgagaatataccttatttatttttgtgtaggtgtctgccttcacaaatgtcattgtctactcctagaagaaccaaatacctcaatttttgtttttgagtactgtactatcctgtaaatatatcttaagcaggtttgttttcagcactgatggaaaataccagtgttgggttttttttttagttgccaacagttgtatgtttgctgattatttatgacctgaaataatatatttcttcttctaagaagacattttgttacataaggatgacttttttatacaatggaataaattatggcatttctattgaaatttc

SEQ ID NO: 5892 - protein, 190 aa, Homo sapiens [sequence omitted]

SEQ ID NO: 5893 - DNA, 1864 bp, Homo sapiens
gaggccgcatataaacgcgctccccgggccaggctcgctgcgaaggacatttgggctgtgtgtgcgacgcgggtcggaggggcagtcgggggaaccgcgaagaagccgaggagcccggagccccgcgtgacgctcctctctcagtccaaaagcggcttttggttcggcgcagagagacccgggggtctagcttttcctcgaaaagcgccgccctgcccttggccccgagaacagacaaagagcaccgcagggccgatcacgctgggggcgctgaggccggccatggtcatggaagtgggcaccctggacgctggaggcctgcgggcgctgctgggggagcgagcggcgcaatgcctgctgctggactgccgctccttcttcgctttcaacgccggccacatcgccggctctgtcaacgtgcgcttcagcaccatcgtgcggcgccgggccaagggcgccatgggcctggagcacatcgtgcccaacgccgagctccgcggccgcctgctggccggcgcctaccacgccgtggtgttgctggacgagcgcagcgccgccctggacggcgccaagcgcgacggcaccctggccctggcggccggcgcgctctgccgcgaggcgcgcgccgcgcaagtcttcttcctcaaaggaggatacgaagcgttttcggcttcctgcccggagctgtgcagcaaacaatcaacgtctcagccaattgtcccaaccattttgagggtcactaccagtacaagagcatccctgtggaggacaaccacaaggcagacatcagctcctggttcaacgaggccattgacttcatagactccatcaagaatgctggaggaagggtgtttgtccactgccaggcaggcatttcccggtcagccaccatctgccttgcttaccttatgaggactaatcgagtcaagctggacgaggcctttgagtttgtgaagcagaggcgaagcatcatctctcccaacttcagcttcatgggccagctgctgcagtttgagtcccaggtgctggctccgcactgttcggcagaggctgggagccccgccatggctgtgctcgaccgaggcacctccaccaccaccgtgttcaacttccccgtctccatccctgtccactccacgaacagtgcgctgagctaccttcagagccccattacgacctctcccagctgctgaaaggccacgggaggtgaggctcttcacatcccattgggactccatgctccttgagaggagaaatgcaataactctgggaggggctcgagagggctggtccttatttatttaacttcacccgagttcctctgggtttctaagcagttatggtgatgacttagcgtcaagacatttgctgaactcagcacattcgggaccaatatatagtgggtacatcaagtccatctgacaaaatggggcagaagagaaaggactcagtgtgtgatccggtttctttttgctcgcccctgttttttgtagaatctcttcatgcttgacatacctaccagtattattcccgacgacacatatacatatgagaatataccttatttatttttgtgtaggtgtctgccttcacaaatgtcattgtctactcctagaagaaccaaatacctcaatttttgtttttgagtactgtactatcctgtaaatatatcttaagcaggtttgttttcagcactgatggaaaataccagtgttgggttttttttttagttgccaacagttgtatgtttgctgattatttatgacctgaaataatatatttcttcttctaagaagacattttgttacataaggatgacttttttatacaatggaataaattatggcatttctattgaaatttc

SEQ ID NO: 5894 - protein, 280 aa, Homo sapiens; identical to SEQ ID NO: 5884

SEQ ID NO: 5895 - DNA, 2057 bp, Homo sapiens
gaggccgcatataaacgcgctccccgggccaggctcgctgcgaaggacatttgggctgtgtgtgcgacgcgggtcggaggggcagtcgggggaaccgcgaagaagccgaggagcccggagccccgcgtgacgctcctctctcagtccaaaagcggcttttggttcggcgcagagagacccgggggtctagcttttcctcgaaaagcgccgccctgcccttggccccgagaacagacaaagagcaccgcagggccgatcacgctgggggcgctgaggccggccatggtcatggaagtgggcaccctggacgctggaggcctgcgggcgctgctgggggagcgagcggcgcaatgcctgctgctggactgccgctccttcttcgctttcaacgccggccacatcgccggctctgtcaacgtgcgcttcagcaccatcgtgcggcgccgggccaagggcgccatgggcctggagcacatcgtgcccaacgccgagctccgcggccgcctgctggccggcgcctaccacgccgtggtgttgctggacgagcgcagcgccgccctggacggcgccaagcgcgacggcaccctggccctggcggccggcgcgctctgccgcgaggcgcgcgccgcgcaagtcttcttcctcaaaggaggatacgaagcgttttcggcttcctgcccggagctgtgcagcaaacagtcgacccccatggggctcagccttcccctgagtactagcgtccctgacagcgcggaatctgggtgcagttcctgcagtaccccactctacgatcagggtggcccggtggaaatcctgccctttctgtacctgggcagtgcgtatcacgcttcccgcaaggacatgctggatgccttgggcatcactgccttgatcaacgtctcagccaattgtcccaaccattttgagggtcactaccagtacaagagcatccctgtggaggacaaccacaaggcagacatcagctcctggttcaacgaggccattgacttcatagactccatcaagaatgctggaggaagggtgtttgtccactgccaggcaggcatttcccggtcagccaccatctgccttgcttaccttatgaggactaatcgagtcaagctggacgaggcctttgagtttgtgaagcagaggcgaagcatcatctctcccaacttcagcttcatgggccagctgctgcagtttgagtcccaggtgctggctccgcactgttcggcagaggctgggagccccgccatggctgtgctcgaccgaggcacctccaccaccaccgtgttcaacttccccgtctccatccctgtccactccacgaacagtgcgctgagctaccttcagagccccattacgacctctcccagctgctgaaaggccacgggaggtgaggctcttcacatcccattgggactccatgctccttgagaggagaaatgcaataactctgggaggggctcgagagggctggtccttatttatttaacttcacccgagttcctctgggtttctaagcagttatggtgatgacttagcgtcaagacatttgctgaactcagcacattcgggaccaatatatagtgggtacatcaagtccatctgacaaaatggggcagaagagaaaggactcagtgtgtgatccggtttctttttgctcgcccctgttttttgtagaatctcttcatgcttgacatacctaccagtattattcccgacgacacatatacatatgagaatataccttatttatttttgtgtaggtgtctgccttcacaaatgtcattgtctactcctagaagaaccaaatacctcaatttttgtttttgagtactgtactatcctgtaaatatatcttaagcaggtttgttttcagcactgatggaaaataccagtgttgggttttttttttagttgccaacagttgtatgtttgctgattatttatgacctgaaataatatatttcttcttctaagaagacattttgttacataaggatgacttttttatacaatggaataaattatggcatttctattgaaatttc

SEQ ID NO: 5896 - protein, 367 aa, Homo sapiens; identical to SEQ ID NO: 695

SEQ ID NO: 5897 - DNA, 1769 bp, Homo sapiens
actgagttcactcggtatctgaaattgacttttccagcagaaagtttttgtgggtatgggcactggccttggctttgagcaagcttgatgaatgttggatatttctggatttcagggtggcccggtggaaatcctgccctttctgtacctgggcagtgcgtatcacgcttcccgcaaggacatgctggatgccttgggcatcactgccttgatcaacgtctcagccaattgtcccaaccattttgagggtcactaccagtacaagagcatccctgtggaggacaaccacaaggcagacatcagctcctggttcaacgaggccattgacttcataggtaaatggaatggatgcctggggcttttctgcctttctcttctcattttagccactaagcccaacctctgtggcaagagcttgaagttttctgagccttcttccacacattcagtatcagtctggtgtgggcaacattcctgtaaaatatgaatttgattcgatgtcccactttacagatttgcaaagtggggctcacaaagttgaattgactggtctgagatctatctgctaagtggaaatccccagtctgagtttaaatcctgtgccatcctttgcacagtgcccacgttgcctccatgaacagtatccatgtgatggcatgtggtgatgttgaccatttctagacaagacacacatgacctttctcagatacactgtacctgggcttggggtggttctcctgaactctcaagtaaccagccgctcctttggttttccagactccatcaagaatgctggaggaagggtgtttgtccactgccaggcaggcatttcccggtcagccaccatctgccttgcttaccttatgaggactaatcgagtcaagctggacgaggcctttgagtttgtgaagcagaggcgaagcatcatctctcccaacttcagcttcatgggccagctgctgcagtttgagtcccaggtgctggctccgcactgttcggcagaggctgggagccccgccatggctgtgctcgaccgaggcacctccaccaccaccgtgttcaacttccccgtctccatccctgtccactccacgaacagtgcgctgagctaccttcagagccccattacgacctctcccagctgctgaaaggccacgggaggtgaggctcttcacatcccattgggactccatgctccttgagaggagaaatgcaataactctgggaggggctcgagagggctggtccttatttatttaacttcacccgagttcctctgggtttctaagcagttatggtgatgacttagcgtcaagacatttgctgaactcagcacattcgggaccaatatatagtgggtacatcaagtccatctgacaaaatggggcagaagagaaaggactcaaatctcttcatgcttgacatacctaccagtattattcccgacgacacatatacatatgagaatataccttatttatttttgtgtaggtgtctgccttcacaaatgtcattgtctactcctagaagaaccaaatacctcaatttttgtttttgagtactgtactatcctgtaaatatatcttaagcaggtttgttttcagcactgatggaaaataccagtgttgggttttttttttagttgccaacagttgtatgtttgctgattatttatgacctgaaataatatatttcttcttctaagaagacattttgttacataaggatgacttttttatacaatggaataaattatggcatttctattg

SEQ ID NO: 5898 - protein, 58 aa, Homo sapiens; identical to SEQ ID NO: 5872

SEQ ID NO: 5899 - DNA, 629 bp, Homo sapiens
aagtgctgggattacagggagggcgttgcccttatctgaggacctctttgctgtcctcgaccaatgttcaaatgaaggtagaagacgcccttttaaaaaaaaaagcactccatgccctgaacttttctagaagaatccaggcagaacatttgcgcaggcgaaaacacacaagctaagcgaggcaaatgcagaagttgccactggtgatacagctcgcacagcgacgacacagggtggccagcgaaatcccctcccccaggaggggaggaaaccgcagaatgttcctgactcggcacccgggcgggtggcgcaatgtttatgtttgtgtacccagcgcgtcgcgtcgctgcagcaggctccgctgtccagggggccgtcactgggactcagggcacggagatcgctgggcggggcgggggtcttcccaagtgttgcgatccaggtcctggcaatccgcccacaatggcccgggattggattttgctttcggcctataacggccgcgacgacagggagcgagggttgtggccggcttctgttccgggttggaggcccccagcccagcgcttagtgggcgctcactgtgtatactgcctatttgtataataaagaaagggatggagaagctc

SEQ ID NO: 5900 - protein, 103 aa, Homo sapiens
MQKLPLVIQLAQRRHRVASEIPSPRRGGNRRMFLTRHPGGWRNVYVCVPSASRRCSRLRCPGGRHWDSGHGDRWAGRGSSQVLRSRSWQSAHNGPGLDFAFGL

SEQ ID NO: 5901 - DNA, 572 bp, Homo sapiens
cttgttaagtgccaggatagaaactgggtagcccaggaaagatgcccagaggaggggacgtctacttggagatgtaaaggctgatgtaggatagaaatacctggaggaaatgcctttgagaggtccccagtacagatctcaaagcaaggcttgttggacaaataaatgaagatgagcccaagagcccaggagagggaccgggaacagcagggcctccgtgactcacacaagcttcatccctgaaccaaggacgcagcctgccaacaatggccccaagccacaccccgccacagggggaactgatgctgcgctgaagaaagccaccactaagaaaacgaaaagagaagcagcagaccaggagaaaatatttgcaaaaccaaatctgataacggacttgtatccagtatttgcaaagaacttctaaacttaataacaacaacgacgacaaaggagcaaaatccctggtggtctagcagtgaggattaaaaaagaaaagaagcaaaatatatgaacagctgtttctccaaaggagatataccaatagctaataaaatatgcacagatgctccaca

SEQ ID NO: 5902 - protein, 82 aa, Homo sapiens
AQEPRRGTGNSRASVTHTSFIPEPRTQPANNGPKPHPATGGTDAALKKATTKKTKREAADQEKIFAKPNLITDLYPVFAKNF

SEQ ID NO: 5903 - DNA, 7724 bp, Homo sapiens
ggactcagccgcggctgcgggacccgggcaccgggaggcggtggcggcggcggcggcggcagcagcggcgacagcagaggaggaagaggaggaagaaggaaagaaaaagaagaaccaggaggagtcctcaacaacgacagcggggactgcgggaccagggtaaagcggcgacggcggcgacggcccagcaaccgtgaggagaaacaaaagccttctaaattatagtttaaaaaaaaattctgggggaaaagagagagaaagccgaggggggaggcccttctcctttaaaataactacggtagtgggtttttcctttttttcctcttttttccctctctgcggagaatcgaactgagggaactgaacaaaccgcccctgggtcccatgagggaaaaaaaccccggagccgcagagaggggaagaggcagaaaccgcaggaccttccaggtcgccccctcggtccccgcacccccaggccgcccgctcaccctcgtcgagtctcgctaatccctcctgatcgcgacccccgcaagagggagaaacgggtgtttccaacccctttcatgggggagaggaagccgcggggagcccaggaacagcgaccgcagcaagatctgcacccggagcctcaggaacagccccagaggccaaaactgcaccctgcgaaagagcagaaaacaggaccaggaacagcagaaacctccctgcaatcatctttccattagtcaatgctgatttcctctcccgaaaccaggaattcacttcccaccccagataacctaatataatctatatatataaatatataatatataatgttcttaaattattcctgatttttttttaaccaagctgccaagaaaagaacgtattcccctcttagtcctattctaatttttatgtgagtgaatctaaactgctgaggaaaaccatatgtgattgttaaattatatatatctatatttttactccgcgcaaggcttattcttctacatccatagatgcttgagaagctctgtttttgtcattcatgtacattttcctttggaaaaagaaagcgcctattttactaaccaaagacttgatttttaccctcttcatttttattccctcctaaaaataagcccaattggatccaagtcaatgttttaagagatttttttaagagttgttttttctttcagagaccagaattccaaatcagaacaatttaaggtgataagctgcgatctttgagctagctataaataagacatttcaagcaagcaagcaaacaacttaaatttggggtagaggaaaaaaaaggcgtgagacatcaggttgtcattttttattgtgagattctgctcctaaagataataaatgggggattacgggtttggagtgctagtgcaaagcaatactgggaataaatctgcttttccagtcagattccatccacatctgcagcctccacaccatcaccaaaatgccacccccagccctgctgcttttataaataataacacagctgccaatggcagcagtgctgggtcagcttggctttttcctgctccagctacccataacattcaggatgagatcttggggtcagaaaaagcaaaaagtcagcaacaggaacagcaagaccccttagaaaagcagcagctttccccaagtccaggtcaggaagctggaatactgcctgaaacagagaaggcaaaatcagaagaaaatcaaggggacaattcttcggaaaatggcaatgggaaggagaaaataaggatcgaatctccagtgttgacagggtttgattatcaagaagccactgggctaggtacttcaacccaacccttgacatctagcgcatcgtctcttactggtttcagtaactggtcagcagcgatagcgccttcctcctctacaataatcaatgaagatgcaagtttctttcaccagggaggggtccctgctgcttcggctaataacggtgctctgttgtttcaaaatttcccccatcatgtcagccctggctttggaggcagcttctctcctcagatcgggcctctctcacagcaccacccacatcaccctcatttccagcatcatcacagccagcatcagcagcaaaggaggtctcctgccagtccccatcccccacccttcacacatagaaatgctgcttttaaccagctgcctcatttggcgaataatcttaacaaacccccctctccgtggagcagctaccagagtccgtcaccaacaccctcctcttcctggagcccgggcggtggtggatatggtggctggggaggttcccaaggccgagatcaccgcagagggctgaatggtggaataacgcccctgaactccatctcgcctttgaagaaaaattttgcaagcaatcatattcagctccagaagtatgctcgccccagctctgcctttgcacctaaatcctggatggaagatagcttgaacagggctgacaacatttttccttttccggatcgccccaggacattcgacatgcactcactggagagttcactcattgacataatgagagctgaaaatgataccattaaaggtcgtctaaactattcatatccaggatccgatagctctctgcttattaatgcaaggacatatgggcgaaggagaggtcagtcttcactgtttccaatggaagatggattcttggatgatggccgtggggatcagcctcttcatagtggcctgggttcacctcactgcttcagtcaccagaatggggaaagagtggaacgatattctcgaaaggtgtttgtaggcggattgcctccagacattgatgaagatgagatcacagctagttttcgtcgctttggccctctgattgtggattggcctcataaagctgagagcaaatcctattttcctcctaaaggctatgcattcctgctgtttcaagatgaaagctctgtgcaggctctcattgatgcatgcattgaagaagatggaaaactctacctttgtgtatcaagtcccactatcaaggataagccagtccagattcggccttggaatctcagtgacagtgactttgtgatggatggttcacagccacttgacccacgaaaaactatatttgttggtggtgttcctcgaccattacgagctgtggagcttgcgatgataatggatcggctatatggaggtgtgtgctacgctgggattgataccgaccctgagctaaaatacccaaaaggagctgggagagttgcgttctctaatcaacagagttacatagctgctatcagtgcccgctttgttcagctgcagcatggagagatagataaacgggtggaagttaagccatatgtcttggatgatcagctgtgtgatgaatgtcagggggcccgttgtggggggaaatttgctccatttttctgtgctaatgttacctgtctgcagtattactgtgaatattgctgggctgctatccattctcgtgctggcagggaattccacaagcccctggtgaaggaaggcggtgaccgccctcggcatatttcattccgctggaactaaaggataactgcagtgctcattttcaggcctcagaataagtgcactcttctgttcattctgaccccttcctcaacctcttcacgctggcatgtccttttgtagcagtctgtaacttaactatagtataatgaaaagaatgacctataatataggtgttttgtagattcttgtgtcactgcaaacaatatgaactcctttttcgtattgccatcgggttgcatggaagttttattctcttgttttgctggaaaccaagaggatccaaacttcctgcaacattttcttagaggagagagagaaatattaaaagagaaatgaaacaatagagtattttgggtttttaattaaattattgttaataatataacatataagaatacttttattaaaataaccatgcaacaataacactatcggtctatctgacagtttttcccccagggaagtgcttttgccttttcctttcttttttttttttttttcatcttttttgtctctctcttttttccatccctttttaatttttttaacagcaatggaggaagttaacaatttttaatggaaagagcatgttagagcaaacaaatgcataagcaagactgagcagcattataattaattttcagggttttgaggctgaacataatttcattatccctcaaaaagttaccaccacatcagaaaaaataaaaaaaaaatagtaaagtaggcagagctaggtttattttctcttaaacaatttttaaaattcagaatgtaaaaattgggtaaatttactactgaggggagtgcacttatttatttaacttacttatctggtcaaagccccaggaaacctaccaaagctagaattaatgacaactggtgggaaacctagcatttcctctcctgaagaataaatgtataaatgttatttttgatgtttatatataaactctatatcctaatttactaatactcatcagatgtcagcctttgctctccattttgacgttaaaaaacaacaacagatctagagatacctcaaggatatcatttttgattttgtgttacagtacacttgtagccaaaactggaagacaaaaccaatatataatttggctgctgattggcttacttttagatttaaagttactttgggtatcctgtaatttagttgtaacatagaaaatgaaaaaacagttaaaaaaagtgaagtagttgcaaagtgttttgcactgttgaactaagtaactgtgtaaatctgtgcaaaggtacgtatgtttatcttactcttcctataaactaaaataacattacagtttccgaatttagcatgggacatagtcagtgtttgaagtgccaacttcatcaagtaatgcatgctttattataaataaaattctagctttgaaaggcgttatgtgttgaacagtatgcttcaggggtaaatttaaaatagtctcttgaagccctagtcatggaagtaacttttattttaattgacattctcttattaaatgccctatccatcattaaaaggtttattatcagtgggcaaaacatgaaataatatgatcgaatggcaatcttgctagttgcgctacctaacagtaccatcttggatccttcaaaaccaaagacttgccccagcactgctgtggaaccacctggcttatgacccctatggatgatctttaggaaaagcagccctttacttttaatacaggctttaatgaactatacctgttaagttccaaaggtcaaaatggaggcatttgctgtctaatattcaaacatagaaagggagctgcttttaaagaattccctgcaaatactgaaagcagtcatgcgaatggagggtgctcttgtgtagctggtcagggacttttttttcttttctcctgaactacatgattctaattggaatgttcatttgcctctttttactcttttaaatgcttgtaggtggcttggggtgtgctatcgtgctgttcctactcagtaaacaggtgtgatgagttaacaagaaataacactgtttgagaactagctttgaataataatttttccctttgtacatgacctgctgaatttcggtacagtgtttttgtagctaacttattttgtcatgcacataatgtatatttgttatgcactacttttgtatatcttgtttttccaacagtgaacatttttaggcacacttttcactgacgggatatctctttatgcaatacctcaatttttcatattgcaaagagtagctttttgtacttttattactgagagatcttcatatacttcattttttaatataaataattttaataaattttattttcttatattctgctttttatacatttcagtgctctgcatacattttaaattatgaatgtcgtgcactggcaatgctattttagagtctgcagagaagagaaagcatgttgcttaaacatccttccccagcaccagctattggtgtacctataatttaagaaatagtctatgtaaagtcacaaattaatgaaaaaaattcgcatgaaaatgacagataacactgtagttcctaaaaaaaaaattaaatgcataagcataaggtagaaattaaaataacaaaattgtctacagcttcttactaagtttttaaaattattcataaaatgcagacatttttggtgaatgtttagccatttttaatattaataaattgatgttaagtgtttgattcagagatgtctgctcttttaaattatatataaggaaaaaaaatagcctgccttgggacaggtgtgtaatgttagtgtgcatgactaatgtaagaaattgttattctactaatatttacttgtgattgtgtgacaagtgtgtttacagattattggttacacttcaatttacagggcataaacaatgattatctattactctgaactttatgattacatgttcttcagattacatgggattgtagttgggagttaccatgtaactcaaacataattaacatgtaattagtttacagattgtagggcatcacttcaattcaccaagcatgtagttctagcgcactagcatggcgccagccatgtacttacaatgtagttacagagtaattacatggtgatttttgcaatgtaaaataaagtgtttctgattattttctatgtaaaggaaccctctcctttccccttctggtccctgcgctttggtataatatatatacttctccatacacagacctctgcagaatgcaaaataaaacttgcagtgaatgaatttagcattttatgagagtgctgttggaaagacttgataattcaccccttttgttttgaagagttgaatcttctgttaaaaggtgatttaaaacttgaatgtgatgaattgtggcaagttaacttcaagttatgtgcaatacttatttcaaacttttgaaagatctttgcagtgtaattctttgtttttaattgcagacatttaaaaatgtcattttctactgttaagagtaatcctctttcttgctggtgtttctaaagaaaagaatcagaaatcaatctttctactaatgtaaatttgagattatttttaaaaatggaataaaagaggttttggtcatttgctttattttattattttaaagctactgtgattgatagcattgtaagaatcgggacaatattgtattcaactgttttattttttatatttttaaaatttaaagtataattagtttttataattttcatcagatttttgttatattttttggaagtgaaacttttagcaagtgggtgtctagtttttactaatccctaattttttttccagtgtattgctcatattatcagaaggaaaagttatttaagtatgtcagttaattgtactacttggctgaatttccatatagtttttactgtgtatggggaggttgtagtatttattatagcattttaaataagggtaattcattttttattaaagtcattttcacgttaagttcctatttttgtatgttctactcttaagttatataacacagttccttttttaaaagagttcatttgttgaagtgctagtgaaaaattaatgttattaaatagtttgcaaatgactatttataccagtatgcatataatttttaaatatttgtaatgtgagatgttgaatgaataaaacttttaactcag

SEQ ID NO: 5904 - protein, 729 aa, Homo sapiens
MGDYGFGVLVQSNTGNKSAFPVRFHPHLQPPHHHQNATPSPAAFINNNTAANGSSAGSAWLFPAPATHNIQDEILGSEKAKSQQQEQQDPLEKQQLSPSPGQEAGILPETEKAKSEENQGDNSSENGNGKEKIRIESPVLTGFDYQEATGLGTSTQPLTSSASSLTGFSNWSAAIAPSSSTIINEDASFFHQGGVPAASANNGALLFQNFPHHVSPGFGGSFSPQIGPLSQHHPHHPHFQHHHSQHQQQRRSPASPHPPPFTHRNAAFNQLPHLANNLNKPPSPWSSYQSPSPTPSSSWSPGGGGYGGWGGSQGRDHRRGLNGGITPLNSISPLKKNFASNHIQLQKYARPSSAFAPKSWMEDSLNRADNIFPFPDRPRTFDMHSLESSLIDIMRAENDTIKGRLNYSYPGSDSSLLINARTYGRRRGQSSLFPMEDGFLDDGRGDQPLHSGLGSPHCFSHQNGERVERYSRKVFVGGLPPDIDEDEITASFRRFGPLIVDWPHKAESKSYFPPKGYAFLLFQDESSVQALIDACIEEDGKLYLCVSSPTIKDKPVQIRPWNLSDSDFVMDGSQPLDPRKTIFVGGVPRPLRAVELAMIMDRLYGGVCYAGIDTDPELKYPKGAGRVAFSNQQSYIAAISARFVQLQHGEIDKRVEVKPYVLDDQLCDECQGARCGGKFAPFFCANVTCLQYYCEYCWAAIHSRAGREFHKPLVKEGGDRPRHISFRWN

SEQ ID NO: 5905 - DNA, 7317 bp, Homo sapiens
ggaactgaacaaaccgcccctgggtcccatgagggaaaaaaaccccggagccgcagagaggggaagaggcagaaaccgcaggaccttccaggtcgccccctcggtccccgcacccccaggccgcccgctcaccctcgtcgagtctcgctaatccctcctgatcgcgacccccgcaagagggagaaacgggtgtttccaacccctttcatgggggagaggaagccgcggggagcccaggaacagcgaccgcagcaagatctgcacccggagcctcaggaacagccccagaggccaaaactgcaccctgcgaaagagcagaaaacaggaccaggaacagcagaaacctccctgcaatcatctttccattagtcaatgctgatttcctctcccgaaaccaggaattcacttcccaccccagataacctaatataatctatatatataaatatataatatataatgttcttaaattattcctgatttttttttaaccaagctgccaagaaaagaacgtattcccctcttagtcctattctaatttttatgtgagtgaatctaaactgctgaggaaaaccatatgtgattgttaaattatatatatctatatttttactccgcgcaaggcttattcttctacatccatagatgcttgagaagctctgtttttgtcattcatgtacattttcctttggaaaaagaaagcgcctattttactaaccaaagacttgatttttaccctcttcatttttattccctcctaaaaataagcccaattggatccaagtcaatgttttaagagatttttttaagagttgttttttctttcagagaccagaattccaaatcagaacaatttaaggtgataagctgcgatctttgagctagctataaataagacatttcaagcaagcaagcaaacaacttaaatttggggtagaggaaaaaaaaggcgtgagacatcaggttgtcattttttattgtgagattctgctcctaaagataataaatgggggattacgggtttggagtgctagtgcaaagcaatactgggaataaatctgcttttccagtcagattccatccacatctgcagcctccacaccatcaccaaaatgccacccccagccctgctgcttttataaataataacacagctgccaatggcagcagtgctgggtcagcttggctttttcctgctccagctacccataacattcaggatgagatcttggggtcagaaaaagcaaaaagtcagcaacaggaacagcaagaccccttagaaaagcagcagctttccccaagtccaggtcaggaagctggaatactgcctgaaacagagaaggcaaaatcagaagaaaatcaaggggacaattcttcggaaaatggcaatgggaaggagaaaataaggatcgaatctccagtgttgacagggtttgattatcaagaagccactgggctaggtacttcaacccaacccttgacatctagcgcatcgtctcttactggtttcagtaactggtcagcagcgatagcgccttcctcctctacaataatcaatgaagatgcaagtttctttcaccagggaggggtccctgctgcttcggctaataacggtgctctgttgtttcaaaatttcccccatcatgtcagccctggctttggaggcagcttctctcctcagatcgggcctctctcacagcaccacccacatcaccctcatttccagcatcatcacagccagcatcagcagcaaaggaggtctcctgccagtccccatcccccacccttcacacatagaaatgctgcttttaaccagctgcctcatttggcgaataatcttaacaaacccccctctccgtggagcagctaccagagtccgtcaccaacaccctcctcttcctggagcccgggcggtggtggatatggtggctggggaggttcccaaggccgagatcaccgcagagggctgaatggtggaataacgcccctgaactccatctcgcctttgaagaaaaattttgcaagcaatcatattcagctccagaagtatgctcgccccagctctgcctttgcacctaaatcctggatggaagatagcttgaacagggctgacaacatttttccttttccggatcgccccaggacattcgacatgcactcactggagagttcactcattgacataatgagagctgaaaatgataccattaaagcaaggacatatgggcgaaggagaggtcagtcttcactgtttccaatggaagatggattcttggatgatggccgtggggatcagcctcttcatagtggcctgggttcacctcactgcttcagtcaccagaatggggaaagagtggaacgatattctcgaaaggtgtttgtaggcggattgcctccagacattgatgaagatgagatcacagctagttttcgtcgctttggccctctgattgtggattggcctcataaagctgagagcaaatcctattttcctcctaaaggctatgcattcctgctgtttcaagatgaaagctctgtgcaggctctcattgatgcatgcattgaagaagatggaaaactctacctttgtgtatcaagtcccactatcaaggataagccagtccagattcggccttggaatctcagtgacagtgactttgtgatggatggttcacagccacttgacccacgaaaaactatatttgttggtggtgttcctcgaccattacgagctgtggagcttgcgatgataatggatcggctatatggaggtgtgtgctacgctgggattgataccgaccctgagctaaaatacccaaaaggagctgggagagttgcgttctctaatcaacagagttacatagctgctatcagtgcccgctttgttcagctgcagcatggagagatagataaacgggtggaagttaagccatatgtcttggatgatcagctgtgtgatgaatgtcagggggcccgttgtggggggaaatttgctccatttttctgtgctaatgttacctgtctgcagtattactgtgaatattgctgggctgctatccattctcgtgctggcagggaattccacaagcccctggtgaaggaaggcggtgaccgccctcggcatatttcattccgctggaactaaaggataactgcagtgctcattttcaggcctcagaataagtgcactcttctgttcattctgaccccttcctcaacctcttcacgctggcatgtccttttgtagcagtctgtaacttaactatagtataatgaaaagaatgacctataatataggtgttttgtagattcttgtgtcactgcaaacaatatgaactcctttttcgtattgccatcgggttgcatggaagttttattctcttgttttgctggaaaccaagaggatccaaacttcctgcaacattttcttagaggagagagagaaatattaaaagagaaatgaaacaatagagtattttgggtttttaattaaattattgttaataatataacatataagaatacttttattaaaataaccatgcaacaataacactatcggtctatctgacagtttttcccccagggaagtgcttttgccttttcctttcttttttttttttttttcatcttttttgtctctctcttttttccatccctttttaatttttttaacagcaatggaggaagttaacaatttttaatggaaagagcatgttagagcaaacaaatgcataagcaagactgagcagcattataattaattttcagggttttgaggctgaacataatttcattatccctcaaaaagttaccaccacatcagaaaaaataaaaaaaaaatagtaaagtaggcagagctaggtttattttctcttaaacaatttttaaaattcagaatgtaaaaattgggtaaatttactactgaggggagtgcacttatttatttaacttacttatctggtcaaagccccaggaaacctaccaaagctagaattaatgacaactggtgggaaacctagcatttcctctcctgaagaataaatgtataaatgttatttttgatgtttatatataaactctatatcctaatttactaatactcatcagatgtcagcctttgctctccattttgacgttaaaaaacaacaacagatctagagatacctcaaggatatcatttttgattttgtgttacagtacacttgtagccaaaactggaagacaaaaccaatatataatttggctgctgattggcttacttttagatttaaagttactttgggtatcctgtaatttagttgtaacatagaaaatgaaaaaacagttaaaaaaagtgaagtagttgcaaagtgttttgcactgttgaactaagtaactgtgtaaatctgtgcaaaggtacgtatgtttatcttactcttcctataaactaaaataacattacagtttccgaatttagcatgggacatagtcagtgtttgaagtgccaacttcatcaagtaatgcatgctttattataaataaaattctagctttgaaaggcgttatgtgttgaacagtatgcttcaggggtaaatttaaaatagtctcttgaagccctagtcatggaagtaacttttattttaattgacattctcttattaaatgccctatccatcattaaaaggtttattatcagtgggcaaaacatgaaataatatgatcgaatggcaatcttgctagttgcgctacctaacagtaccatcttggatccttcaaaaccaaagacttgccccagcactgctgtggaaccacctggcttatgacccctatggatgatctttaggaaaagcagccctttacttttaatacaggctttaatgaactatacctgttaagttccaaaggtcaaaatggaggcatttgctgtctaatattcaaacatagaaagggagctgcttttaaagaattccctgcaaatactgaaagcagtcatgcgaatggagggtgctcttgtgtagctggtcagggacttttttttcttttctcctgaactacatgattctaattggaatgttcatttgcctctttttactcttttaaatgcttgtaggtggcttggggtgtgctatcgtgctgttcctactcagtaaacaggtgtgatgagttaacaagaaataacactgtttgagaactagctttgaataataatttttccctttgtacatgacctgctgaatttcggtacagtgtttttgtagctaacttattttgtcatgcacataatgtatatttgttatgcactacttttgtatatcttgtttttccaacagtgaacatttttaggcacacttttcactgacgggatatctctttatgcaatacctcaatttttcatattgcaaagagtagctttttgtacttttattactgagagatcttcatatacttcattttttaatataaataattttaataaattttattttcttatattctgctttttatacatttcagtgctctgcatacattttaaattatgaatgtcgtgcactggcaatgctattttagagtctgcagagaagagaaagcatgttgcttaaacatccttccccagcaccagctattggtgtacctataatttaagaaatagtctatgtaaagtcacaaattaatgaaaaaaattcgcatgaaaatgacagataacactgtagttcctaaaaaaaaaattaaatgcataagcataaggtagaaattaaaataacaaaattgtctacagcttcttactaagtttttaaaattattcataaaatgcagacatttttggtgaatgtttagccatttttaatattaataaattgatgttaagtgtttgattcagagatgtctgctcttttaaattatatataaggaaaaaaaatagcctgccttgggacaggtgtgtaatgttagtgtgcatgactaatgtaagaaattgttattctactaatatttacttgtgattgtgtgacaagtgtgtttacagattattggttacacttcaatttacagggcataaacaatgattatctattactctgaactttatgattacatgttcttcagattacatgggattgtagttgggagttaccatgtaactcaaacataattaacatgtaattagtttacagattgtagggcatcacttcaattcaccaagcatgtagttctagcgcactagcatggcgccagccatgtacttacaatgtagttacagagtaattacatggtgatttttgcaatgtaaaataaagtgtttctgattattttctatgtaaaggaaccctctcctttccccttctggtccctgcgctttggtataatatatatacttctccatacacagacctctgcagaatgcaaaataaaacttgcagtgaatgaatttagcattttatgagagtgctgttggaaagacttgataattcaccccttttgttttgaagagttgaatcttctgttaaaaggtgatttaaaacttgaatgtgatgaattgtggcaagttaacttcaagttatgtgcaatacttatttcaaacttttgaaagatctttgcagtgtaattctttgtttttaattgcagacatttaaaaatgtcattttctactgttaagagtaatcctctttcttgctggtgtttctaaagaaaagaatcagaaatcaatctttctactaatgtaaatttgagattatttttaaaaatggaataaaagaggttttggtcatttgctttattttattattttaaagctactgtgattgatagcattgtaagaatcgggacaatattgtattcaactgttttattttttatatttttaaaatttaaagtataattagtttttataattttcatcagatttttgttatattttttggaagtgaaacttttagcaagtgggtgtctagtttttactaatccctaattttttttccagtgtattgctcatattatcagaaggaaaagttatttaagtatgtcagttaattgtactacttggctgaatttccatatagtttttactgtgtatggggaggttgtagtatttattatagcattttaaataagggtaattcattttttattaaagtcattttcacgttaagttcctatttttgtatgttctactcttaagttatataacacagttccttttttaaaagagttcatttgttgaagtgctagtgaaaaattaatgttattaaatagtttgcaaatgactatttataccagtatgcatataatttttaaatatttgtaatgtgagatgttgaatgaataaaacttttaactcag

SEQ ID NO: 5906 - protein, 712 aa, Homo sapiens
MGDYGFGVLVQSNTGNKSAFPVRFHPHLQPPHHHQNATPSPAAFINNNTAANGSSAGSAWLFPAPATHNIQDEILGSEKAKSQQQEQQDPLEKQQLSPSPGQEAGILPETEKAKSEENQGDNSSENGNGKEKIRIESPVLTGFDYQEATGLGTSTQPLTSSASSLTGFSNWSAAIAPSSSTIINEDASFFHQGGVPAASANNGALLFQNFPHHVSPGFGGSFSPQIGPLSQHHPHHPHFQHHHSQHQQQRRSPASPHPPPFTHRNAAFNQLPHLANNLNKPPSPWSSYQSPSPTPSSSWSPGGGGYGGWGGSQGRDHRRGLNGGITPLNSISPLKKNFASNHIQLQKYARPSSAFAPKSWMEDSLNRADNIFPFPDRPRTFDMHSLESSLIDIMRAENDTIKARTYGRRRGQSSLFPMEDGFLDDGRGDQPLHSGLGSPHCFSHQNGERVERYSRKVFVGGLPPDIDEDEITASFRRFGPLIVDWPHKAESKSYFPPKGYAFLLFQDESSVQALIDACIEEDGKLYLCVSSPTIKDKPVQIRPWNLSDSDFVMDGSQPLDPRKTIFVGGVPRPLRAVELAMIMDRLYGGVCYAGIDTDPELKYPKGAGRVAFSNQQSYIAAISARFVQLQHGEIDKRVEVKPYVLDDQLCDECQGARCGGKFAPFFCANVTCLQYYCEYCWAAIHSRAGREFHKPLVKEGGDRPRHISFRWN

SEQ ID NO: 5907 - DNA, 7986 bp, Homo sapiens
ggaactgaacaaaccgcccctgggtcccatgagggaaaaaaaccccggagccgcagagaggggaagaggcagaaaccgcaggaccttccaggtcgccccctcggtccccgcacccccaggccgcccgctcaccctcgtcgagtctcgctaatccctcctgatcgcgacccccgcaagagggagaaacgggtgtttccaacccctttcatgggggagaggaagccgcggggagcccaggaacagcgaccgcagcaagatctgcacccggagcctcaggaacagccccagaggccaaaactgcaccctgcgaaagagcagaaaacaggaccaggaacagcagaaacctccctgcaatcatctttccattagtcaatgctgatttcctctcccgaaaccaggaattcacttcccaccccagataacctaatataatctatatatataaatatataatatataatgttcttaaattattcctgatttttttttaaccaagctgccaagaaaagaacgtattcccctcttagtcctattctaatttttatgtgagtgaatctaaactgctgaggaaaaccatatgtgattgttaaattatatatatctatatttttactccgcgcaaggcttattcttctacatccatagatgcttgagaagctctgtttttgtcattcatgtacattttcctttggaaaaagaaagcgcctattttactaaccaaagacttgatttttaccctcttcatttttattccctcctaaaaataagcccaattggatccaagtcaatgttttaagagatttttttaagagttgttttttctttcagagaccagaattccaaatcagaacaatttaaggtgataagctgcgatctttgagctagctataaataagacatttcaagcaagcaagcaaacaacttaaatttggggtagaggaaaaaaaaggcgtgagacatcaggttgtcattttttattgtgagattctgctcctaaagataataaatgggggattacgggtttggagtgctagtgcaaagcaatactgggaataaatctgcttttccagtcagattccatccacatctgcagcctccacaccatcaccaaaatgccacccccagccctgctgcttttataaataataacacagctgccaatggcagcagtgctgggtcagcttggctttttcctgctccagctacccataacattcaggatgagatcttggggtcagaaaaagcaaaaagtcagcaacaggaacagcaagaccccttagaaaagcagcagctttccccaagtccaggtcaggaagctggaatactgcctgaaacagagaaggcaaaatcagaagaaaatcaaggggacaattcttcggaaaatggcaatgggaaggagaaaataaggatcgaatctccagtgttgacagggtttgattatcaagaagccactgggctaggtacttcaacccaacccttgacatctagcgcatcgtctcttactggtttcagtaactggtcagcagcgatagcgccttcctcctctacaataatcaatgaagatgcaagtttctttcaccagggaggggtccctgctgcttcggctaataacggtgctctgttgtttcaaaatttcccccatcatgtcagccctggctttggaggcagcttctctcctcagatcgggcctctctcacagcaccacccacatcaccctcatttccagcatcatcacagccagcatcagcagcaaaggaggtctcctgccagtccccatcccccacccttcacacatagaaatgctgcttttaaccagctgcctcatttggcgaataatcttaacaaacccccctctccgtggagcagctaccagagtccgtcaccaacaccctcctcttcctggagcccgggcggtggtggatatggtggctggggaggttcccaaggccgagatcaccgcagagggctgaatggtggaataacgcccctgaactccatctcgcctttgaagaaaaattttgcaagcaatcatattcagctccagaagtatgctcgccccagctctgcctttgcacctaaatcctggatggaagatagcttgaacagggctgacaacatttttccttttccggatcgccccaggacattcgacatgcactcactggagagttcactcattgacataatgagagctgaaaatgataccattaaagcaaggacatatgggcgaaggagaggtcagtcttcactgtttccaatggaagatggattcttggatgatggccgtggggatcagcctcttcatagtggcctgggttcacctcactgcttcagtcaccagaatggggaaagagtggaacgatattctcgaaaggtgtttgtaggcggattgcctccagacattgatgaagatgagatcacagctagttttcgtcgctttggccctctgattgtggattggcctcataaagctgagagcaaatcctattttcctcctaaaggctatgcattcctgctgtttcaagatgaaagctctgtgcaggctctcattgatgcatgcattgaagaagatggaaaactctacctttgtgtatcaagtcccactatcaaggataagccagtccagattcggccttggaatctcagtgacagtgactttgtgatggatggttcacagccacttgacccacgaaaaactatatttgttggtggtgttcctcgaccattacgagctgtggagcttgcgatgataatggatcggctatatggaggtgtgtgctacgctgggattgataccgaccctgagctaaaatacccaaaaggagctgggagagttgcgttctctaatcaacagagttacatagctgctatcagtgcccgctttgttcagctgcagcatggagagatagataaacgggtggaagttaagccatatgtcttggatgatcagctgtgtgatgaatgtcagggggcccgttgtggggggaaatttgctccatttttctgtgctaatgttacctgtctgcagtattactgtgaatattgctgggctgctatccattctcgtgctggcagggaattccacaagcccctggtgaaggaaggcggtgaccgccctcggcatatttcattccgctggaactaaaggataactgcagtgctcattttcaggcctcagaataagtgcactcttctgttcattctgaccccttcctcaacctcttcacgctggcatgtccttttgtagcagtctgtaacttaactatagtataatgaaaagaatgacctataatataggtgttttgtagattcttgtgtcactgcaaacaatatgaactcctttttcgtattgccatcgggttgcatggaagttttattctcttgttttgctggaaaccaagaggatccaaacttcctgcaacattttcttagaggagagagagaaatattaaaagagaaatgaaacaatagagtattttgggtttttaattaaattattgttaataatataacatataagaatacttttattaaaataaccatgcaacaataacactatcggtctatctgacagtttttcccccagggaagtgcttttgccttttcctttcttttttttttttttttcatcttttttgtctctctcttttttccatccctttttaatttttttaacagcaatggaggaagttaacaatttttaatggaaagagcatgttagagcaaacaaatgcataagcaagactgagcagcattataattaattttcagggttttgaggctgaacataatttcattatccctcaaaaagttaccaccacatcagaaaaaataaaaaaaaaatagtaaagtaggcagagctaggtttattttctcttaaacaatttttaaaattcagaatgtaaaaattgggtaaatttactactgaggggagtgcacttatttatttaacttacttatctggtcaaagccccaggaaacctaccaaagctagaattaatgacaactggtgggaaacctagcatttcctctcctgaagaataaatgtataaatgttatttttgatgtttatatataaactctatatcctaatttactaatactcatcagatgtcagcctttgctctccattttgacgttaaaaaacaacaacagatctagagatacctcaaggatatcatttttgattttgtgttacagtacacttgtagccaaaactggaagacaaaaccaatatataatttggctgctgattggcttacttttagatttaaagttactttgggtatcctgtaatttagttgtaacatagaaaatgaaaaaacagttaaaaaaagtgaagtagttgcaaagtgttttgcactgttgaactaagtaactgtgtaaatctgtgcaaaggtacgtatgtttatcttactcttcctataaactaaaataacattacagtttccgaatttagcatgggacatagtcagtgtttgaagtgccaacttcatcaagtaatgcatgctttattataaataaaattctagctttgaaaggcgttatgtgttgaacagtatgcttcaggggtaaatttaaaatagtctcttgaagccctagtcatggaagtaacttttattttaattgacattctcttattaaatgccctatccatcattaaaaggtttattatcagtgggcaaaacatgaaataatatgatcgaatggcaatcttgctagttgcgctacctaacagtaccatcttggatccttcaaaaccaaagacttgccccagcactgctgtggaaccacctggcttatgacccctatggatgatctttaggaaaagcagccctttacttttaatacaggctttaatgaactatacctgttaagttccaaaggtcaaaatggaggcatttgctgtctaatattcaaacatagaaagggagctgcttttaaagaattccctgcaaatactgaaagcagtcatgcgaatggagggtgctcttgtgtagctggtcagggacttttttttcttttctcctgaactacatgattctaattggaatgttcatttgcctctttttactcttttaaatgcttgtaggtggcttggggtgtgctatcgtgctgttcctactcagtaaacaggtgtgatgagttaacaagaaataacactgtttgagaactagctttgaataataatttttccctttgtacatgacctgctgaatttcggtacagtgtttttgtagctaacttattttgtcatgcacataatgtatatttgttatgcactacttttgtatatcttgtttttccaacagtgaacatttttaggcacacttttcactgacgggatatctctttatgcaatacctcaatttttcatattgcaaagagtagctttttgtacttttattactgagagatcttcatatacttcattttttaatataaataattttaataaattttattttcttatattctgctttttatacatttcagtgctctgcatacattttaaattatgaatgtcgtgcactggcaatgctattttagagtctgcagagaagagaaagcatgttgcttaaacatccttccccagcaccagctattggtgtacctataatttaagaaatagtctatgtaaagtcacaaattaatgaaaaaaattcgcatgaaaatgacagataacactgtagttcctaaaaaaaaaattaaatgcataagcataaggtagaaattaaaataacaaaattgtctacagcttcttactaagtttttaaaattattcataaaatgcagacatttttggtgaatgtttagccatttttaatattaataaattgatgttaagtgtttgattcagagatgtctgctcttttaaattatatataaggaaaaaaaatagcctgccttgggacaggtgtgtaatgttagtgtgcatgactaatgtaagaaattgttattctactaatatttacttgtgattgtgtgacaagtgtgtttacagattattggttacacttcaatttacagggcataaacaatgattatctattactctgaactttatgattacatgttcttcagattacatgggattgtagttgggagttaccatgtaactcaaacataattaacatgtaattagtttacagattgtagggcatcacttcaattcaccaagcatgtagttctagcgcactagcatggcgccagccatgtacttacaatgtagttacagagtaattacatggtgatttttgcaatgtaaaataaagtgtttctgattattttctatgtaaaggaaccctctcctttccccttctggtccctgcgctttggtataatatatatacttctccatacacagacctctgcagaatgcaaaataaaacttgcagtgaatgaatttagcattttatgagagtgctgttggaaagacttgataattcaccccttttgttttgaagagttgaatcttctgttaaaaggtgatttaaaacttgaatgtgatgaattgtggcaagttaacttcaagttatgtgcaatacttatttcaaacttttgaaagatctttgcagtgtaattctttgtttttaattgcagacatttaaaaatgtcattttctactgttaagagtaatcctctttcttgctggtgtttctaaagaaaagaatcagaaatcaatctttctactaatgtaaatttgagattatttttaaaaatggaataaaagaggttttggtcatttgctttattttattattttaaagctactgtgattgatagcattgtaagaatcgggacaatattgtattcaactgttttattttttatatttttaaaatttaaagtataattagtttttataattttcatcagatttttgttatattttttggaagtgaaacttttagcaagtgggtgtctagtttttactaatccctaattttttttccagtgtattgctcatattatcagaaggaaaagttatttaagtatgtcagttaattgtactacttggctgaatttccatatagtttttactgtgtatggggaggttgtagtatttattatagcattttaaataagggtaattcattttttattaaagtcattttcacgttaagttcctatttttgtatgttctactcttaagttatataacacagttccttttttaaaagagttcatttgttgaagtgctagtgaaaaattaatgttattaaatagtttgcaaatgactatttataccagtatgcatataatttttaaatatttgtaatgtgagatgttgaatgaataaaacttttaactcagatttcttttaatatacttatttctttttaacacaagtagatgatgctttcttgactgggaatgtaacattttaaaatattaggaatatactgttcagctaatgcagcacaaaccaataggaaaaaatcttcagtcatataagtactgtggccagtgtgcattcttatgtaagcctataagcgtcggtgggtggttgtgtctttggcctgtactgttagttcacctgctgcctgccctgcagagttctttttatttgtagccttcaatatgtatacagggagtaagcccaggatctaagcattcagttatcagttgaaggccaaatgcccaacaaaagtgaaaaacccaatgtttagttaataatgaaagtccgtatctgggaggttcagttttgagtctttgtcaatgaatagtcttgatttgtggccacactaccaaagggcttgaaaacaagtctcttttgacttccaattcccagttcctccatagaccttaatgtcataggatacggtgtgtgggattataatctctatggcatgtcaattgaaaatattatctttgatttgatccattaatcatgtggactaccaagtgctgtaatgtgttagtatttatattttaaactgcattctcaaacttttaacataaggatttattataacaaaatat

SEQ ID NO: 5908 - protein, 712 aa, Homo sapiens; identical to SEQ ID NO: 5906

SEQ ID NO: 5909 - DNA, 925 bp, Homo sapiens
tttaaccagctgcctcatttggcgaataatcttaacaaacccccctctccgtggagcagctaccagagtccgtcaccaacaccctcctcttcctggagcccgggcggtggtggatatggtggctggggaggttcccaaggccgagatcaccgcagagggctgaatggtggaataacgcccctgaactccatctcgcctttgaagaaaaattttgcaagcaatcatattcagctccagaagtatgctcgccccagctctgcctttgcacctaaatcctggatggaagatagcttgaacagggctgacaacatttttccttttccggtctgaacagcctgaattgatggacttggcaattcctcttaaacctctgcaaattttggcctacctttcatcagtaaggactatctagtgagagaaatgatctaaatgttttcttcatccccatttatttttgaacactgtgaaactgttcatctcagagtgactctttatgcctttcacccgtttgtttattttccaatgttaacattgaagatgtagataattaaaccattcctaaaaatagatccaggcaaagatcatttgtctttcttgctaccagaatatctttattctggcaagagtcattgatgtttttgaattaatgagcagcaagttaggttgatatgaactagataaagggaatttcataggtggttgaacgtcagatgctccactaaatgtatatactttgagggtatgattatatgtgtttaggaaatttataaggggtaagaatctagcattgaatctagttttcccaacaacctcacaagatgagttctgttattatccccattttacagatgcagaaattgaatatgagaaatatataataacttagccaagggtacacagctggtcagagtacaaattctaagtt

SEQ ID NO: 5910 - protein, 37 aa, Homo sapiens
MFSSSPFIFEHCETVHLRVTLYAFHPFVYFPMLTLKM

SEQ ID NO: 5911 - DNA, 621 bp, Homo sapiens
tttaaccagctgcctcatttggcgaataatcttaacaaacccccctctccgtggagcagctaccagagtccgtcaccaacaccctcctcttcctggagcccgggcggtggtggatatggtggctggggaggttcccaaggccgagatcaccgcagagggctgaatggtggaataacgcccctgaactccatctcgcctttgaagaaaaattttgcaagcaatcatattcagctccagaagtatgctcgccccagctctgcctttgcacctaaatcctggatggaagatagcttgaacagggctgacaacatttttccttttccggatcgccccaggacattcgacatgcactcactggagagttcactcattgacataatgagagctgaaaatgataccattaaaggtaagtttagaaatatacccaattgatttcagacaatagttttaaatgtgtattaactatttaatctgatacacagtatggcaaatattatggagtcactttgtatgcagtaagttctatcaattttacacatatacctcttgttgttaaaaaatccaacatacttgatgaacctctatagtggagccatcgtgataccaggtaagagtactacg

SEQ ID NO: 5912 - protein, 50 aa, Homo sapiens
MEDSLNRADNIFPFPDRPRTFDMHSLESSLIDIMRAENDTIKGKFRNIPN

SEQ ID NO: 5913 - DNA, 1471 bp, Homo sapiens
gagagctagcagtggggtgatttgaaagtcacaagagaaataaatgatttgaaaaaaatctctatgacaagaaactcctaattgggttttgaaaaagtctaaagaagatcgccccaggacattcgacatgcactcactggagagttcactcattgacataatgagagctgaaaatgataccattaaaggtcagtcttcactgtttccaatggaagatggattcttggatgatggccgtggggatcagcctcttcatagtggcctgggttcacctcactgcttcagtcaccagaatggggaaagagtggaacgatattctcgaaaggtgtttgtaggcggattgcctccagacattgatgaagatgagatcacagctagttttcgtcgctttggccctctgattgtggattggcctcataaagctgagagcaaatcctattttcctcctaaaggctatgcattcctgctgtttcaagatgaaagctctgtgcaggctctcattgatgcatgcattgaagaagatggaaaactctacctttgtgtatcaagtcccactatcaaggataagccagtccagattcggccttggaatctcagtgacagtgactttgtgatggatggttcacagccacttgacccacgaaaaactatatttgttggtggtgttcctcgaccattacgagctgtggagcttgcgatgataatggatcggctatatggaggtgtgtgctacgctgggattgataccgaccctgagctaaaatacccaaaaggagctgggagagttgcgttctctaatcaacagagttacatagctgctatcagtgcccgctttgttcagctgcagcatggagagatagataaacgggtggaagttaagccatatgtcttggatgatcagctgtgtgatgaatgtcagggggcccgttgtggggggaaatttgctccatttttctgtgctaatgttacctgtctgcagtattactgtgaatattgctgggctgctatccattctcgtgctggcagggaattccacaagcccctggtgaaggaaggcggtgaccgccctcggcatatttcattccgctggaactaaaggataactgcagtgctcattttcaggcctcagaataagtgcactcttctgttcattctgaccccttcctcaacctcttcacgctggcatgtccttttgtagcagtctgtaacttaactatagtataatgaaaagaatgacctataatataggtgttttgtagattcttgtgtcactgcaaacaatatgaactcctttttcgtattgccatcgggttgcatggaagttttattctcttgttttgctggaaaccaagaggatccaaacttcctgcaacattttcttagaggagagagagaaatattaaaagagaaatgaaacaatagagtattttgggtttttaattaaattattgttaataatataacatataag

SEQ ID NO: 5914 - protein, 322 aa, Homo sapiens
MHSLESSLIDIMRAENDTIKGQSSLFPMEDGFLDDGRGDQPLHSGLGSPHCFSHQNGERVERYSRKVFVGGLPPDIDEDEITASFRRFGPLIVDWPHKAESKSYFPPKGYAFLLFQDESSVQALIDACIEEDGKLYLCVSSPTIKDKPVQIRPWNLSDSDFVMDGSQPLDPRKTIFVGGVPRPLRAVELAMIMDRLYGGVCYAGIDTDPELKYPKGAGRVAFSNQQSYIAAISARFVQLQHGEIDKRVEVKPYVLDDQLCDECQGARCGGKFAPFFCANVTCLQYYCEYCWAAIHSRAGREFHKPLVKEGGDRPRHISFRWN

SEQ ID NO: 5915 - DNA, 4695 bp, Homo sapiens
gagagctagcagtggggtgatttgaaagtcacaagagaaataaatgatttgaaaaaaatctctatgacaagaaactcctaattgggttttgaaaaagtctaaagaagatcgccccaggacattcgacatgcactcactggagagttcactcattgacataatgagagctgaaaatgataccattaaaggtcagtcttcactgtttccaatggaagatggattcttggatgatggccgtggggatcagcctcttcatagtggcctgggttcacctcactgcttcagtcaccagaatggggaaagagtggaacgatattctcgaaaggtgtttgtaggcggattgcctccagacattgatgaagatgagatcacagctagttttcgtcgctttggccctctgattgtggattggcctcataaagctgagagcaaatcctattttcctcctaaaggctatgcattcctgctgtttcaagatgaaagctctgtgcaggctctcattgatgcatgcattgaagaagatggaaaactctacctttgtgtatcaagtcccactatcaaggataagccagtccagattcggccttggaatctcagtgacagtgactttgtgatggatggttcacagccacttgacccacgaaaaactatatttgttggtggtgttcctcgaccattacgagctgtggagcttgcgatgataatggatcggctatatggaggtgtgtgctacgctgggattgataccgaccctgagctaaaatacccaaaaggagctgggagagttgcgttctctaatcaacagagttacatagctgctatcagtgcccgctttgttcagctgcagcatggagagatagataaacgggtggaagttaagccatatgtcttggatgatcagctgtgtgatgaatgtcagggggcccgttgtggggggaaatttgctccatttttctgtgctaatgttacctgtctgcagtattactgtgaatattgctgggctgctatccattctcgtgctggcagggaattccacaagcccctggtgaaggaaggcggtgaccgccctcggcatatttcattccgctggaactaaaggataactgcagtgctcattttcaggcctcagaataagtgcactcttctgttcattctgaccccttcctcaacctcttcacgctggcatgtccttttgtagcagtctgtaacttaactatagtataatgaaaagaatgacctataatataggtgttttgtagattcttgtgtcactgcaaacaatatgaactcctttttcgtattgccatcgggttgcatggaagttttattctcttgttttgctggaaaccaagaggatccaaacttcctgcaacattttcttagaggagagagagaaatattaaaagagaaatgaaacaatagagtattttgggtttttaattaaattattgttaataatataacatataagaatacttttattaaaataaccatgcaacaataacactatcggtctatctgacagtttttcccccagggaagtgcttttgccttttcctttcttttttttttttttttcatcttttttgtctctctcttttttccatccctttttaatttttttaacagcaatggaggaagttaacaatttttaatggaaagagcatgttagagcaaacaaatgcataagcaagactgagcagcattataattaattttcagggttttgaggctgaacataatttcattatccctcaaaaagttaccaccacatcagaaaaaataaaaaaaaaatagtaaagtaggcagagctaggtttattttctcttaaacaatttttaaaattcagaatgtaaaaattgggtaaatttactactgaggggagtgcacttatttatttaacttacttatctggtcaaagccccaggaaacctaccaaagctagaattaatgacaactggtgggaaacctagcatttcctctcctgaagaataaatgtataaatgttatttttgatgtttatatataaactctatatcctaatttactaatactcatcagatgtcagcctttgctctccattttgacgttaaaaaacaacaacagatctagagatacctcaaggatatcatttttgattttgtgttacagtacacttgtagccaaaactggaagacaaaaccaatatataatttggctgctgattggcttacttttagatttaaagttactttgggtatcctgtaatttagttgtaacatagaaaatgaaaaaacagttaaaaaaagtgaagtagttgcaaagtgttttgcactgttgaactaagtaactgtgtaaatctgtgcaaaggtacgtatgtttatcttactcttcctataaactaaaataacattacagtttccgaatttagcatgggacatagtcagtgtttgaagtgccaacttcatcaagtaatgcatgctttattataaataaaattctagctttgaaaggcgttatgtgttgaacagtatgcttcaggggtaaatttaaaatagtctcttgaagccctagtcatggaagtaacttttattttaattgacattctcttattaaatgccctatccatcattaaaaggtttattatcagtgggcaaaacatgaaataatatgatcgaatggcaatcttgctagttgcgctacctaacagtaccatcttggatccttcaaaaccaaagacttgccccagcactgctgtggaaccacctggcttatgacccctatggatgatctttaggaaaagcagccctttacttttaatacaggctttaatgaactatacctgttaagttccaaaggtcaaaatggaggcatttgctgtctaatattcaaacatagaaagggagctgcttttaaagaattccctgcaaatactgaaagcagtcatgcgaatggagggtgctcttgtgtagctggtcagggacttttttttcttttctcctgaactacatgattctaattggaatgttcatttgcctctttttactcttttaaatgcttgtaggtggcttggggtgtgctatcgtgctgttcctactcagtaaacaggtgtgatgagttaacaagaaataacactgtttgagaactagctttgaataataatttttccctttgtacatgacctgctgaatttcggtacagtgtttttgtagctaacttattttgtcatgcacataatgtatatttgttatgcactacttttgtatatcttgtttttccaacagtgaacatttttaggcacacttttcactgacgggatatctctttatgcaatacctcaatttttcatattgcaaagagtagctttttgtacttttattactgagagatcttcatatacttcattttttaatataaataattttaataaattttattttcttatattctgctttttatacatttcagtgctctgcatacattttaaattatgaatgtcgtgcactggcaatgctattttagagtctgcagagaagagaaagcatgttgcttaaacatccttccccagcaccagctattggtgtacctataatttaagaaatagtctatgtaaagtcacaaattaatgaaaaaaattcgcatgaaaatgacagataacactgtagttcctaaaaaaaaaattaaatgcataagcataaggtagaaattaaaataacaaaattgtctacagcttcttactaagtttttaaaattattcataaaatgcagacatttttggtgaatgtttagccatttttaatattaataaattgatgttaagtgtttgattcagagatgtctgctcttttaaattatatataaggaaaaaaaatagcctgccttgggacaggtgtgtaatgttagtgtgcatgactaatgtaagaaattgttattctactaatatttacttgtgattgtgtgacaagtgtgtttacagattattggttacacttcaatttacagggcataaacaatgattatctattactctgaactttatgattacatgttcttcagattacatgggattgtagttgggagttaccatgtaactcaaacataattaacatgtaattagtttacagattgtagggcatcacttcaattcaccaagcatgtagttctagcgcactagcatggcgccagccatgtacttacaatgtagttacagagtaattacatggtgatttttgcaatgtaaaataaagtgtttctgattattttctatgtaaaggaaccctctcctttccccttctggtccctgcgctttggtataatatatatacttctccatacacagacctctgcagaatgcaaaataaaacttgcagtgaatgaatttagcattttatgagagtgctgttggaaagacttgataattcaccccttttgttttgaagagttgaatcttctgttaaaaggtgatttaaaacttgaatgtgatgaattgtggcaagttaacttcaagttatgtgcaatacttatttcaaacttttgaaagatctttgcagtgtaattctttgtttttaattgcagacatttaaaaatgtcattttctactgttaagagtaatcctctttcttgctggtgtttctaaagaaaagaatcagaaatcaatctttctactaatgtaaatttgagattatttttaaaaatggaataaaagaggttttggtc

SEQ ID NO: 5916 - protein, 322 aa, Homo sapiens; identical to SEQ ID NO: 5914

SEQ ID NO: 5917 - DNA, 5268 bp, Homo sapiens
gagagctagcagtggggtgatttgaaagtcacaagagaaataaatgatttgaaaaaaatctctatgacaagaaactcctaattgggttttgaaaaagtctaaagaagatcgccccaggacattcgacatgcactcactggagagttcactcattgacataatgagagctgaaaatgataccattaaaggtcagtcttcactgtttccaatggaagatggattcttggatgatggccgtggggatcagcctcttcatagtggcctgggttcacctcactgcttcagtcaccagaatggggaaagagtggaacgatattctcgaaaggtgtttgtaggcggattgcctccagacattgatgaagatgagatcacagctagttttcgtcgctttggccctctgattgtggattggcctcataaagctgagagcaaatcctattttcctcctaaaggctatgcattcctgctgtttcaagatgaaagctctgtgcaggctctcattgatgcatgcattgaagaagatggaaaactctacctttgtgtatcaagtcccactatcaaggataagccagtccagattcggccttggaatctcagtgacagtgactttgtgatggatggttcacagccacttgacccacgaaaaactatatttgttggtggtgttcctcgaccattacgagctgtggagcttgcgatgataatggatcggctatatggaggtgtgtgctacgctgggattgataccgaccctgagctaaaatacccaaaaggagctgggagagttgcgttctctaatcaacagagttacatagctgctatcagtgcccgctttgttcagctgcagcatggagagatagataaacgggtggaagttaagccatatgtcttggatgatcagctgtgtgatgaatgtcagggggcccgttgtggggggaaatttgctccatttttctgtgctaatgttacctgtctgcagtattactgtgaatattgctgggctgctatccattctcgtgctggcagggaattccacaagcccctggtgaaggaaggcggtgaccgccctcggcatatttcattccgctggaactaaaggataactgcagtgctcattttcaggcctcagaataagtgcactcttctgttcattctgaccccttcctcaacctcttcacgctggcatgtccttttgtagcagtctgtaacttaactatagtataatgaaaagaatgacctataatataggtgttttgtagattcttgtgtcactgcaaacaatatgaactcctttttcgtattgccatcgggttgcatggaagttttattctcttgttttgctggaaaccaagaggatccaaacttcctgcaacattttcttagaggagagagagaaatattaaaagagaaatgaaacaatagagtattttgggtttttaattaaattattgttaataatataacatataagaatacttttattaaaataaccatgcaacaataacactatcggtctatctgacagtttttcccccagggaagtgcttttgccttttcctttcttttttttttttttttcatcttttttgtctctctcttttttccatccctttttaatttttttaacagcaatggaggaagttaacaatttttaatggaaagagcatgttagagcaaacaaatgcataagcaagactgagcagcattataattaattttcagggttttgaggctgaacataatttcattatccctcaaaaagttaccaccacatcagaaaaaataaaaaaaaaatagtaaagtaggcagagctaggtttattttctcttaaacaatttttaaaattcagaatgtaaaaattgggtaaatttactactgaggggagtgcacttatttatttaacttacttatctggtcaaagccccaggaaacctaccaaagctagaattaatgacaactggtgggaaacctagcatttcctctcctgaagaataaatgtataaatgttatttttgatgtttatatataaactctatatcctaatttactaatactcatcagatgtcagcctttgctctccattttgacgttaaaaaacaacaacagatctagagatacctcaaggatatcatttttgattttgtgttacagtacacttgtagccaaaactggaagacaaaaccaatatataatttggctgctgattggcttacttttagatttaaagttactttgggtatcctgtaatttagttgtaacatagaaaatgaaaaaacagttaaaaaaagtgaagtagttgcaaagtgttttgcactgttgaactaagtaactgtgtaaatctgtgcaaaggtacgtatgtttatcttactcttcctataaactaaaataacattacagtttccgaatttagcatgggacatagtcagtgtttgaagtgccaacttcatcaagtaatgcatgctttattataaataaaattctagctttgaaaggcgttatgtgttgaacagtatgcttcaggggtaaatttaaaatagtctcttgaagccctagtcatggaagtaacttttattttaattgacattctcttattaaatgccctatccatcattaaaaggtttattatcagtgggcaaaacatgaaataatatgatcgaatggcaatcttgctagttgcgctacctaacagtaccatcttggatccttcaaaaccaaagacttgccccagcactgctgtggaaccacctggcttatgacccctatggatgatctttaggaaaagcagccctttacttttaatacaggctttaatgaactatacctgttaagttccaaaggtcaaaatggaggcatttgctgtctaatattcaaacatagaaagggagctgcttttaaagaattccctgcaaatactgaaagcagtcatgcgaatggagggtgctcttgtgtagctggtcagggacttttttttcttttctcctgaactacatgattctaattggaatgttcatttgcctctttttactcttttaaatgcttgtaggtggcttggggtgtgctatcgtgctgttcctactcagtaaacaggtgtgatgagttaacaagaaataacactgtttgagaactagctttgaataataatttttccctttgtacatgacctgctgaatttcggtacagtgtttttgtagctaacttattttgtcatgcacataatgtatatttgttatgcactacttttgtatatcttgtttttccaacagtgaacatttttaggcacacttttcactgacgggatatctctttatgcaatacctcaatttttcatattgcaaagagtagctttttgtacttttattactgagagatcttcatatacttcattttttaatataaataattttaataaattttattttcttatattctgctttttatacatttcagtgctctgcatacattttaaattatgaatgtcgtgcactggcaatgctattttagagtctgcagagaagagaaagcatgttgcttaaacatccttccccagcaccagctattggtgtacctataatttaagaaatagtctatgtaaagtcacaaattaatgaaaaaaattcgcatgaaaatgacagataacactgtagttcctaaaaaaaaaattaaatgcataagcataaggtagaaattaaaataacaaaattgtctacagcttcttactaagtttttaaaattattcataaaatgcagacatttttggtgaatgtttagccatttttaatattaataaattgatgttaagtgtttgattcagagatgtctgctcttttaaattatatataaggaaaaaaaatagcctgccttgggacaggtgtgtaatgttagtgtgcatgactaatgtaagaaattgttattctactaatatttacttgtgattgtgtgacaagtgtgtttacagattattggttacacttcaatttacagggcataaacaatgattatctattactctgaactttatgattacatgttcttcagattacatgggattgtagttgggagttaccatgtaactcaaacataattaacatgtaattagtttacagattgtagggcatcacttcaattcaccaagcatgtagttctagcgcactagcatggcgccagccatgtacttacaatgtagttacagagtaattacatggtgatttttgcaatgtaaaataaagtgtttctgattattttctatgtaaaggaaccctctcctttccccttctggtccctgcgctttggtataatatatatacttctccatacacagacctctgcagaatgcaaaataaaacttgcagtgaatgaatttagcattttatgagagtgctgttggaaagacttgataattcaccccttttgttttgaagagttgaatcttctgttaaaaggtgatttaaaacttgaatgtgatgaattgtggcaagttaacttcaagttatgtgcaatacttatttcaaacttttgaaagatctttgcagtgtaattctttgtttttaattgcagacatttaaaaatgtcattttctactgttaagagtaatcctctttcttgctggtgtttctaaagaaaagaatcagaaatcaatctttctactaatgtaaatttgagattatttttaaaaatggaataaaagaggttttggtcatttgctttattttattattttaaagctactgtgattgatagcattgtaagaatcgggacaatattgtattcaactgttttattttttatatttttaaaatttaaagtataattagtttttataattttcatcagatttttgttatattttttggaagtgaaacttttagcaagtgggtgtctagtttttactaatccctaattttttttccagtgtattgctcatattatcagaaggaaaagttatttaagtatgtcagttaattgtactacttggctgaatttccatatagtttttactgtgtatggggaggttgtagtatttattatagcattttaaataagggtaattcattttttattaaagtcattttcacgttaagttcctatttttgtatgttctactcttaagttatataacacagttccttttttaaaagagttcatttgttgaagtgctagtgaaaaattaatgttattaaatagtttgcaaatgactatttataccagtatgcatataatttttaaatatttgtaatgtgagatgttgaatgaataaaacttttaactcag

SEQ ID NO: 5918 - protein, 322 aa, Homo sapiens; identical to SEQ ID NO: 5914

SEQ ID NO: 5919 - DNA, 5937 bp, Homo sapiens
gagagctagcagtggggtgatttgaaagtcacaagagaaataaatgatttgaaaaaaatctctatgacaagaaactcctaattgggttttgaaaaagtctaaagaagatcgccccaggacattcgacatgcactcactggagagttcactcattgacataatgagagctgaaaatgataccattaaaggtcagtcttcactgtttccaatggaagatggattcttggatgatggccgtggggatcagcctcttcatagtggcctgggttcacctcactgcttcagtcaccagaatggggaaagagtggaacgatattctcgaaaggtgtttgtaggcggattgcctccagacattgatgaagatgagatcacagctagttttcgtcgctttggccctctgattgtggattggcctcataaagctgagagcaaatcctattttcctcctaaaggctatgcattcctgctgtttcaagatgaaagctctgtgcaggctctcattgatgcatgcattgaagaagatggaaaactctacctttgtgtatcaagtcccactatcaaggataagccagtccagattcggccttggaatctcagtgacagtgactttgtgatggatggttcacagccacttgacccacgaaaaactatatttgttggtggtgttcctcgaccattacgagctgtggagcttgcgatgataatggatcggctatatggaggtgtgtgctacgctgggattgataccgaccctgagctaaaatacccaaaaggagctgggagagttgcgttctctaatcaacagagttacatagctgctatcagtgcccgctttgttcagctgcagcatggagagatagataaacgggtggaagttaagccatatgtcttggatgatcagctgtgtgatgaatgtcagggggcccgttgtggggggaaatttgctccatttttctgtgctaatgttacctgtctgcagtattactgtgaatattgctgggctgctatccattctcgtgctggcagggaattccacaagcccctggtgaaggaaggcggtgaccgccctcggcatatttcattccgctggaactaaaggataactgcagtgctcattttcaggcctcagaataagtgcactcttctgttcattctgaccccttcctcaacctcttcacgctggcatgtccttttgtagcagtctgtaacttaactatagtataatgaaaagaatgacctataatataggtgttttgtagattcttgtgtcactgcaaacaatatgaactcctttttcgtattgccatcgggttgcatggaagttttattctcttgttttgctggaaaccaagaggatccaaacttcctgcaacattttcttagaggagagagagaaatattaaaagagaaatgaaacaatagagtattttgggtttttaattaaattattgttaataatataacatataagaatacttttattaaaataaccatgcaacaataacactatcggtctatctgacagtttttcccccagggaagtgcttttgccttttcctttcttttttttttttttttcatcttttttgtctctctcttttttccatccctttttaatttttttaacagcaatggaggaagttaacaatttttaatggaaagagcatgttagagcaaacaaatgcataagcaagactgagcagcattataattaattttcagggttttgaggctgaacataatttcattatccctcaaaaagttaccaccacatcagaaaaaataaaaaaaaaatagtaaagtaggcagagctaggtttattttctcttaaacaatttttaaaattcagaatgtaaaaattgggtaaatttactactgaggggagtgcacttatttatttaacttacttatctggtcaaagccccaggaaacctaccaaagctagaattaatgacaactggtgggaaacctagcatttcctctcctgaagaataaatgtataaatgttatttttgatgtttatatataaactctatatcctaatttactaatactcatcagatgtcagcctttgctctccattttgacgttaaaaaacaacaacagatctagagatacctcaaggatatcatttttgattttgtgttacagtacacttgtagccaaaactggaagacaaaaccaatatataatttggctgctgattggcttacttttagatttaaagttactttgggtatcctgtaatttagttgtaacatagaaaatgaaaaaacagttaaaaaaagtgaagtagttgcaaagtgttttgcactgttgaactaagtaactgtgtaaatctgtgcaaaggtacgtatgtttatcttactcttcctataaactaaaataacattacagtttccgaatttagcatgggacatagtcagtgtttgaagtgccaacttcatcaagtaatgcatgctttattataaataaaattctagctttgaaaggcgttatgtgttgaacagtatgcttcaggggtaaatttaaaatagtctcttgaagccctagtcatggaagtaacttttattttaattgacattctcttattaaatgccctatccatcattaaaaggtttattatcagtgggcaaaacatgaaataatatgatcgaatggcaatcttgctagttgcgctacctaacagtaccatcttggatccttcaaaaccaaagacttgccccagcactgctgtggaaccacctggcttatgacccctatggatgatctttaggaaaagcagccctttacttttaatacaggctttaatgaactatacctgttaagttccaaaggtcaaaatggaggcatttgctgtctaatattcaaacatagaaagggagctgcttttaaagaattccctgcaaatactgaaagcagtcatgcgaatggagggtgctcttgtgtagctggtcagggacttttttttcttttctcctgaactacatgattctaattggaatgttcatttgcctctttttactcttttaaatgcttgtaggtggcttggggtgtgctatcgtgctgttcctactcagtaaacaggtgtgatgagttaacaagaaataacactgtttgagaactagctttgaataataatttttccctttgtacatgacctgctgaatttcggtacagtgtttttgtagctaacttattttgtcatgcacataatgtatatttgttatgcactacttttgtatatcttgtttttccaacagtgaacatttttaggcacacttttcactgacgggatatctctttatgcaatacctcaatttttcatattgcaaagagtagctttttgtacttttattactgagagatcttcatatacttcattttttaatataaataattttaataaattttattttcttatattctgctttttatacatttcagtgctctgcatacattttaaattatgaatgtcgtgcactggcaatgctattttagagtctgcagagaagagaaagcatgttgcttaaacatccttccccagcaccagctattggtgtacctataatttaagaaatagtctatgtaaagtcacaaattaatgaaaaaaattcgcatgaaaatgacagataacactgtagttcctaaaaaaaaaattaaatgcataagcataaggtagaaattaaaataacaaaattgtctacagcttcttactaagtttttaaaattattcataaaatgcagacatttttggtgaatgtttagccatttttaatattaataaattgatgttaagtgtttgattcagagatgtctgctcttttaaattatatataaggaaaaaaaatagcctgccttgggacaggtgtgtaatgttagtgtgcatgactaatgtaagaaattgttattctactaatatttacttgtgattgtgtgacaagtgtgtttacagattattggttacacttcaatttacagggcataaacaatgattatctattactctgaactttatgattacatgttcttcagattacatgggattgtagttgggagttaccatgtaactcaaacataattaacatgtaattagtttacagattgtagggcatcacttcaattcaccaagcatgtagttctagcgcactagcatggcgccagccatgtacttacaatgtagttacagagtaattacatggtgatttttgcaatgtaaaataaagtgtttctgattattttctatgtaaaggaaccctctcctttccccttctggtccctgcgctttggtataatatatatacttctccatacacagacctctgcagaatgcaaaataaaacttgcagtgaatgaatttagcattttatgagagtgctgttggaaagacttgataattcaccccttttgttttgaagagttgaatcttctgttaaaaggtgatttaaaacttgaatgtgatgaattgtggcaagttaacttcaagttatgtgcaatacttatttcaaacttttgaaagatctttgcagtgtaattctttgtttttaattgcagacatttaaaaatgtcattttctactgttaagagtaatcctctttcttgctggtgtttctaaagaaaagaatcagaaatcaatctttctactaatgtaaatttgagattatttttaaaaatggaataaaagaggttttggtcatttgctttattttattattttaaagctactgtgattgatagcattgtaagaatcgggacaatattgtattcaactgttttattttttatatttttaaaatttaaagtataattagtttttataattttcatcagatttttgttatattttttggaagtgaaacttttagcaagtgggtgtctagtttttactaatccctaattttttttccagtgtattgctcatattatcagaaggaaaagttatttaagtatgtcagttaattgtactacttggctgaatttccatatagtttttactgtgtatggggaggttgtagtatttattatagcattttaaataagggtaattcattttttattaaagtcattttcacgttaagttcctatttttgtatgttctactcttaagttatataacacagttccttttttaaaagagttcatttgttgaagtgctagtgaaaaattaatgttattaaatagtttgcaaatgactatttataccagtatgcatataatttttaaatatttgtaatgtgagatgttgaatgaataaaacttttaactcagatttcttttaatatacttatttctttttaacacaagtagatgatgctttcttgactgggaatgtaacattttaaaatattaggaatatactgttcagctaatgcagcacaaaccaataggaaaaaatcttcagtcatataagtactgtggccagtgtgcattcttatgtaagcctataagcgtcggtgggtggttgtgtctttggcctgtactgttagttcacctgctgcctgccctgcagagttctttttatttgtagccttcaatatgtatacagggagtaagcccaggatctaagcattcagttatcagttgaaggccaaatgcccaacaaaagtgaaaaacccaatgtttagttaataatgaaagtccgtatctgggaggttcagttttgagtctttgtcaatgaatagtcttgatttgtggccacactaccaaagggcttgaaaacaagtctcttttgacttccaattcccagttcctccatagaccttaatgtcataggatacggtgtgtgggattataatctctatggcatgtcaattgaaaatattatctttgatttgatccattaatcatgtggactaccaagtgctgtaatgtgttagtatttatattttaaactgcattctcaaacttttaacataaggatttattataacaaaatat

SEQ ID NO: 5920 - protein, 322 aa, Homo sapiens; identical to SEQ ID NO: 5914

SEQ ID NO: 5921 - DNA, 3904 bp, Homo sapiens
atgaccgagctgagggggtgcagccctttgctgtggaacacgcagaaccgtgggggtgcccagcagagtgccaccgtggccaacccagtgcctggtgccaacccggacctgcttccccacttcctggtggagcccgaggatgtgtacatcgtcaagaacaagccagtgctgcttgtgtgcaaggccgtgcccgccacgcagatcttcttcaagtgcaacggggagtgggtgcgccaggtggaccacgtgatcgagcgcagcacagacgggagcagtgggtcctcttctgccccgagcatccgactccagcctcccatggccggaacatctgaacgttcattgatctcatcgatttctcaacccaaagccatcgagtgctttgaggtgaagaaaaaggctttccttacccacggcagataccacggcagtggcgccacgccgccaaagaccaaagaccccaaaccagaaacgttctgtggtcagacagggctgcccaccatggaggtccgcattaatgtctcaaggcagcaggtcgagaaggtgttcgggctggaggaatactggtgccagtgcgtggcatggagctcctcgggcaccaccaagagtcagaaggcctacatccgcatagcctatttgcgcaagaacttcgagcaggagccgctggccaaggaggtgtccctggagcagggcatcgtgctgccctgccgtccaccggagggcatccctccagccgaggtggagtggctccggaacgaggacctggtggacccgtccctggaccccaatgtatacatcacgcgggagcacagcctggtggtgcgacaggcccgccttgctgacacggccaactacacctgcgtggccaagaacatcgtggcacgtcgccgcagcgcctccgctgctgtcatcgtctacgtgaacggtgggtggtcgacgtggaccgagtggtccgtctgcagcgccagctgtgggcgcggctggcagaaacggagccggagctgcaccaacccggcgcctctcaacgggggcgctttctgtgaggggcagaatgtccagaaaacagcctgcgccaccctgtgcccagtggacggcagctggagcccgtggagcaagtggtcggcctgtgggctggactgcacccactggcggagccgtgagtgctctgacccagcaccccgcaacggaggggaggagtgccagggcactgacctggacacccgcaactgtaccagtgacctctgtgtacacaactcctacacccctgcccccaccaaggccatgctgtctcccgcagctgcttctggccctgaggacgtggccctctatgtgggcctcatcgccgtggccgtctgcctggtcctgctgctgcttgtcctcatcctcgtttattgccggaagaaggaggggctggactcagatgtggctgactcgtccattctcacctcaggcttccagcccgtcagcatcaagcccagcaaagcagacaacccccatctgctcaccatccagccggacctcagcaccaccaccaccacctaccagggcagtctctgtccccggcaggatgggcccagccccaagttccagctcaccaatgggcacctgctcagccccctgggtggcggccgccacacactgcaccacagctctcccacctctgaggccgaggagttcgtctcccgcctctccacccagaactacttccgctccctgccccgaggcaccagcaacatgacctatgggaccttcaacttcctcgggggccggctgatgatccctaatacaggaatcagcctcctcatccccccagatgccataccccgagggaagatctatgagatctacctcacgctgcacaagccggaagacgtgagctgtggaccccctggcgtcctgctcacccggccagtcatcctggctatggaccactgtggggagcccagccctgacagctggagcctgcgcctcaaaaagcagtcgtgcgagggcagctgggaggatgtgctgcacctgggcgaggaggcgccctcccacctctactactgccagctggaggccagtgcctgctacgtcttcaccgagcagctgggccgctttgccctggtgggagaggccctcagcgtggctgccgccaagcgcctcaagctgcttctgtttgcgccggtggcctgcacctccctcgagtacaacatccgggtctactgcctgcatgacacccacgatgcactcaaggaggtggtgcagctggagaagcagctggggggacagctgatccaggagccacgggtcctgcacttcaaggacagttaccacaacctgcgcctatccatccacgatgtgcccagctccctgtggaagagtaagctccttgtcagctaccaggagatccccttttatcacatctggaatggcacgcagcggtacttgcactgcaccttcaccctggagcgtgtcagccccagcactagtgacctggcctgcaagctgtgggtgtggcaggtggagggcgacgggcagagcttcagcatcaacttcaacatcaccaaggacacaaggtttgctgagctgctggctctggagagtgaagcgggggtcccagccctggtgggccccagtgccttcaagatccccttcctcattcggcagaagataatttccagcctggacccaccctgtaggcggggtgccgactggcggactctggcccagaaactccacctggacagccatctcagcttctttgcctccaagcccagccccacagccatgatcctcaacctgtgggaggcgcggcacttccccaacggcaacctcagccagctggctgcagcagtggctggactgggccagccagacgctggcctcttcacagtgtcggaggctgagtgctgaggccggccaggcccgacacctacactctcaccagctttggcacccaccaaggacaggcagaagccggacaggggcccttccccacaccggggagagctgctcggacaggccccctcccggccgaagctgtcccttaatgctggtccttcagaccctgcccgaactcccacctctccatggcctgcctagccaggctggcactgccactcacactcggccccagggcccaggagggacagtgcctggagcctgggccaggcccagcccatctgtgtgtgtgtatgtgcgtgtgatgctacctctcctcccgtccctctccaggggccccgcatacacacggccatgcacgcacacactgggcctgggccagggccccagagctcctgcctgagctggaccttatgcaaacatttctgtgcctgctgggtaggggcacgtctgaggggccctgctccaagcctgcaggaccgagggccacagccggacagggggtagcccctggattcaggcacacgaccaccacacgagcacgtgccacgcatgcctcgtgtgctcatctcacacacacccccctcccgggtcacgcagacaccccccaaccacacacatctcatgctgtacacctgaggctgctcacgtctcacgcccagtgttggtgcacatttgcctctcacatgctgccctctccacccacccagggacaccccacggctcctccctgcccctgcccctcccccagccttgaggtgccctgcccggcggggcctgtgaatatgcaatgggagtcccaggctgtacagtggtgagtgtgtgtgtggcgtggcgtgcccgtccccagggctggctggtgccccacgcggggcctgtcatgtgaagctcgtgtcctgactttgtcttaagtgcattcacgcacttactcttggccttatgtacacagccttgcccggccgccggggcacataggggttttatcgggcgtgaatgtaaataaattatatatatatattgctaa

SEQ ID NO: 5922 - protein, 963 aa, Homo sapiens
MTELRGCSPLLWNTQNRGGAQQSATVANPVPGANPDLLPHFLVEPEDVYIVKNKPVLLVCKAVPATQIFFKCNGEWVRQVDHVIERSTDGSSGSSSAPSIRLQPPMAGTSERSLISSISQPKAIECFEVKKKAFLTHGRYHGSGATPPKTKDPKPETFCGQTGLPTMEVRINVSRQQVEKVFGLEEYWCQCVAWSSSGTTKSQKAYIRIAYLRKNFEQEPLAKEVSLEQGIVLPCRPPEGIPPAEVEWLRNEDLVDPSLDPNVYITREHSLVVRQARLADTANYTCVAKNIVARRRSASAAVIVYVNGGWSTWTEWSVCSASCGRGWQKRSRSCTNPAPLNGGAFCEGQNVQKTACATLCPVDGSWSPWSKWSACGLDCTHWRSRECSDPAPRNGGEECQGTDLDTRNCTSDLCVHNSYTPAPTKAMLSPAAASGPEDVALYVGLIAVAVCLVLLLLVLILVYCRKKEGLDSDVADSSILTSGFQPVSIKPSKADNPHLLTIQPDLSTTTTTYQGSLCPRQDGPSPKFQLTNGHLLSPLGGGRHTLHHSSPTSEAEEFVSRLSTQNYFRSLPRGTSNMTYGTFNFLGGRLMIPNTGISLLIPPDAIPRGKIYEIYLTLHKPEDVSCGPPGVLLTRPVILAMDHCGEPSPDSWSLRLKKQSCEGSWEDVLHLGEEAPSHLYYCQLEASACYVFTEQLGRFALVGEALSVAAAKRLKLLLFAPVACTSLEYNIRVYCLHDTHDALKEVVQLEKQLGGQLIQEPRVLHFKDSYHNLRLSIHDVPSSLWKSKLLVSYQEIPFYHIWNGTQRYLHCTFTLERVSPSTSDLACKLWVWQVEGDGQSFSINFNITKDTRFAELLALESEAGVPALVGPSAFKIPFLIRQKIISSLDPPCRRGADWRTLAQKLHLDSHLSFFASKPSPTAMILNLWEARHFPNGNLSQLAAAVAGLGQPDAGLFTVSEAEC

SEQ ID NO: 5923 - DNA, 954 bp, Homo sapiens
ggagttcgtctcccgcctctccacccagaactacttccgctccctgccccgaggcaccagcaacatgacctatgggaccttcaacttcctcgggggccggctgatgatccctaatacagccaagcagcctacttgttccagtctccatgtggggccctgggcccagaggtagggcaagccccggccccaaggagcttgcaactgagcagggagacaaccaagggcaaacagatgagcacgggcctgggcagaggccatcctggagtccccactgcatcctggcttccacccaccccagcaccgaaaccctctgaagaactctttccatggctgccttgcaagaagtggctgcagcctctggcatggctggccactcccacccgaaattcccaagtccctcagcttagatgaccccatgcgctcctggtttgcttgcccctctccagctgcctgttccataaatgtaggtgtgcctccgagctccctcccagtgcccttctccccgagcggcctcgcccactccatggctttaatcgccgtgtctgtgcagataactcccactcccccatccttagcctgcagttctcccgggcgacagaactgtacacccagctgcctcctggccagctccatctggatgtctcacatcacctcagactcctggtgcctaaaacagaaccgtctcccaccctcccccagagcctccccattcctggcttcccccagttcacggatcgtctagttgctcaagccggaaacttggggtcaccttgacctgctgctcgtcctctcttgccccccgccagcttcagtcccacgccagtccctcctcaatagctcctgccacctcctgctcttgtcctcccttgctgcctctcctgacacgggccaccaaaccccttacctggttccttgctgtaaaacttcaccaaatgaagccagagttgatcatga

SEQ ID NO: 5924 - protein, 35 aa, Homo sapiens
MTYGTFNFLGGRLMIPNTAKQPTCSSLHVGPWAQR

SEQ ID NO: 5925 - DNA, 2532 bp, Homo sapiens
aacccttgatcttccctgttcctgactctggcctgccctgacagtttgggggttgagggctggaagtggttgagcaaactgctctctgccttcctttgggtccttcttgttctccaggaggcttctgaatgtaacctatgtcagagggggcagtggggtctgggcatacacccacctgtcctctgggaggctattcgttgcttctggagtctccagtttgggagccccaaagaaaagaatccttctttgggaactcttggaggtagggccaggtggactgagggcttagaaaaggcttcctccagccacccttcccccctgcaggtttgagaagatgatcggaggcctgtacctgggtgagctggtgcggctggtgctggctcacttggcccggtgtggggtcctctttggtggctgcacctcccctgccctgctgagccaaggcagcatcctcctggaacacgtggctgagatggaggagtgagtcggggagatggtggtttagtgggggattcttggcttggaggaaggggatgatactctgttcccaaggtagccatggggctttagtgggatggggagcttctgggctgagccccaaaccacttccctttcccctccagcccctctactggggcagcccgtgtccatgctatcctgcaggacttgggcctgagccctggggcttcggatgttgagcttgtgcagcacgtctgtgcggccgtgtgcacgcgggctgcccagctctgtgctgccgccctggccgctgttctctcctgcctccagcacagccgggagcaacaaacactccaggttgctgtggccaccggaggccgagtgtgtgagcggcaccccaggttctgcagcgtcctgcaggggacagtgatgctcctggccccggaatgcgatgtctccttaatcccctctgtggatggtggtggccggggagtggcgatggtgactgccgtggctgcccgtctggctgcccaccggcgcctgctggaggagaccctggccccattccggttgaaccatgatcaactggctgcggttcaggcacagatgcggaaggccatggccaaggggctccgaggggaggcctcctcccttcgcatgctgcccactttcgtccgggccacccctgacggcagcgagcgaggggatttcctggccctggacctcgggggcacgaacttccgtgtcctcctggtacgtgtgaccacaggcgtgcagatcaccagcgagatctactccattcccgagactgtggcccagggttctgggcagcagctctttgaccacatcgtggactgcatcgtggacttccagcagaagcagggcctgagcgggcagagcctcccactgggttttaccttctccttcccatgtaggcagcttggcctagaccagggcatcctcctgaactggaccaagggtttcaaggcatcagactgcgagggccaagatgtcgtgagtctgttgcgggaagccatcactcgcagacaggcagtggagctgaatgtggttgccattgtcaatgacacggtggggaccatgatgtcctgtggctatgaggacccccgttgcgagataggcctcattgtcggaaccggcaccaatgcctgctacatggaggagctccggaatgtggcgggcgtgcctggggactcaggccgcatgtgcatcaacatggagtggggcgcctttggggacgatggctctctggccatgctcagcacccgctttgatgcaagtgtggaccaggcgtccatcaaccccggcaagcagaggtttgaaaagatgatcagcggcatgtacctgggggagatcgtccgccacatccttttacatttaaccagccttggcgttctcttccggggccagcagatccagcgccttcagaccagggacatcttcaagaccaagttcctctctgagatcgaaagtgacagcctggccctgcggcaggtccgagccatcctagaggatctggggctacccctgacctcagatgacgccctgatggtgctagaggtgtgccaggctgtgtcccagagggctgcccagctctgtggggcgggtgtagctgccgtggtggagaagatccgggagaaccggggcctggaagagctggcagtgtctgtgggggtggatggaacgctctacaagctgcacccgcgcttctccagcctggtggcggccacagtgcgggagctggcccctcgctgtgtggtcacgttcctgcagtcagaggatgggtccggcaaaggtgcggccctggtcaccgctgttgcctgccgccttgcgcagttgactcgtgtctgaggaaacctccaggctgaggaggtctccgccgcagccttgctggagccgggtcggggtctgcctgtttcccagccaggcccagccacccaggactcctgggacatcccatgtgtgacccctctgcggccatttggccttgctccctggctttccctgagagaagtagcactcaggttagcaatatatatatataatttatttacattc

SEQ ID NO: 5926 - protein, 479 aa, Homo sapiens [sequence omitted]

SEQ ID NO: 5927 - DNA, 3078 bp, Homo sapiens
gtcattggggtgcctcatattgccagacaagagctcagacctgaggagagtgactagcttctctgtgtcccaggtggccaccttccactgtggaagctcatggactccattgggtcttcagggttgcggcagggggaagaaaccctgagttgctctgaggagggcttgcccgggccctcagacagctcagagctggtgcaggagtgcctgcagcagttcaaggtgacaagggcacagctacagcagatccaagccagcctcttgggttccatggagcaggcgctgaggggacaggccagccctgcccctgcggtccggatgctgcctacatacgtggggtccaccccacatggcactgagcaaggagacttcgtggtgctggagctgggggccacaggggcctcactgcgtgttttgtgggtgactctaactggcattgaggggcatagggtggagcccagaagccaggagtttgtgatcccccaagaggtgatgctgggtgctggccagcagctctttgactttgctgcccactgcctgtctgagttcctggatgcgcagcctgtgaacaaacagggtctgcagcttggcttcagcttctctttcccttgtcaccagacgggcttggacaggagcaccctcatttcctggaccaaaggttttaggtgcagtggtgtggaaggccaggatgtggtccagctgctgagagatgccattcggaggcagggggcctacaacatcgacgtggttgctgtggtgaacgacacagtgggcaccatgatgggctgtgagccgggggtcaggccgtgtgaggttgggctagttgtagacacgggcaccaacgcgtgttacatggaggaggcacggcatgtggcagtgctggacgaagaccggggccgcgtctgcgtcagcgtcgagtggggctccttcagcgatgatggggcgctgggaccagtgctgaccaccttcgaccataccctggaccatgagtccctgaatcctggtgctcagaggtttgagaagatgatcggaggcctgtacctgggtgagctggtgcggctggtgctggctcacttggcccggtgtggggtcctctttggtggctgcacctcccctgccctgctgagccaaggcagcatcctcctggaacacgtggctgagatggaggacccctctactggggcagcccgtgtccatgctatcctgcaggacttgggcctgagccctggggcttcggatgttgagcttgtgcagcacgtctgtgcggccgtgtgcacgcgggctgcccagctctgtgctgccgccctggccgctgttctctcctgcctccagcacagccgggagcaacaaacactccaggttgctgtggccaccggaggccgagtgtgtgagcggcaccccaggttctgcagcgtcctgcaggggacagtgatgctcctggccccggaatgcgatgtctccttaatcccctctgtggatggtggtggccggggagtggcgatggtgactgccgtggctgcccgtctggctgcccaccggcgcctgctggaggagaccctggccccattccggttgaaccatgatcaactggctgcggttcaggcacagatgcggaaggccatggccaaggggctccgaggggaggcctcctcccttcgcatgctgcccactttcgtccgggccacccctgacggcagcgagcgaggggatttcctggccctggacctcgggggcacgaacttccgtgtcctcctggtacgtgtgaccacaggcgtgcagatcaccagcgagatctactccattcccgagactgtggcccagggttctgggcagcagctctttgaccacatcgtggactgcatcgtggacttccagcagaagcagggcctgagcgggcagagcctcccactgggttttaccttctccttcccatgtaggcagcttggcctagaccagggcatcctcctgaactggaccaagggtttcaaggcatcagactgcgagggccaagatgtcgtgagtctgttgcgggaagccatcactcgcagacaggcagtggagctgaatgtggttgccattgtcaatgacacggtggggaccatgatgtcctgtggctatgaggacccccgttgcgagataggcctcattgtcggaaccggcaccaatgcctgctacatggaggagctccggaatgtggcgggcgtgcctggggactcaggccgcatgtgcatcaacatggagtggggcgcctttggggacgatggctctctggccatgctcagcacccgctttgatgcaagtgtggaccaggcgtccatcaaccccggcaagcagaggtttgaaaagatgatcagcggcatgtacctgggggagatcgtccgccacatccttttacatttaaccagccttggcgttctcttccggggccagcagatccagcgccttcagaccagggacatcttcaagaccaagttcctctctgagatcgaaagtgacagcctggccctgcggcaggtccgagccatcctagaggatctggggctacccctgacctcagatgacgccctgatggtgctagaggtgtgccaggctgtgtcccagagggctgcccagctctgtggggcgggtgtagctgccgtggtggagaagatccgggagaaccggggcctggaagagctggcagtgtctgtgggggtggatggaacgctctacaagctgcacccgcgcttctccagcctggtggcggccacagtgcgggagctggcccctcgctgtgtggtcacgttcctgcagtcagaggatgggtccggcaaaggtgcggccctggtcaccgctgttgcctgccgccttgcgcagttgactcgtgtctgaggaaacctccaggctgaggaggtctccgccgcagccttgctggagccgggtcggggtctgcctgtttcccagccaggcccagccacccaggactcctgggacatcccatgtgtgacccctctgcggccatttggccttgctccctggctttccctgagagaagtagcactcaggttagcaatatatatatataatttatttacattc

SEQ ID NO: 5928 - protein, 923 aa, Homo sapiens
MDSIGSSGLRQGEETLSCSEEGLPGPSDSSELVQECLQQFKVTRAQLQQIQASLLGSMEQALRGQASPAPAVRMLPTYVGSTPHGTEQGDFVVLELGATGASLRVLWVTLTGIEGHRVEPRSQEFVIPQEVMLGAGQQLFDFAAHCLSEFLDAQPVNKQGLQLGFSFSFPCHQTGLDRSTLISWTKGFRCSGVEGQDVVQLLRDAIRRQGAYNIDVVAVVNDTVGTMMGCEPGVRPCEVGLVVDTGTNACYMEEARHVAVLDEDRGRVCVSVEWGSFSDDGALGPVLTTFDHTLDHESLNPGAQRFEKMIGGLYLGELVRLVLAHLARCGVLFGGCTSPALLSQGSILLEHVAEMEDPSTGAARVHAILQDLGLSPGASDVELVQHVCAAVCTRAAQLCAAALAAVLSCLQHSREQQTLQVAVATGGRVCERHPRFCSVLQGTVMLLAPECDVSLIPSVDGGGRGVAMVTAVAARLAAHRRLLEETLAPFRLNHDQLAAVQAQMRKAMAKGLRGEASSLRMLPTFVRATPDGSERGDFLALDLGGTNFRVLLVRVTTGVQITSEIYSIPETVAQGSGQQLFDHIVDCIVDFQQKQGLSGQSLPLGFTFSFPCRQLGLDQGILLNWTKGFKASDCEGQDVVSLLREAITRRQAVELNVVAIVNDTVGTMMSCGYEDPRCEIGLIVGTGTNACYMEELRNVAGVPGDSGRMCINMEWGAFGDDGSLAMLSTRFDASVDQASINPGKQRFEKMISGMYLGEIVRHILLHLTSLGVLFRGQQIQRLQTRDIFKTKFLSEIESDSLALRQVRAILEDLGLPLTSDDALMVLEVCQAVSQRAAQLCGAGVAAVVEKIRENRGLEELAVSVGVDGTLYKLHPRFSSLVAATVRELAPRCVVTFLQSEDGSGKGAALVTAVACRLAQLTRV

SEQ ID NO: 5929 - DNA, 446 bp, Homo sapiens
agcagttcaaggtgacaagggcacagctacagcagatccaagccagcctcttgggttccatggagcaggcgctgaggggacaggccagccctgcccctgcggtccggatgctgcctacatacgtggggtccaccccacatggcactgactttgcaggccttaggaatttgggaagtgggcagagggctctggtcttgccagctgcatggctttctgtgacctgcttgccctccagagcaaggagacttcgtggtgctggagctgggggccacaggggcctcactgcgtgttttgtgggtgactctaactggcattgaggggcatagggtggagcccagaagccaggagtttgtgatcccccaagaggtgatgctgggtgctggccagcagctctttgaccacatcgtggactgcatcgtggacttccagcagaagcagggcctgag

SEQ ID NO: 5930 - protein, 85 aa, Homo sapiens
MEQALRGQASPAPAVRMLPTYVGSTPHGTDFAGLRNLGSGQRALVLPAAWLSVTCLPSRARRLRGAGAGGHRGLTACFVGDSNWH

SEQ ID NO: 5931 - DNA, 2604 bp, Homo sapiens
gaagtcgggggtgggtccctccggacgccgaagtgggctcgggatgcggggctgggaccctcccgattccggggcggattccggacgccgggaccggccattactggtgccgggttgggcttctccagatgccggggctgggtccttcccaaggttgagacaaaaggatgccacggagaaagaaaaaagttaaagaagtctccgaatctcggaacctggagaagaaggatgtggaaactaccagttctgtcagtgtgaagaggaagcgtagacttgaggatgcattcattgtgatatccgatagtgatggagaggaaccaaaggaggaaaatgggttgcagaaaacgaagacaaaacagtcgaatagagcaaagtgtttggccaaaagaaaaatcgcacagatgacagaagaagaacagtttgctctggctctcaaaatgagtgagcaggaagctagggaggtgaacagccaggaggaggaagaagaggagctcttgaggaaagccattgctgaaagcctgaatagttgccggccttctgatgcttccgctaccagatctcgacctctggccactggaccgtcttcccagtcccatcaagagaaaaccacagactctgggctcactgaaggcatatggcagctggtacctccatcactgtttaaaggctcacatatcagtcagggaaacgaggctgaggaaagagaggagccttgggaccacactgaaaaaactgaagaggagccggtctctggcagctcaggaagctgggaccagtcaagccagccagtgtttgagaatgtgaacgttaaatcttttgacagatgtactggccactcggctgagcacacacagtgtgggaagccacaggaaagtactgggaggggttctgcttttctcaaagctgtccagggtagcggggacacatctaggcactgtctacctaccctagcagatgccaaaggtctccaggacactgggggcactgtgaactatttctggggtattccattctgccctgatggagtagaccctaaccagtataccaaggtcattctctgccagttggaggtttatcaaaagagcctgaaaatggctcagaggcagctccttaataaaaaaggttttggggaaccagtgttacctagacctccttctctgatccagaatgaatgtggccaaggagagcaggctagtgagaaaaatgaatgcatctcagaagatatgggagatgaagacaaagaggagaggcaggagtctagggcatctgactggcactcaaaaaccaaggatttccaggaaagctcaattaaaagcttgaaagagaaacttttgttggaggaagaaccaacaaccagtcatggtcagtcttcccaagggattgttgaagaaacttctgaagagggaaactctgtacctgcttcacaaagtgttgctgctttgaccagtaagagaagcttagtccttatgccagagagttctgcagaagaaatcactgtttgtcctgagacccagctaagttcctctgaaacttttgaccttgaaagagaagtctctccaggtagcagagatatcttggatggagtcagaataataatggcagataaggaggttggtaacaaggaagatgctgagaaggaagtagctatttctaccttctcatccagtaaccaggtatcctgcccgctatgtgaccaatgctttccacccacaaagattgaacgacatgccatgtactgcaatggtctgatggaggaagatacagtattgactcggagacaaaaagaggccaagaccaagagtgacagtgggacagctgcccagacttctctagacattgacaagaatgagaagtgttacctctgtaaatccctggtcccatttagagagtatcagtgtcatgtggactcctgtctccagcttgcaaaggctgaccaaggagatggacctgaagggagtggaagagcatgttcaactgtggaggggaagtggcagcagaggctgaagaacccaaaggaaaaaggccacagtgaaggccgactccttagtttcttggaacagtctgagcacaagacttcagatgcagacatcaagtcttcagaaacaggagccttcagggtgccttcaccagggatggaagaggcaggctgcagcagagagatgcagagttctttcacacgtcgtgacttaaatgaatctcccgtcaagtcttttgtttccatttcagaagccacagattgcttagtggactttaaaaagcaagttactgtccagccaggtagtcggacacggaccaaagctggcagaggaagaaggagaaaattctgaatttctagggtccaaaagttgacaaaaccattagtaggaggggtgggccatgttcattaagccatagtggtccctagttcattgttgagcaagttttagccctgcagttttcaccaccagcacctacccagcattctggtttttatgttttttatgatctatgcagacaactgtgtattctgttttataacagtttgtttgaatttacttacagttaaaaaatttaaatatatttatgtttgtacgaaatcttatttcaatagatggaaattttaat

SEQ ID NO: 5932 - protein, 719 aa, Homo sapiens; identical to SEQ ID NO: 703

SEQ ID NO: 5933 - DNA, 1060 bp, Homo sapiens
ggtaaagctccaaacatattccctggcataagtaggctcttgataaatgttagctgctattattactgttgttattagtcgctattgttaaaattcaccagatgtggatggaagaggagcttttgcttaagcctggtgagatgtgcttaccatctagttctaatagttcattcccaccaagcaaatctgttgtgccttctgatgactataaaaaggcagcctctcccagcctcatatcctgctgtctctagatcaccagtttgtgaatctctgcaggtggcagatttcccttggcaacttccttgttcctcaagtccagaattgaagtagatttattcagaggttgttcattcaaaagtgttcatctgagtgcccctgcagctgagtctgttggacactaatgctcaccgtctgtgggtttaggggattggggatctgtgctacctggataggcctgatgagaagcagtgcctagagcacggaagcaaaagatcagtgagaagtgctatgattaccaacactactaccaacattattattttttcttttatatcacagatgcagacatcaagtcttcagaaacaggagccttcagggtgccttcaccagggatggaagaggcaggctgcagcagagagatgcagagttctttcacacgtcgtgacttaaatgaatctcccgtcaagtcttttgtttccatttcagaagccacagattgcttagtggactttaaaaagcaagttactgtccagccaggtagtcggacacggaccaaagctggcagaggaagaaggagaaaattctgaatttctagggtccaaaagttgacaaaaccattagtaggaggggtgggccatgttcattaagccatagtggtccctagttcattgttgagcaagttttagccctgcagttttcaccaccagcacctacccagcattctggtttttatgttttttatgatctatgcagacaactgtgtattctgttttataacagtttgtttgaatttacttacagttaaaaaatttaaatatatttatgtttgtacgaaatctta

SEQ ID NO: 5934 - protein, 53 aa, Homo sapiens
MITNTTTNIIIFSFISQMQTSSLQKQEPSGCLHQGWKRQAAAERCRVLSHVVT

SEQ ID NO: 5935 - DNA, 2565 bp, Homo sapiens
actctccgggaggggcgcttcccgacgccaagtcttgttgcccaggctggaatgcagtggtgcgatctcagctcactgcaacctccgcctcccgggttcaagtgattgtcctgcctcagtctcctgagtagcagggattacagacaaaaggatgccacggagaaagaaaaaagttaaagaagtctccgaatctcggaacctggagaagaaggatgtggaaactaccagttctgtcagtgtgaagaggaagcgtagacttgaggatgcattcattgtgatatccgatagtgatggagaggaaccaaaggaggaaaatgggttgcagaaaacgaagacaaaacagtcgaatagagcaaagtgtttggccaaaagaaaaatcgcacagatgacagaagaagaacagtttgctctggctctcaaaatgagtgagcaggaagctagggaggtgaacagccaggaggaggaagaagaggagctcttgaggaaagccattgctgaaagcctgaatagttgccggccttctgatgcttccgctaccagatctcgacctctggccactggaccgtcttcccagtcccatcaagagaaaaccacagactctgggctcactgaaggcatatggcagctggtacctccatcactgtttaaaggctcacatatcagtcagggaaacgaggctgaggaaagagaggagccttgggaccacactgaaaaaactgaagaggagccggtctctggcagctcaggaagctgggaccagtcaagccagccagtgtttgagaatgtgaacgttaaatcttttgacagatgtactggccactcggctgagcacacacagtgtgggaagccacaggaaagtactgggaggggttctgcttttctcaaagctgtccagggtagcggggacacatctaggcactgtctacctaccctagcagatgccaaaggtctccaggacactgggggcactgtgaactatttctggggtattccattctgccctgatggagtagaccctaaccagtataccaaggtcattctctgccagttggaggtttatcaaaagagcctgaaaatggctcagaggcagctccttaataaaaaaggttttggggaaccagtgttacctagacctccttctctgatccagaatgaatgtggccaaggagagcaggctagtgagaaaaatgaatgcatctcagaagatatgggagatgaagacaaagaggagaggcaggagtctagggcatctgactggcactcaaaaaccaaggatttccaggaaagctcaattaaaagcttgaaagagaaacttttgttggaggaagaaccaacaaccagtcatggtcagtcttcccaagggattgttgaagaaacttctgaagagggaaactctgtacctgcttcacaaagtgttgctgctttgaccagtaagagaagcttagtccttatgccagagagttctgcagaagaaatcactgtttgtcctgagacccagctaagttcctctgaaacttttgaccttgaaagagaagtctctccaggtagcagagatatcttggatggagtcagaataataatggcagataaggaggttggtaacaaggaagatgctgagaaggaagtagctatttctaccttctcatccagtaaccaggtatcctgcccgctatgtgaccaatgctttccacccacaaagattgaacgacatgccatgtactgcaatggtctgatggaggaagatacagtattgactcggagacaaaaagaggccaagaccaagagtgacagtgggacagctgcccagacttctctagacattgacaagaatgagaagtgttacctctgtaaatccctggtcccatttagagagtatcagtgtcatgtggactcctgtctccagcttgcaaaggctgaccaaggagatggacctgaagggagtggaagagcatgttcaactgtggaggggaagtggcagcagaggctgaagaacccaaaggaaaaaggccacagtgaaggccgactccttagtttcttggaacagtctgagcacaagacttcagatgcagacatcaagtcttcagaaacaggagccttcagggtgccttcaccagggatggaagaggcaggctgcagcagagagatgcagagttctttcacacgtcgtgacttaaatgaatctcccgtcaagtcttttgtttccatttcagaagccacagattgcttagtggactttaaaaagcaagttactgtccagccaggtagtcggacacggaccaaagctggcagaggaagaaggagaaaattctgaatttctagggtccaaaagttgacaaaaccattagtaggaggggtgggccatgttcattaagccatagtggtccctagttcattgttgagcaagttttagccctgcagttttcaccaccagcacctacccagcattctggtttttatgttttttatgatctatgcagacaactgtgtattctgttttataacagtttgtttgaatttacttacagttaaaaaatttaaatatatttatgtttgtacgaaatctta

SEQ ID NO: 5936 - protein, 719 aa, Homo sapiens; identical to SEQ ID NO: 703

SEQ ID NO: 5937 - DNA, 2541 bp, Homo sapiens
gagcgtgtctctggcatcggacgcgcgcgcccctccccctccccccgcgctcccaacgtgtggcggctcgcgacccccggcaacccggagaaggtctacagagcggcctgcgccagcgaacaaaaggatgccacggagaaagaaaaaagttaaagaagtctccgaatctcggaacctggagaagaaggatgtggaaactaccagttctgtcagtgtgaagaggaagcgtagacttgaggatgcattcattgtgatatccgatagtgatggagaggaaccaaaggaggaaaatgggttgcagaaaacgaagacaaaacagtcgaatagagcaaagtgtttggccaaaagaaaaatcgcacagatgacagaagaagaacagtttgctctggctctcaaaatgagtgagcaggaagctagggaggtgaacagccaggaggaggaagaagaggagctcttgaggaaagccattgctgaaagcctgaatagttgccggccttctgatgcttccgctaccagatctcgacctctggccactggaccgtcttcccagtcccatcaagagaaaaccacagactctgggctcactgaaggcatatggcagctggtacctccatcactgtttaaaggctcacatatcagtcagggaaacgaggctgaggaaagagaggagccttgggaccacactgaaaaaactgaagaggagccggtctctggcagctcaggaagctgggaccagtcaagccagccagtgtttgagaatgtgaacgttaaatcttttgacagatgtactggccactcggctgagcacacacagtgtgggaagccacaggaaagtactgggaggggttctgcttttctcaaagctgtccagggtagcggggacacatctaggcactgtctacctaccctagcagatgccaaaggtctccaggacactgggggcactgtgaactatttctggggtattccattctgccctgatggagtagaccctaaccagtataccaaggtcattctctgccagttggaggtttatcaaaagagcctgaaaatggctcagaggcagctccttaataaaaaaggttttggggaaccagtgttacctagacctccttctctgatccagaatgaatgtggccaaggagagcaggctagtgagaaaaatgaatgcatctcagaagatatgggagatgaagacaaagaggagaggcaggagtctagggcatctgactggcactcaaaaaccaaggatttccaggaaagctcaattaaaagcttgaaagagaaacttttgttggaggaagaaccaacaaccagtcatggtcagtcttcccaagggattgttgaagaaacttctgaagagggaaactctgtacctgcttcacaaagtgttgctgctttgaccagtaagagaagcttagtccttatgccagagagttctgcagaagaaatcactgtttgtcctgagacccagctaagttcctctgaaacttttgaccttgaaagagaagtctctccaggtagcagagatatcttggatggagtcagaataataatggcagataaggaggttggtaacaaggaagatgctgagaaggaagtagctatttctaccttctcatccagtaaccaggtatcctgcccgctatgtgaccaatgctttccacccacaaagattgaacgacatgccatgtactgcaatggtctgatggaggaagatacagtattgactcggagacaaaaagaggccaagaccaagagtgacagtgggacagctgcccagacttctctagacattgacaagaatgagaagtgttacctctgtaaatccctggtcccatttagagagtatcagtgtcatgtggactcctgtctccagcttgcaaaggctgaccaaggagatggacctgaagggagtggaagagcatgttcaactgtggaggggaagtggcagcagaggctgaagaacccaaaggaaaaaggccacagtgaaggccgactccttagtttcttggaacagtctgagcacaagacttcagatgcagacatcaagtcttcagaaacaggagccttcagggtgccttcaccagggatggaagaggcaggctgcagcagagagatgcagagttctttcacacgtcgtgacttaaatgaatctcccgtcaagtcttttgtttccatttcagaagccacagattgcttagtggactttaaaaagcaagttactgtccagccaggtagtcggacacggaccaaagctggcagaggaagaaggagaaaattctgaatttctagggtccaaaagttgacaaaaccattagtaggaggggtgggccatgttcattaagccatagtggtccctagttcattgttgagcaagttttagccctgcagttttcaccaccagcacctacccagcattctggtttttatgttttttatgatctatgcagacaactgtgtattctgttttataacagtttgtttgaatttacttacagttaaaaaatttaaatatatttatgtttgtacgaaatctta

SEQ ID NO: 5938 - protein, 719 aa, Homo sapiens; identical to SEQ ID NO: 703

SEQ ID NO: 5939 - DNA, 2169 bp, Homo sapiens
gcccgccccgagagcgtgtctctggcatcggacgcgcgcgcccctccccctccccccgcgctcccaacgtgtggcggctcgcgacccccggcaacccggagaaggtctacagagcggcctgcgccagcgagtgagtacccgccgcctgcgcacagctccgcccacccctccctgcctccttttcttcctcagcgggtccgcggcccgctactctccgggaggggcgcttcccgacgccaagacaaaaggatgccacggagaaagaaaaaagttaaagaagtctccgaatctcggaacctggagaagaaggatgtggaaactaccagttctgtcagtgtgaagaggaagcgtagacttgaggatgcattcattgtgatatccgatagtgatggagaggaaccaaaggaggaaaatgggttgcagaaaacgaagacaaaacagtcgaatagagcaaagtgtttggccaaaagaaaaatcgcacagatgacagaagaagaacagtttgctctggctctcaaaatgagtgagcaggaagctagggaggtgaacagccaggaggaggaagaagaggagctcttgaggaaagccattgctgaaagcctgaatagttgccggccttctgatgcttccgctaccagatctcgacctctggccactggaccgtcttcccagtcccatcaagagaaaaccacagactctgggctcactgaaggcatatggcagctggtacctccatcactgtttaaaggctcacatatcagtcagggaaacgaggctgaggaaagagaggagccttgggaccacactgaaaaaactgaagaggagccggtctctggcagctcaggaagctgggaccagtcaagccagccagtgtttgagaatgtgaacgttaaatcttttgacagatgtactggccactcggctgagcacacacagtgtgggaagccacaggaaatcttcccaagggattgttgaagaaacttctgaagagggaaactctgtacctgcttcacaaagtgttgctgctttgaccagtaagagaagcttagtccttatgccagagagttctgcagaagaaatcactgtttgtcctgagacccagctaagttcctctgaaacttttgaccttgaaagagaagtctctccaggtagcagagatatcttggatggagtcagaataataatggcagataaggaggttggtaacaaggaagatgctgagaaggaagtagctatttctaccttctcatccagtaaccaggtatcctgcccgctatgtgaccaatgctttccacccacaaagattgaacgacatgccatgtactgcaatggtctgatggaggaagatacagtattgactcggagacaaaaagaggccaagaccaagagtgacagtgggacagctgcccagacttctctagacattgacaagaatgagaagtgttacctctgtaaatccctggtcccatttagagagtatcagtgtcatgtggactcctgtctccagcttgcaaaggctgaccaaggagatggacctgaagggagtggaagagcatgttcaactgtggaggggaagtggcagcagaggctgaagaacccaaaggaaaaaggccacagtgaaggccgactccttagtttcttggaacagtctgagcacaagacttcagatgcagacatcaagtcttcagaaacaggagccttcagggtgccttcaccagggatggaagaggcaggctgcagcagagagatgcagagttctttcacacgtcgtgacttaaatgaatctcccgtcaagtcttttgtttccatttcagaagccacagattgcttagtggactttaaaaagcaagttactgtccagccaggtagtcggacacggaccaaagctggcagaggaagaaggagaaaattctgaatttctagggtccaaaagttgacaaaaccattagtaggaggggtgggccatgttcattaagccatagtggtccctagttcattgttgagcaagttttagccctgcagttttcaccaccagcacctacccagcattctggtttttatgttttttatgatctatgcagacaactgtgtattctgttttataacagtttgtttgaatttacttacagttaaaaaatttaaatatatttatgtttgtacgaaatctta

SEQ ID NO: 5940 - protein, 286 aa, Homo sapiens
MPESSAEEITVCPETQLSSSETFDLEREVSPGSRDILDGVRIIMADKEVGNKEDAEKEVAISTFSSSNQVSCPLCDQCFPPTKIERHAMYCNGLMEEDTVLTRRQKEAKTKSDSGTAAQTSLDIDKNEKCYLCKSLVPFREYQCHVDSCLQLAKADQGDGPEGSGRACSTVEGKWQQRLKNPKEKGHSEGRLLSFLEQSEHKTSDADIKSSETGAFRVPSPGMEEAGCSREMQSSFTRRDLNESPVKSFVSISEATDCLVDFKKQVTVQPGSRTRTKAGRGRRRKF

SEQ ID NO: 5941 - DNA, 1398 bp, Homo sapiens
gtactatgtgtatactatattctgtgtagtactcgatatgtagttttctcacttgcatttatgaaaacttaagatgtagtgtaaacatcattttgggttttatttttaaaaattactattaatgtttatatcacacagatggtcatttaaccatacacctattattggacattttggttcttttgtgttacaagattgtatttaaaacattaatcagtctttgtaccactgattatttccttagaatacattttctgatacggaactattaggtcagtggatgtacaaattttaaagtgtctcgaaacctgccaaattgctttccggaaaggatatccaatttataatcccactgccaagaatatatgtgagatcaactctgtcgaactccttaggaagctgccaggtctgggccctggtcactgggaaggatggatgtacttttggggccttgtaattagagatcaggaagagcaagtcttggcttagagatgaaagataaagcagcagctccatattctagggttaccgacaaaggagtcactgtacacactaaaatggggaagccattgtctgtcatgccagaagaaagagacccctctctgtgaatggggtgattttgaggcggagatttggagttatggtttataggtaagcacttacttatacagccagtttattctgggatcactgcctgtagacactaccttaaaatttattttctattttaaatccatgatactctgggcatagcgatgtattctcttcattatagtttgctttttcacttgtgaaaccctcgtttattagaaagcaaaagacttccctagagctgtggcccccacaccttttctcttctatgaacacgtgtgatctgggctgtggaagttgtattttagactctgacatgaagtaaccttttcatctgtttttctctgttacaggaaaaaggccacagtgaaggccgactccttagtttcttggaacagtctgagcacaagacttcagatgcagacatcaagtcttcagaaacaggagccttcaggtgaattggattgtgcactgaattgtggctgtcagcatttctgaaaagtgcaggccttgtcctgtgttctgtgtgtagtgtgatactcagactgttgcagtagaaatcactgtggaactattatgacctctctctcagtatgactctgtgctccccatttagctaaagattggataactcaattcattcattgtgttaaaacaaacagagtgaaagttatgtcttattcttctgtacctctctatccccatccaaccctggttttctgacctggattctcaagcagcttgggaatttggatctcagttctcattctctcaatggccagctttaagtagtatatgatttaccca

SEQ ID NO: 5942 - protein, 38 aa, Homo sapiens [sequence omitted]

SEQ ID NO: 5943 - DNA, 479 bp, Homo sapiens
cttatctttgtcacctgattttcataccactttcttcaaaagacagtggctagtttatctttggtatttgtcttgcaaaaggactttgtgtgtgtgtgttttacttttaattaccaaaaatttcaaacttaaaaattgagaggatagtagtactctgaacccccatattctacctagtcattcatcaactcgtggccactgttgtttcatatgtattctatccataactcccatcctgggtgataagagtgagactgtgtctcaaaaaaaaaaaaaattatttactgtaaaatagaaataatgatatattctttgtagggttgttgtaaagataaagatgtttataaagtctctggcacaaaataggtcctcataaaacaagagctcttttttcccctggaatctattgatacagtttaattcagcaagtatttattagcatttaatctgtcctagactctgctgaggatgctgaagag

SEQ ID NO: 5944 - protein, 51 aa, Homo sapiens
EDSSTLNPHILPSHSSTRGHCCFICILSITPILGDKSETVSQKKKKLFTVK

SEQ ID NO: 5945 - DNA, 1476 bp, Homo sapiens
gagcgtgtctctggcatcggacgcgcgcgcccctccccctccccccgcgctcccaacgtgtggcggctcgcgacccccggcaacccggagaaggtctacagagcggcctgcgccagcgaacaaaaggatgccacggagaaagaaaaaagttaaagaagtctccgaatctcggaacctggagaagaaggatgtggaaactaccagttctgtcagtgtgaagaggaagcgtagacttgaggatgcattcattgtgatatccgatagtgatggagaggaaccaaaggaggaaaatgggttgcagaaaacgaagacaaaacagtcgaatagagcaaagtgtttggccaaaagaaaaatcgcacagatgacagaagaagaacagtttgctctggctctcaaaatgagtgagcaggaagctagggaggtgaacagccaggaggaggaagaagaggagctcttgaggaaagccattgctgaaagcctgaatagttgccggccttctgatgcttccgctaccagatctcgacctctggccactggaccgtcttcccagtcccatcaagagaaaaccacagactctgggctcactgaaggcatatggcagctggtacctccatcactgtttaaaggctcacatatcagtcagggaaacgaggctgaggaaagagaggagccttgggaccacactgaaaaaactgaagaggagccggtctctggcagctcaggaagctgggaccagtcaagccagccagtgtttgagaatgtgaacgttaaatcttttgacagatgtactggccactcggctgagcacacacagtgtgggaagccacaggaaagtactgggaggggttctgcttttctcaaagctgtccagggtagcggggacacatctaggcactgtctacctaccctagcagatgccaaaggtctccaggacactgggggcactgtgaactatttctggggtattccattctgccctgatggagtagaccctaaccagtataccaaggtcattctctgccagttggaggtttatcaaaagagcctgaaaatggctcagaggcagctccttaataaaaaaggttttggggaaccagtgttacctagacctccttctctgatccagaatgaatgtggccaaggagagcaggctagtgagaaaaatgaatgcatctcagaagatatgggagatgaagacaaagaggagaggcaggagtctagggcatctgactggcactcaaaaaccaaggatttccaggaaagctcaattaaaagcttgaaagagaaacttttgttggaggaagaaccaacaaccagtcatggtcaggtaagggtcagtgatgctgtaattaaggatgatttattcacagattaaaacaaggattattttagctgttatttttgtggtcttcccctccttgattattaaagtaatacatgttcactatagaaaattaggaaagtacaggagagtat

SEQ ID NO: 5946 - protein, 415 aa, Homo sapiens
MPRRKKKVKEVSESRNLEKKDVETTSSVSVKRKRRLEDAFIVISDSDGEEPKEENGLQKTKTKQSNRAKCLAKRKIAQMTEEEQFALALKMSEQEAREVNSQEEEEEELLRKAIAESLNSCRPSDASATRSRPLATGPSSQSHQEKTTDSGLTEGIWQLVPPSLFKGSHISQGNEAEEREEPWDHTEKTEEEPVSGSSGSWDQSSQPVFENVNVKSFDRCTGHSAEHTQCGKPQESTGRGSAFLKAVQGSGDTSRHCLPTLADAKGLQDTGGTVNYFWGIPFCPDGVDPNQYTKVILCQLEVYQKSLKMAQRQLLNKKGFGEPVLPRPPSLIQNECGQGEQASEKNECISEDMGDEDKEERQESRASDWHSKTKDFQESSIKSLKEKLLLEEEPTTSHGQVRVSDAVIKDDLFTD

SEQ ID NO: 5947 - DNA, 758 bp, Homo sapiens; identical to SEQ ID NO: 704

SEQ ID NO: 5948 - protein, 95 aa, Homo sapiens
MQKAYFISSWKHQRSWKGNGNWMALCGGHFADSQVFKDLLRYPVFKVLYKISGPVPRRNLCQQPAPAACTSKIAVARREPAEDTYPGRKTRTPED

SEQ ID NO: 5949 - DNA, 1292 bp, Homo sapiens
ctctgatctgactaacctctttcattctttgccctatgttatatggcttagaccaaagcctgagacatttaaccaatttataaatattaaatgcagaaggcatactttatcagttcctggaaacatcaaagaagctggaaggggaatggaaattggatggcactttgtggaggtcactttgctgacagtcaagtattcaaaggatgaaggctcagatcagtttcatctatatgctatgcctgcctgacctggagaacttggtgttaaaggaaatgtgtttatcaaatgtgtcatgttatccttggagggcaactgaggatcagagcacagctgccttgaattgttccatcgagttattccactgcagttaagtggaacatcaaaaaacgtcaagaagcctaaaacatggaaacttgtttaattttctcaaacaatggcactaaccaaagcaaacgaaactttgacaagaaagaagcaattgtttagccttgtcatgtcctcacagttaataatacaaagggtatattcacagtgcaaagatactttccctttctctcaaaatagaagacaacgtattgtaagatattttacagatgtccttcctcatagaactctgtaaactttactagctcaagaacaaaatcaaagtttcaattcacgggactgattcatcttgcattttaggtattctaatggtatatttgtactgtgtgttgcaacctatagaataaatgtacttcttcttcatgtttcctgtttgctgatgacagataccagtggctcacctttcggcctatgaaacaatgatttcttttcaaatttgaaatctgaataactatgcaccacaatagctgcctttgacccagaatttttctctagtcattatcttccaaagaatttttctgcagttcgttatcctctaagttctgaatcttatccaaaacctgttacaacttaaacttctggctcccactcttaaggacttgctgtttcatcagatcttccttctccatttttccatcagtgaaacctaaaataaattcaaaatcataagaatgtaagagcaaacctaatgttctgtatcatggcataattttacttagagaaaccaaaatatctgaaggtgagttgttcaaatcttaagtgacaacagttaacttactatgagcaatagaaaaaaaatttaaatattagaacaagtgctacaaaagaatggacattttgggacagaaactttctgtattggtaaatctgccacccttctgaataataaatgatttgattttacttcc

SEQ ID NO: 5950 - protein, 38 aa, Homo sapiens
MQKAYFISSWKHQRSWKGNGNWMALCGGHFADSQVFKG

SEQ ID NO: 5951 - DNA, 1086 bp, Homo sapiens
gtctgcgtcagttggtcacgtggttgttcggagcgggcgagcggagttagcagggctttactgcagagcgcgccgggcactccagcgaccgtggggatcagcgtaggtgagctgtggccttttgcgaggtgctgcagccatagctacgtgcgttcgctacgaggattgagcgtctccacccatcttctgtgcttcaccatctacataatgaatcccagtatgaagcagaaacaagaagaaatcaaagagaatataaagaatagttctgtcccaagaagaactctgaagatgattcagccttctgcatctggatctcttgttggaagagaaaatgagctgtccgcaggcttgtccaaaaggaaacatcggaatgaccacttaacatctacaacttccagccctggggttattgtcccagaatctagtgaaaataaaaatcttggaggagtcacccaggagtcatttgatcttatgattaaagaaaatccatcctctcagtattggaaggaagtggcagaaaaacggagaaaggcgctgtatgaagcacttaaggaaaatgagaaacttcataaagaaattgaacaaaaggacaatgaaattgcccgcctgaaaaaggagaataaagaactggcagaagtagcagaacatgtacagtatatggcagagctaatagagagactgaatggtgaacctctggataattttgaatcactggataatcaggaatttgattctgaagaagaaactgttgaggattctctagtggaagactcagaaattggcacgtgtgctgaaggaactgtatcttcctctacggatgcaaagccatgtatatgaaatgcattaatatttgactgttgagaattttactgccgaagtttacctccactagttctttgtagcagagtacataactacataatgccaactctggaatcaaatttccttgtttgaatcctgggaccctattgcattaaagtacaaatactatgtatttttaatctatgatggtttatgtgaataggattttctcagttgtcagccatgacttatgtttattactaaataaacttcaaactcctgttg

SEQ ID NO: 5952 - protein, 209 aa, Homo sapiens; identical to SEQ ID NO: 707

SEQ ID NO: 5953 - DNA, 1136 bp, Homo sapiens
gtctgcgtcagttggtcacgtggttgttcggagcgggcgagcggagttagcagggctttactgcagagcgcgccgggcactccagcgaccgtggggatcagcgtaggtgagctgtggccttttgcgaggtgctgcagccatagctacgtgcgttcgctacgaggattgagcgtctccacccatcttctgtgcttcaccatctacataatgaatcccagtatgaagcagaaacaagaagaaatcaaagagaatataaagaatagttctgtcccaagaagaactctgaagatgattcagccttctgcatctggatctcttgttggaagagaaaatgagctgtccgcaggcttgtccaaaaggaaacatcggaatgaccacttaacatctacaacttccagccctggggttattgtcccagaatctagtgaaaataaaaatcttggaggagtcacccaggagtcatttgatcttatgattaaagaaaatccatcctctcagtattggaaggaagtggcagaaaaacggagaaaggcgctgtatgaagcacttaaggaaaatgagaaacttcataaagaaattgaacaaaaggacaatgaaattgcccgcctgaaaaaggagaataaagaactggcagaagtagcagaacatgtacagtatatggcagagctaatagagagactgaatggtgaacctctggataattttgaatcactggataatcaggaatttgattctgaagaagaaactgttgaggattctctagtggaagactcagaaattggcacgtgtgctgaaggaactgtatcttcctctacggatgcaaagccatgtatatgaaatgcattaatatttgactgttgagaattttactgccgaagtttacctccactagttctttgtagcagagtacataactacataatgccaactctggaatcaaatttccttgtttgaatcctgggaccctattgcattaaagtacaaatactatgtatttttaatctatgatggtttatgtgaataggattttctcagttgtcagccatgacttatgtttattactaaataaacttcaaactcctgttgaacattgtgtataacttagaataatgaaatataaggagtatgtgtagaaa

SEQ ID NO: 5954 - protein, 209 aa, Homo sapiens; identical to SEQ ID NO: 707

SEQ ID NO: 5955 - DNA, 1263 bp, Homo sapiens
cgtcagttggtcacgtggttgttcggagcgggcgagcggagttagcagggctttactgcagagcgcgccgggcactccagcgaccgtggggatcagcgtaggtgagctgtggccttttgcgaggtgctgcagccatagctacgtgcgttcgctacgaggattgagcgtctccacccagtaagtgggcaagaggcggcaggaagtgggtacgcaggggcgcaaggcgcacagcctctagacgactcgctttccctccggccaacctctgaagccgcgtcctactttgacagctgcagggccgcggcctggtcttctgtgcttcaccatctacataatgaatcccagtatgaagcagaaacaagaagaaatcaaagagaatataaagaatagttctgtcccaagaagaactctgaagatgattcagccttctgcatctggatctcttgttggaagagaaaatgagctgtccgcaggcttgtccaaaaggaaacatcggaatgaccacttaacatctacaacttccagccctggggttattgtcccagaatctagtgaaaataaaaatcttggaggagtcacccaggagtcatttgatcttatgattaaagaaaatccatcctctcagtattggaaggaagtggcagaaaaacggagaaaggcgctgtatgaagcacttaaggaaaatgagaaacttcataaagaaattgaacaaaaggacaatgaaattgcccgcctgaaaaaggagaataaagaactggcagaagtagcagaacatgtacagtatatggcagagctaatagagagactgaatggtgaacctctggataattttgaatcactggataatcaggaatttgattctgaagaagaaactgttgaggattctctagtggaagactcagaaattggcacgtgtgctgaaggaactgtatcttcctctacggatgcaaagccatgtatatgaaatgcattaatatttgactgttgagaattttactgccgaagtttacctccactagttctttgtagcagagtacataactacataatgccaactctggaatcaaatttccttgtttgaatcctgggaccctattgcattaaagtacaaatactatgtatttttaatctatgatggtttatgtgaataggattttctcagttgtcagccatgacttatgtttattactaaataaacttcaaactcctgttgaacattgtgtataacttagaataatgaaatataaggagtatgtgtagaaa

SEQ ID NO: 5956 - protein, 209 aa, Homo sapiens; identical to SEQ ID NO: 707

SEQ ID NO: 5957 - DNA, 691 bp, Homo sapiens
gtcagttggtcacgtggttgttcggagcgggcgagcggagttagcagggctttactgcagagcgcgccgggcactccagcgaccgtggggatcagcgtaggtgagctgtggccttttgcgaggtgctgcagccatagctacgtgcgttcgctacgaggattgagcgtctccacccatcttctgtgcttcaccatctacataatgaatcccagtatgaagcagaaacaagaagaaatcaaagagaatataaaggtatgtgattgaataactttaatttttttttgtagaaagcatggggctaaaagtattttgacataatttatccaaatttagcctggctataatttctgtaagccttgagttagtcagaggatgagtaacaatagagaacatttttaaaaaactaattacggttgaatattaagtctgacccaagaatatgggttgtctctcttattttggtctttcaacagtattttgtagttttcagagcatgaattttacactatttatgttaaattttttcctaagtattctttttgaggttactgtgaatggaattgtttccttaatttcattctcatttggtcattgctactgtataggaaaataattgacttttgtgtcttgattttgtgtcctgaaaccttgctgaacttaatagttctaattgttttttagtagattcttc

SEQ ID NO: 5958 - protein, 57 aa, Homo sapiens
MGCLSYFGLSTVFCSFQSMNFTLFMLNFFLSILFEVTVNGIVSLISFSFGHCYCIGK

SEQ ID NO: 5959 - DNA, 680 bp, Homo sapiens
gtcagttggtcacgtggttgttcggagcgggcgagcggagttagcagggctttactgcagagcgcgccgggcactccagcgaccgtggggatcagcgtaggtgagctgtggccttttgcgaggtgctgcagccatagctacgtgcgttcgctacgaggattgagcgtctccacccagtaagtgggcaagaggcggcaggaagtgggtacgcaggggcgcaaggcgcacagcctctagacgactcgctttccctccggccaacctctgaagccgcgtcctactttgacagctgcagggccgcggcctggtcttctgtgcttcaccatctacataatgaatcccagtatgaagcagaaacaagaagaaatcaaagagaatataaagaatagttctgtcccaagaagaactctgaagatgattcagccttctgcatctggatctcttgttggaagagaaaatgagctgtccgcaggcttgtccaaaaggaaacatcggaatgaccacttaacatctacaacttccagccctggggttattgtcccagaatctagtgaaaataaaaatcttggaggagtcacccaggagtcatttgatcttatgattaaagaaaatccatcctctcagtattggaaggaagtggcagaaaaacggagaaaggcgctgtatgaagcacttaagga

SEQ ID NO: 5960 - protein, 114 aa, Homo sapiens
MNPSMKQKQEEIKENIKNSSVPRRTLKMIQPSASGSLVGRENELSAGLSKRKHRNDHLTSTTSSPGVIVPESSENKNLGGVTQESFDLMIKENPSSQYWKEVAEKRRKALYEAL

SEQ ID NO: 5961 - DNA, 1212 bp, Homo sapiens
gtcagttggtcacgtggttgttcggagcgggcgagcggagttagcagggctttactgcagagcgcgccgggcactccagcgaccgtggggatcagcgtaggtgagctgtggccttttgcgaggtgctgcagccatagctacgtgcgttcgctacgaggattgagcgtctccacccagtaagtgggcaagaggcggcaggaagtgggtacgcaggggcgcaaggcgcacagcctctagacgactcgctttccctccggccaacctctgaagccgcgtcctactttgacagctgcagggccgcggcctggtcttctgtgcttcaccatctacataatgaatcccagtatgaagcagaaacaagaagaaatcaaagagaatataaagaatagttctgtcccaagaagaactctgaagatgattcagccttctgcatctggatctcttgttggaagagaaaatgagctgtccgcaggcttgtccaaaaggaaacatcggaatgaccacttaacatctacaacttccagccctggggttattgtcccagaatctagtgaaaataaaaatcttggaggagtcacccaggagtcatttgatcttatgattaaagaaaatccatcctctcagtattggaaggaagtggcagaaaaacggagaaaggcgctgtatgaagcacttaaggaaaatgagaaacttcataaagaaattgaacaaaaggacaatgaaattgcccgcctgaaaaaggagaataaagaactggcagaagtagcagaacatgtacagtatatggcagagctaatagagagactgaatggtgaacctctggataattttgaatcactggataatcaggaatttgattctgaagaagaaactgttgaggattctctagtggaagactcagaaattggcacgtgtgctgaaggaactgtatcttcctctacggatgcaaagccatgtatatgaaatgcattaatatttgactgttgagaattttactgccgaagtttacctccactagttctttgtagcagagtacataactacataatgccaactctggaatcaaatttccttgtttgaatcctgggaccctattgcattaaagtacaaatactatgtatttttaatctatgatggtttatgtgaataggattttctcagttgtcagccatgacttatgtttattactaaataaacttcaaactcctgttg

SEQ ID NO: 5962 - protein, 209 aa, Homo sapiens; identical to SEQ ID NO: 707

SEQ ID NO: 5963 - DNA, 1023 bp, Homo sapiens
gtcagttggtcacgtggttgttcggagcgggcgagcggagttagcagggctttactgcagagcgcgccgggcactccagcgaccgtggggatcagcgtaggtgagctgtggccttttgcgaggtgctgcagccatagctacgtgcgttcgctacgaggattgagcgtctccacccatcttctgtgcttcaccatctacataatgaatcccagtatgaagcagaaacaagaagaaatcaaagagaatataaagaatagttctgtcccaagaagaactctgaagatgattcagccttctgcatctggatctcttgttggaagagaaaatgagctgtccgcaggcttgtccaaaaggaaacatcggaatgaccacttaacatctacaacttccagccctggggttattgtcccagaatctagtgaaaataaaaatcttggaggagtcacccaggagtcatttgatcttatgattaaagaaaatccatcctctcagtattggaaggaagtggcagaaaaacggagaaaggcgctgtatgaagcacttaaggaaaaggagaataaagaactggcagaagtagcagaacatgtacagtatatggcagagctaatagagagactgaatggtgaacctctggataattttgaatcactggataatcaggaatttgattctgaagaagaaactgttgaggattctctagtggaagactcagaaattggcacgtgtgctgaaggaactgtatcttcctctacggatgcaaagccatgtatatgaaatgcattaatatttgactgttgagaattttactgccgaagtttacctccactagttctttgtagcagagtacataactacataatgccaactctggaatcaaatttccttgtttgaatcctgggaccctattgcattaaagtacaaatactatgtatttttaatctatgatggtttatgtgaataggattttctcagttgtcagccatgacttatgtttattactaaataaacttcaaactcctgttg

SEQ ID NO: 5964 - protein, 190 aa, Homo sapiens
MNPSMKQKQEEIKENIKNSSVPRRTLKMIQPSASGSLVGRENELSAGLSKRKHRNDHLTSTTSSPGVIVPESSENKNLGGVTQESFDLMIKENPSSQYWKEVAEKRRKALYEALKEKENKELAEVAEHVQYMAELIERLNGEPLDNFESLDNQEFDSEEETVEDSLVEDSEIGTCAEGTVSSSTDAKPCI

SEQ ID NO: 5965 - DNA, 969 bp, Homo sapiens
gtcagttggtcacgtggttgttcggagcgggcgagcggagttagcagggctttactgcagagcgcgccgggcactccagcgaccgtggggatcagcgtaggtgagctgtggccttttgcgaggtgctgcagccatagctacgtgcgttcgctacgaggattgagcgtctccacccatcttctgtgcttcaccatctacataatgaatcccagtatgaagcagaaacaagaagaaatcaaagagaatataaagaatagttctgtcccaagaagaactctgaagatgattcagccttctgcatctggatctcttgttggaagagaaaatgagctgtccgcaggcttgtccaaaaggaaacatcggaatgaccacttaacatctacaacttccagccctggggttattgtcccagaatctagtgaaaataaaaatcttggaggagtcacccaggagtcatttgatcttatgattaaagaaaatccatcctctcagtattggaaggaagtggcagaaaaacggagaaaggcgctgtatgaagcacttaaggaaaatgagaaaagactgaatggtgaacctctggataattttgaatcactggataatcaggaatttgattctgaagaagaaactgttgaggattctctagtggaagactcagaaattggcacgtgtgctgaaggaactgtatcttcctctacggatgcaaagccatgtatatgaaatgcattaatatttgactgttgagaattttactgccgaagtttacctccactagttctttgtagcagagtacataactacataatgccaactctggaatcaaatttccttgtttgaatcctgggaccctattgcattaaagtacaaatactatgtatttttaatctatgatggtttatgtgaataggattttctcagttgtcagccatgacttatgtttattactaaataaacttcaaactcctgttg

SEQ ID NO: 5966 - protein, 172 aa, Homo sapiens
MNPSMKQKQEEIKENIKNSSVPRRTLKMIQPSASGSLVGRENELSAGLSKRKHRNDHLTSTTSSPGVIVPESSENKNLGGVTQESFDLMIKENPSSQYWKEVAEKRRKALYEALKENEKRLNGEPLDNFESLDNQEFDSEEETVEDSLVEDSEIGTCAEGTVSSSTDAKPCI

SEQ ID NO: 5967 - DNA, 1017 bp, Homo sapiens
gtcagttggtcacgtggttgttcggagcgggcgagcggagttagcagggctttactgcagagcgcgccgggcactccagcgaccgtggggatcagcgtaggtgagctgtggccttttgcgaggtgctgcagccatagctacgtgcgttcgctacgaggattgagcgtctccacccatcttctgtgcttcaccatctacataatgaatcccagtatgaagcagaaacaagaagaaatcaaagagaatataaagaatagttctgtcccaagaagaactctgaagatgattcagccttctgcatctggatctcttgttggaagagaaaatgagctgtccgcaggcttgtccaaaaggaaacatcggaatgaccacttaacatctacaacttccagccctggggttattgtcccagaatctagtgaaaataaaaatcttggaggagtcacccaggagtcatttgatcttatgattaaagaaaatccatcctctcagtattggaaggaagtggcagaaaaacggagaaaggcgctgtatgaagcacttaaggaaaatgagaaaagactgaatggtgaacctctggataattttgaatcactggataatcaggaatttgattctgaagaagaaactgttgaggattctctagtggaagactcagaaattggcacgtgtgctgaaggaactgtatcttcctctacggatgcaaagccatgtatatgaaatgcattaatatttgactgttgagaattttactgccgaagtttacctccactagttctttgtagcagagtacataactacataatgccaactctggaatcaaatttccttgtttgaatcctgggaccctattgcattaaagtacaaatactatgtatttttaatctatgatggtttatgtgaataggattttctcagttgtcagccatgacttatgtttattactaaataaacttcaaactcctgttgaacattgtgtataacttagaataatgaaatataaggagtatgtgtaga

SEQ ID NO: 5968 - protein, 172 aa, Homo sapiens; identical to SEQ ID NO: 5966

SEQ ID NO: 5969 - DNA, 1071 bp, Homo sapiens
gtcagttggtcacgtggttgttcggagcgggcgagcggagttagcagggctttactgcagagcgcgccgggcactccagcgaccgtggggatcagcgtaggtgagctgtggccttttgcgaggtgctgcagccatagctacgtgcgttcgctacgaggattgagcgtctccacccatcttctgtgcttcaccatctacataatgaatcccagtatgaagcagaaacaagaagaaatcaaagagaatataaagaatagttctgtcccaagaagaactctgaagatgattcagccttctgcatctggatctcttgttggaagagaaaatgagctgtccgcaggcttgtccaaaaggaaacatcggaatgaccacttaacatctacaacttccagccctggggttattgtcccagaatctagtgaaaataaaaatcttggaggagtcacccaggagtcatttgatcttatgattaaagaaaatccatcctctcagtattggaaggaagtggcagaaaaacggagaaaggcgctgtatgaagcacttaaggaaaaggagaataaagaactggcagaagtagcagaacatgtacagtatatggcagagctaatagagagactgaatggtgaacctctggataattttgaatcactggataatcaggaatttgattctgaagaagaaactgttgaggattctctagtggaagactcagaaattggcacgtgtgctgaaggaactgtatcttcctctacggatgcaaagccatgtatatgaaatgcattaatatttgactgttgagaattttactgccgaagtttacctccactagttctttgtagcagagtacataactacataatgccaactctggaatcaaatttccttgtttgaatcctgggaccctattgcattaaagtacaaatactatgtatttttaatctatgatggtttatgtgaataggattttctcagttgtcagccatgacttatgtttattactaaataaacttcaaactcctgttgaacattgtgtataacttagaataatgaaatataaggagtatgtgtaga

SEQ ID NO: 5970 - protein, 190 aa, Homo sapiens; identical to SEQ ID NO: 5964

SEQ ID NO: 5971 - DNA, 994 bp, Homo sapiens
gacgcgcggggccacactgcccgccccctagcctggcgctgggcctccgggacaagttggctgggtccgggcttggggactgcaacgcggtcttctgtgcttcaccatctacataatgaatcccagtatgaagcagaaacaagaagaaatcaaagagaatataaagaatagttctgtcccaagaagaactctgaagatgattcagccttctgcatctggatctcttgttggaagagaaaatgagctgtccgcaggcttgtccaaaaggaaacatcggaatgaccacttaacatctacaacttccagccctggggttattgtcccagaatctagtgaaaataaaaatcttggaggagtcacccaggagtcatttgatcttatgattaaagaaaatccatcctctcagtattggaaggaagtggcagaaaaacggagaaaggcgctgtatgaagcacttaaggaaaatgagaaacttcataaagaaattgaacaaaaggacaatgaaattgcccgcctgaaaaaggagaataaagaactggcagaagtagcagaacatgtacagtatatggcagagctaatagagagactgaatggtgaacctctggataattttgaatcactggataatcaggaatttgattctgaagaagaaactgttgaggattctctagtggaagactcagaaattggcacgtgtgctgaaggaactgtatcttcctctacggatgcaaagccatgtatatgaaatgcattaatatttgactgttgagaattttactgccgaagtttacctccactagttctttgtagcagagtacataactacataatgccaactctggaatcaaatttccttgtttgaatcctgggaccctattgcattaaagtacaaatactatgtatttttaatctatgatggtttatgtgaataggattttctcagttgtcagccatgacttatgtttattactaaataaacttcaaactcctgttg

SEQ ID NO: 5972 - protein, 209 aa, Homo sapiens; identical to SEQ ID NO: 707

SEQ ID NO: 5973 - DNA, 1044 bp, Homo sapiens
gacgcgcggggccacactgcccgccccctagcctggcgctgggcctccgggacaagttggctgggtccgggcttggggactgcaacgcggtcttctgtgcttcaccatctacataatgaatcccagtatgaagcagaaacaagaagaaatcaaagagaatataaagaatagttctgtcccaagaagaactctgaagatgattcagccttctgcatctggatctcttgttggaagagaaaatgagctgtccgcaggcttgtccaaaaggaaacatcggaatgaccacttaacatctacaacttccagccctggggttattgtcccagaatctagtgaaaataaaaatcttggaggagtcacccaggagtcatttgatcttatgattaaagaaaatccatcctctcagtattggaaggaagtggcagaaaaacggagaaaggcgctgtatgaagcacttaaggaaaatgagaaacttcataaagaaattgaacaaaaggacaatgaaattgcccgcctgaaaaaggagaataaagaactggcagaagtagcagaacatgtacagtatatggcagagctaatagagagactgaatggtgaacctctggataattttgaatcactggataatcaggaatttgattctgaagaagaaactgttgaggattctctagtggaagactcagaaattggcacgtgtgctgaaggaactgtatcttcctctacggatgcaaagccatgtatatgaaatgcattaatatttgactgttgagaattttactgccgaagtttacctccactagttctttgtagcagagtacataactacataatgccaactctggaatcaaatttccttgtttgaatcctgggaccctattgcattaaagtacaaatactatgtatttttaatctatgatggtttatgtgaataggattttctcagttgtcagccatgacttatgtttattactaaataaacttcaaactcctgttgaacattgtgtataacttagaataatgaaatataaggagtatgtgtagaaa

SEQ ID NO: 5974 - protein, 209 aa, Homo sapiens; identical to SEQ ID NO: 707

SEQ ID NO: 5975 - DNA, 726 bp, Homo sapiens
attataccttaaatctgtctttgaatcaggaaagttaagatgctgctctttaggatggacctgggcataccctagtatctgtttattttgctttttctggtgactatttaatccaggacaatatgtttagaaattttaaaccagttttagaaattggtttaaaatacattaatttcattttttcagctataattattatgtgtgtatatatgtaaaatatagatatcaagagtcattaactttagtcaccttagtcattgacagggctgagtttggattaagagagaaaaaataatagttctactgtacaatagtataatttttatgattgtaagtattttaaacctagactccaccttcgggggtgcaaaccatattgttttttaattactagtcttctgtgcttcaccatctacataatgaatcccagtatgaagcagaaacaagaagaaatcaaagagaatataaagaatagttctgtcccaagaagaactctgaagatgattcagccttctgcatctggatctcttgttggaagagaaaatgagctgtccgcaggcttgtccaaaaggaaacatcggaatgaccacttaacatctacaacttccagccctggggttattgtcccagaatctagtgaaaataaaaatcttggaggagtcacccaggagtcatttgatcttatgattaaagaaaatccatcctctcagtattggaaggaagtgg

SEQ ID NO: 5976 - protein, 101 aa, Homo sapiens
MNPSMKQKQEEIKENIKNSSVPRRTLKMIQPSASGSLVGRENELSAGLSKRKHRNDHLTSTTSSPGVIVPESSENKNLGGVTQESFDLMIKENPSSQYWKE

SEQ ID NO: 5977 - DNA, 462 bp, Homo sapiens
aaagaaaaaagaaaaattatctaaattttaaaagcagaagatagccaaagaaaatttatattacctcccgaagagctgtgactacaggtgtgcaccaccacgcccaactaatcttttgtatttttagtagacaaagcattttgccatgttagccaggctgatgttgaactcctgtcctcaagtgatctgcctgcctcagcctcccaaagtgtagggattacaggcgtagccatcacacccggctgacatgctatactaacatttgatacctaattaaaaatcagactcatcttccacaggaaattcctacaaattctccatcactagggtcagttcccagggactagaagcttaaaatatgtcccccaaaacagcccctacatgacccttaggcaactactaatctgctttctcattatactttgtagttttgtgattttaaataaatagaagcatacagta

SEQ ID NO: 5978 - protein, 35 aa, Homo sapiens
PKKIYITSRRAVTTGVHHHAQLIFCIFSRQSILPC

SEQ ID NO: 5979 - DNA, 2357 bp, Homo sapiens
ttgtgaaatgccaagtctcgtggtactctagacctaaatgtcaaaacacgatttaacctatttttcccccataggctactgaaagcattaaaatgctggtgacattgtgtcaatctgatactgaagaaatcagaaatgtggcctcagaaaccctcttgtctctgggagaagatgggcggctggcatatgaacaattggacaaatttcctcgagactgtgttaaagtcggaggtcgtcatggaactgaagttgccacagccttttaattacaggttaactgcctaacagctgtcttaatatctggcccttttcatcaggatggtgctgtggtttgggctggaaattgtttagagcctgagagacacgacaactgaaataaaaatgtaggccaggtgcagtggctcatgcctgtaatcccagtactttgggaggccaacgcaggagaattgcttaagcccaggaggttcaagaccaacctgggcaacatagcaaggccctgtctctacaaaaaaaatagtttaattagtcaggcgtggtggcatgcacctgtagtcccagctacttgggaggctaaggtgggaggattgcttgagcccagaagattcaggctgcagtgagccataattgccccactgcactccagactgggtgacagagcaaaaccctgtctcaaaaaacaaaacaacaacaacaactaaaaaaacatgttatagaaagaattcagagtctcgtttcacagtacctatctacttttcctttggccaatatagaatagggctatggtataattcaaatatattacatcgtcgattgtgtctaataatactcagtgaaagagtccatcttatcttaatatgtatgaaatttaaaaatagccatctttgtacttttttgcaagtttctctataagcttgaaatagtcatgtgatacttcgacaaacatcatatgccttgcagtttttctcggtcgtgttctcagggttgagtagtccccttagctacctaactttactttcaatacaaagcacaaaaaagaatatcttcaaataaaagtttgcctgcagaacctggcaaaatgacccattaggagagtttagatgttttaattttatgtgctcccagctactctggagtctgaggtgggaggatcacttgaggcagaggttgcagtaagctgagattacactactgcactccagcccatgtgacagaggaatgagagccagtctcaaaaaaaaaaacaaaaaactcccataatttattttgtttcttttccccatcctgaaaattcccaaatcatgtttccattatggaaaaatgataagtaaatgactaagaactacattaagattatgcctatacacttaaacaaaaaactcaaagcttatgcttttttttttttaattaatgagagctattttttatgatattcttaccataggggtgttttgctgctaagacaaatcaaaaccaaaagctgtagattcacaaacctgtgatgctctttgaggtggaggaacctagaagtcagagaaatcctaatggagtaggagtggaggaacatttaaagtggtccctccttctgtaaaaatgaccgtgggattagaaagaaggacatcctgaggggtggttactgcccccagggaaatcactcactggtaggattccctggccaaatagttcaaacatcaggtcccattattgcttcagtatcagagatgcaagttcattaagcaaagtacaagaccattcagtagctcttattaaaatatcttttcttcctctaaagagtgtacaaggtggggtatgccaaggtatcaaaacaatatatgtgagtgtaatttaaactgtggaatatcaactgtactatggacgtgtttgtatcatttagatgtcattttaaatatttacattttagcaagacttttaaaaaggactcatttcatttcaaagtgcaaattgtttgccaggcttctggcaaatggttctttcaactgtgaacttatcgtgtacatatctgtatatttataaatattatatatattcatacatccttcactttaaaggtacattgtacagtctgtagttaggaggtatagcctatagcttatgttaaatggttgaaatggttctttttatagaaagtcaaacacagatgttacaggattttgtgtttggtttgtcatttttttattttttattttgactattgcatgagtaattaattccagatcttttgtattcacttctgtattttatgtttggttgaggggtgcttttagttgtgtggcatttgtattcattgatctttcagtcatgtaagttaaaataaaaattatttttgaattactagcatc

SEQ ID NO: 5980 - protein, 57 aa, Homo sapiens
MLVTLCQSDTEEIRNVASETLLSLGEDGRLAYEQLDKFPRDCVKVGGRHGTEVATAF

SEQ ID NO: 5981 - DNA, 5597 bp, Homo sapiens
tccgcgctccgccaccctcgcgcccgccagccccgcaacttcaccccgcgcgccgcagctgctgcgagcggacgcggcagggcagccggcgctggggacagctcgcgtccacccgacttcctcccggggtccccttcacccaagtgagccagctcaggctgtctgcaaagccggaggtgcgggcagctccgggcattgcattggtgcggaggcttttatatgccagagaaccctgagtgtgcccctgacatgacaaggagccgtcgtcgttaggactaccgaccagactcccggaaatcatgttggtaggatcccagtctttttcgcctggagggcccaatgggatcattagaagccagtcctttgcgggtttcagcggcctccaggaaaggcgatccaggtgtaactccttcattgaaaattcctccgctctcaagaagcctcaggccaaactgaagaaaatgcacaatttaggccacaaaaacaacaatccccccaaagagcctcagcctaaaagggtggaagaagtctacagggccttgaaaaatggacttgatgaatatctggaggttcaccagacggagctggacaagttgacagctcagttaaaagatatgaaaagaaactctcgcctgggtgtactgtatgacctagacaagcaaattaaaacaattgaaagatacatgagacgcctggagtttcatataagtaaggtagatgaactctatgaagcttattgtatccagcgacgcctccaggatggtgccagcaaaatgaagcaagccttcgcaacatcccctgccagcaaagctgcccgggagagtctgacagagatcaatcggagcttcaaggagtacacagagaatatgtgcaccattgaagtggagctagagaatctgctgggagaattctccatcaagatgaaaggtctggctggctttgcacgcctctgtcctggagatcaatatgaaattttcatgaagtatggccggcagcggtggaaactgaaaggcaaaatagaagtaaatggcaagcagagctgggatggagaagaaacagtttttctgcccctgatagttgggttcatctccatcaaggtcacggagctcaaagggctagcaactcacatcctggtaggtagcgtgacctgtgagaccaaagagctgtttgcagcccgacctcaggtagtggctgtcgacatcaatgaccttggtaccatcaaactgaacctggaaatcacctggtatccatttgacgtggaggacatgaccgcatcctcaggcgctgggaacaaggcagcagcccttcagaggagaatgtccatgtacagccagggtaccccggaaacgcccaccttcaaagaccactccttctttaggtggctgcatccttccccagacaagcccaggcggctgtctgtcttgagtgccttgcaagacactttctttgccaagctgcaccgcagccgctccttcagtgacctgccctccctcaggccgagtcccaaggccgtgctagagctctattcaaatctacctgatgacatctttgaaaatggaaaggcagccgaggagaaaatgccactgtcgctcagcttcagtgacctgcccaacggggactgcgccctcacctcccactcaacaggctccccttccaactcaacaaatccagaaattaccatcacccctgcggagtttaacctcagcagcttggcctcccagaatgagggtatggatgacaccagctcagcatcttccaggaactccctgggagaaggccaagagccaaagtcacacctgaaggaggaagacccagaggagcccagaaaacctgcctcggccccatctgaggcttgccgccgacagtcctcaggtgctggggctgagcacctgttccttgagaatgatgttgcagaagcacttctgcaagagtctgaggaggcctctgagctcaagcctgtggaactggacacttcggaaggaaacatcacaaagcagctggtcaagaggctcacatctgcagaggtgccaatggccacagacaggctgctctctgagggttctgttggtggagaatctgaaggctgcagatcctttctagatggaagcttagaggatgcttttaatgggcttttacttgcattagaaccacataaagagcagtataaagagtttcaggatctgaaccaagaagtcatgaatttggatgatattctaaaatgcaagccagcagtaagccgcagcaggtcttccagtttaagtctcacagttgaaagtgctttagaaagctttgatttcctgaacacctctgattttgacgaggaggaggatggtgatgaggtttgtaatgttggcggaggtgctgactcagtattttcagacactgagactgagaaacacagttacaggtcggttcacccagaagccagggggcatctcagtgaagcgctcactgaagacacaggagttgggaccagtgtggcaggaagtcctctcccactgaccacaggcaacgagagcctggacatcaccatcgtcaggcacctccagtactgcacccaactcgtgcagcaaattgttttctcaagcaaaaccccatttgtggcaagaagtctcttagagaagctttctaggcagatccaagtgatggagaaactcgcagctgtcagtgatgagaacataggaaatatcagttctgttgtggaagccataccagaatttcacaaaaagctgtctttgctgtcattctggaccaagtgctgcagccctgttggtgtctaccacagcccagcggacagagtgatgaagcagctggaggccagctttgccagaactgtcaacaaagaatatccaggacttgcagacccagtgtttcgaaccctggtgtcccaaattctggaccgggctgagcctctgctttcctccagcctgtcctcggaagtcgtcactgttttccagtattacagttacttcaccagccacggcgtcagtgacctggagagttacctgagccagctggccaggcaagtttccatggttcagactctgcaatcactaagagatgaaaaactgctacaaaccatgagtgaccttgctcccagcaacctcctggcccagcaggaagtactcaggactctggctctgctattaaccagagaggacaacgaagttagtgaggctgtgacgctttacttggcagcagcctccaaaaatcagcatttcagggaaaaggccttgctctattactgtgaagcactaacaaagacaaacctccagctccagaaagcagcttgcctggctctgaaaatccttgaggctactgaaagcattaaaatgctggtgacattgtgtcaatctgatactgaagaaatcagaaatgtggcctcagaaaccctcttgtctctgggagaagatgggcggctggcatatgaacaattggacaaatttcctcgagactgtgttaaagtcggaggtcgtcatggaactgaagttgccacagccttttaattacaggttaactgcctaacagctgtcttaatatctggcccttttcatcaggatggtgctgtggtttgggctggaaattgtttagagcctgagagacacgacaactgaaataaaaatgtaggccaggtgcagtggctcatgcctgtaatcccagtactttgggaggccaacgcaggagaattgcttaagcccaggaggttcaagaccaacctgggcaacatagcaaggccctgtctctacaaaaaaaatagtttaattagtcaggcgtggtggcatgcacctgtagtcccagctacttgggaggctaaggtgggaggattgcttgagcccagaagattcaggctgcagtgagccataattgccccactgcactccagactgggtgacagagcaaaaccctgtctcaaaaaacaaaacaacaacaacaactaaaaaaacatgttatagaaagaattcagagtctcgtttcacagtacctatctacttttcctttggccaatatagaatagggctatggtataattcaaatatattacatcgtcgattgtgtctaataatactcagtgaaagagtccatcttatcttaatatgtatgaaatttaaaaatagccatctttgtacttttttgcaagtttctctataagcttgaaatagtcatgtgatacttcgacaaacatcatatgccttgcagtttttctcggtcgtgttctcagggttgagtagtccccttagctacctaactttactttcaatacaaagcacaaaaaagaatatcttcaaataaaagtttgcctgcagaacctggcaaaatgacccattaggagagtttagatgttttaattttatgtgctcccagctactctggagtctgaggtgggaggatcacttgaggcagaggttgcagtaagctgagattacactactgcactccagcccatgtgacagaggaatgagagccagtctcaaaaaaaaaaacaaaaaactcccataatttattttgtttcttttccccatcctgaaaattcccaaatcatgtttccattatggaaaaatgataagtaaatgactaagaactacattaagattatgcctatacacttaaacaaaaaactcaaagcttatgcttttttttttttaattaatgagagctattttttatgatattcttaccataggggtgttttgctgctaagacaaatcaaaaccaaaagctgtagattcacaaacctgtgatgctctttgaggtggaggaacctagaagtcagagaaatcctaatggagtaggagtggaggaacatttaaagtggtccctccttctgtaaaaatgaccgtgggattagaaagaaggacatcctgaggggtggttactgcccccagggaaatcactcactggtaggattccctggccaaatagttcaaacatcaggtcccattattgcttcagtatcagagatgcaagttcattaagcaaagtacaagaccattcagtagctcttattaaaatatcttttcttcctctaaagagtgtacaaggtggggtatgccaaggtatcaaaacaatatatgtgagtgtaatttaaactgtggaatatcaactgtactatggacgtgtttgtatcatttagatgtcattttaaatatttacattttagcaagacttttaaaaaggactcatttcatttcaaagtgcaaattgtttgccaggcttctggcaaatggttctttcaactgtgaacttatcgtgtacatatctgtatatttataaatattatatatattcatacatccttcactttaaaggtacattgtacagtctgtagttaggaggtatagcctatagcttatgttaaatggttgaaatggttctttttatagaaagtcaaacacagatgttacaggattttgtgtttggtttgtcatttttttattttttattttgactattgcatgagtaattaattccagatcttttgtattcacttctgtattttatgtttggttgaggggtgcttttagttgtgtggcatttgtattcattgatctttcagtcatgtaagttaaaataaaaattatttttgaattactagcatc

SEQ ID NO: 5982 - protein, 1068 aa, Homo sapiens
MLVGSQSFSPGGPNGIIRSQSFAGFSGLQERRSRCNSFIENSSALKKPQAKLKKMHNLGHKNNNPPKEPQPKRVEEVYRALKNGLDEYLEVHQTELDKLTAQLKDMKRNSRLGVLYDLDKQIKTIERYMRRLEFHISKVDELYEAYCIQRRLQDGASKMKQAFATSPASKAARESLTEINRSFKEYTENMCTIEVELENLLGEFSIKMKGLAGFARLCPGDQYEIFMKYGRQRWKLKGKIEVNGKQSWDGEETVFLPLIVGFISIKVTELKGLATHILVGSVTCETKELFAARPQVVAVDINDLGTIKLNLEITWYPFDVEDMTASSGAGNKAAALQRRMSMYSQGTPETPTFKDHSFFRWLHPSPDKPRRLSVLSALQDTFFAKLHRSRSFSDLPSLRPSPKAVLELYSNLPDDIFENGKAAEEKMPLSLSFSDLPNGDCALTSHSTGSPSNSTNPEITITPAEFNLSSLASQNEGMDDTSSASSRNSLGEGQEPKSHLKEEDPEEPRKPASAPSEACRRQSSGAGAEHLFLENDVAEALLQESEEASELKPVELDTSEGNITKQLVKRLTSAEVPMATDRLLSEGSVGGESEGCRSFLDGSLEDAFNGLLLALEPHKEQYKEFQDLNQEVMNLDDILKCKPAVSRSRSSSLSLTVESALESFDFLNTSDFDEEEDGDEVCNVGGGADSVFSDTETEKHSYRSVHPEARGHLSEALTEDTGVGTSVAGSPLPLTTGNESLDITIVRHLQYCTQLVQQIVFSSKTPFVARSLLEKLSRQIQVMEKLAAVSDENIGNISSVVEAIPEFHKKLSLLSFWTKCCSPVGVYHSPADRVMKQLEASFARTVNKEYPGLADPVFRTLVSQILDRAEPLLSSSLSSEVVTVFQYYSYFTSHGVSDLESYLSQLARQVSMVQTLQSLRDEKLLQTMSDLAPSNLLAQQEVLRTLALLLTREDNEVSEAVTLYLAAASKNQHFREKALLYYCEALTKTNLQLQKAACLALKILEATESIKMLVTLCQSDTEEIRNVASETLLSLGEDGRLAYEQLDKFPRDCVKVGGRHGTEVATAF

SEQ ID NO: 5983 - DNA, 1398 bp, Homo sapiens
ctgtctcaaaaaacaaaacaacaacaacaactaaaaaaacatgttatagaaagaattcagagtctcgtttcacagtacctatctacttttcctttggccaatatagaatagggctatggtataattcaaatatattacatcgtcgattgtgtctaataatactcagtgaaagagtccatcttatcttaatatgtatgaaatttaaaaatagccatctttgtacttttttgcaagtttctctataagcttgaaatagtcatgtgatacttcgacaaacatcatatgccttgcagtttttctcggtcgtgttctcagggttgagtagtccccttagctacctaactttactttcaatacaaagcacaaaaaagaatatcttcaaataaaagtttgcctgcagaacctggcaaaatgacccattaggagagtttagatgttttaattttatgtgctcccagctactctggagtctgaggtgggaggatcacttgaggcagaggttgcagtaagctgagattacactactgcactccagcccatgtgacagaggaatgagagccagtctcaaaaaaaaaaacaaaaaactcccataatttattttgtttcttttccccatcctgaaaattcccaaatcatgtttccattatggaaaaatgataagtaaatgactaagaactacattaagattatgcctatacacttaaacaaaaaactcaaagcttatgcttttttttttttaattaatgagagctattttttatgatattcttaccataggggtgttttgctgctaagacaaatcaaaaccaaaagctgtagattcacaaacctgtgatgctctttgaggtggaggaacctagaagtcagagaaatcctaatggagtaggagtggaggaacatttaaagtggtccctccttctgtaaaaatgaccgtgggattagaaagaaggacatcctgaggggtggttactgcccccagggaaatcactcactggtaggattccctggccaaatagttcaaacatcaggtcccattattgcttcagtatcagagatgcaagttcattaagcaaagtacaagaccattcagtagctcttattaaaatatcttttcttcctctaaagagtgtacaaggtggggtatgccaaggtatcaaaacaatatatgtgagtgtaatttaaactgtggaatatcaactgtactatggacgtgtttgtatcatttagattcatttttttattttttattttgactattgcatgagtaattaattccagatcttttgtattcacttctgtattttatgtttggttgaggggtgcttttagttgtgtggcatttgtattcattgatctttcagtcatgtaagttaaaataaaaattatttttgaattact

SEQ ID NO: 5984 - protein, 36 aa, Homo sapiens
MPRYQNNICECNLNCGISTVLWTCLYHLDSFFYFLF

SEQ ID NO: 5985 - DNA, 2433 bp, Homo sapiens
cgcaagaatgcatacaaactccagggctgctctctcctggagagggagggaggggatttaaaaacctgcagcaacatgggggaggaggctgtttgtccttctctctctggggaagtaactcgctcaaactgccttccttgctgagctgcttcgcgtagctttgaggaaggtctagtgaaattggtctttccattacatctggatgtactaccagagagttctgctgctgttgttttttttagcttttctttctttgagtctttaaagggcaattgtcgacactctgcaaacataccgatttgttgtctgcccactttggagtcttcaatctgggcagtaactatttaccctttttcctgctagcctgtccccctctctggattgaagtcacctgctaagacaatggactaccgaccagactcccggaaatcatgttggtaggatcccagtctttttcgcctggagggcccaatgggatcattagaagccagtcctttgcgggtttcagcggcctccaggaaaggcgatccaggtgtaactccttcattgaaaattcctccgctctcaagaagcctcaggccaaactgaagaaaatgcacaatttaggccacaaaaacaacaatccccccaaagagcctcagcctaaaagggtggaagaagtctacagggccttgaaaaatggacttgatgaatatctggaggttcaccagacggagctggacaagttgacagctcagttaaaagatatgaaaagaaactctcgcctgggtgtactgtatgacctagacaagcaaattaaaacaattgaaagatacatgagacgcctggagtttcatataagtaaggtagatgaactctatgaagcttattgtatccagcgacgcctccaggatggtgccagcaaaatgaagcaagccttcgcaacatcccctgccagcaaagctgcccgggagagtctgacagagatcaatcggagcttcaaggagtacacagagaatatgtgcaccattgaagtggagctagagaatctgctgggagaattctccatcaagatgaaaggtctggctggctttgcacgcctctgtcctggagatcaatatgaaattttcatgaagtatggccggcagcggtggaaactgaaaggcaaaatagaagtaaatggcaagcagagctgggatggagaagaaacagtttttctgcccctgatagttgggttcatctccatcaaggtcacggagctcaaagggctagcaactcacatcctggtaggtagcgtgacctgtgagaccaaagagctgtttgcagcccgacctcaggtagtggctgtcgacatcaatgaccttggtaccatcaaactgaacctggaaatcacctggtatccatttgacgtggaggacatgaccgcatcctcaggcgctgggaacaaggcagcagcccttcagaggagaatgtccatgtacagccagggtaccccggaaacgcccaccttcaaagaccactccttcttttcaaatctacctgatgacatctttgaaaatggaaaggcagccgaggagaaaatgccactgtcgctcagcttcagtgacctgcccaacggggactgcgccctcacctcccactcaacaggctccccttccaactcaacaaatccagaaattaccatcacccctgcggagtttaacctcagcagcttggcctcccagaatgagggtatggatgacaccagctcagcatcttccaggaactccctgggagaaggccaagagccaaagtcacacctgaaggaggaagacccagaggagcccagaaaacctgcctcggccccatctgaggcttgccgccgacagtcctcaggtgctggggctgagcacctgttccttgagaatgatgttgcagaagcacttctgcaagagtctgaggaggcctctgagctcaagcctgtggaactggacacttcggaaggaaacatcacaaagcagctggtcaagaggctcacatctgcagaggtgccaatggccacagacaggctgctctctgagggttctgttggtggagaatctgaaggctgcagatcctttctagatggaagcttagaggatgcttttaatgggcttttacttgcattagaaccacataaagagcagtataaagagtttcaggatctgaaccaagaagtcatgaatttggatgatattctaaaaaagtagagaagatcctctaatggatcccagtgtgcccatccctcaacctcctcagtgatcaactcatggccaatcttgtttcctattcttcaacctgctgacttccctctggattcttctgcaaccagtcccagatattgtgccattttatccatggttgtacttcttttttggatataaagatttttaaatgcattttttaaatgctaacaaaaaataaaaacttgaaaca

SEQ ID NO: 5986 - protein, 591 aa, Homo sapiens; identical to SEQ ID NO: 709

SEQ ID NO: 5987 - DNA, 702 bp, Homo sapiens
gagcacatttttacaaagaaagatctggatgttatttttcttcagtcatggtacttatgatcagccatgatcctggattggcccttggatcaggaaaaaaaaaaaaaaacctgcttacctagtacaatattgggacacctggcaaaatatgaacatagactaattccaggtgacgttagctgaagagccagtgttataaactcactggtgttgagggcttagtaatgcctatgtgacagaatgtctttccattcttagaagaatttagggatgaagagtcctggtgtttgcatcttgctctaaaatggttcaggggctggatgtggtggctcacacctgtaatcccagcacctggaaatttatttttttaatattgaataaatattttgagaagtgaacttgaattagttatcggaatccttgtgtttaacatgaagaaaggccaatccaatggaagtcattagattctgacagaacagtatcatattggagtatatttaaatttctccataataatatattttgtcttctaagattggttttttttcccattcacattttagtgtctttgaaattggggtgcattttacaattgctaccggcagacagctgcctgtacaagctcaaagataatcatagttgttcatgtgtcatctctttgagttgtaattattattatatgcatttatttgccttttaaaa

SEQ ID NO: 5988 - protein, 30 aa, Homo sapiens
MVQGLDVVAHTCNPSTWKFIFLILNKYFEK

SEQ ID NO: 5989 - DNA, 394 bp, Homo sapiens
tgcctgcatctatgtggaacccctgtgtcagggctttcagagctggtgaatgcgcttgaccatcctcagtggctgcaaatatctctcctggaaaacaacagtgaacaaatgcaggggcttctgccaagacctcatgttccgtaaaaatccttcaattagaggatatgaggatagtgcactgattatactatgatactatgagcacacaggaaatgagctggctttaaaaacaatttgagaaaagcttatcacagcctcaagaactcttcttaaggccgggcgtggtggctcacacctgtaatccccagcaagtgctgggattacaggcatgagccactgagcccggcctagaataatgttttttaaatgcataaaataaaatacataggaattg

SEQ ID NO: 5990 - protein, 47 aa, Homo sapiens
MRLTILSGCKYLSWKTTVNKCRGFCQDLMFRKNPSIRGYEDSALIIL

SEQ ID NO: 5991 - DNA, 413 bp, Homo sapiens
aagaaaagaacaaaaaggggggggttaagttttctttttcatttttatacgtctggacttaacttccaggatagctgcaagacccttttgttcctttgccatgagcaggttttaggccgctctgttgggaccatggtgttaccttcgcgattacactggatcagaaacaggccatggagggacaggatccggaggcgccagctcaaccgttgcttagagtccccagaaagctggcccaacctacctatttcacgaaacctgaccctaaagatgtcctgaaaagccctgagacccttcacgtgcagaggctgagagggcaatctaatgactctactgctgaatttgcaaggatacgggtttataaccgttggtaaggactaccgaccagactcccggaaatcatgttggtagga

SEQ ID NO: 5992 - protein, 66 aa, Homo sapiens
MEGQDPEAPAQPLLRVPRKLAQPTYFTKPDPKDVLKSPETLHVQRLRGQSNDSTAEFARIRVYNRW

SEQ ID NO: 5993 - DNA, 1048 bp, Homo sapiens
gtcatgctattgcagcatatgattcatttttataatctggtcttctctttgcccaattcctgaaaggaaaccaggcgacatcatggaaagaaagaatcaaacagctataactgaattcatcatcttgggattctccaacctaaatgaattgcagtttttactattcaccatcttctttctgacttatttctgtactttgggaggaaatatattaattatcttgacgactgtgactgatccacacctgcatacacctatgtattattttctagggaacttggcctttattgacatctgctacaccaccagcaatgtcccccagatgatggtgcacctcctctcaaagaaaaaaagcatttcttatgtggggtgtgtggttcaactttttgcatttgttttctttgtaggatcagagtgtctcctactggcagcaatggcatatgatcgttacattgcaatctgcaatcctttaaggtattcagttattctgagcaaggttctatgcaatcaattagcagcctcatgctgggctgctggtttccttaactcagtggtgcatacagtgttgacattctgcctgcccttctgtggcaacaatcagattaattacttcttctgtgacatcccccctttgctgatcttgtcttgtggaaacacttctgtcaatgagttggcactgctatccactggggtcttcattggttggactcctttcctttgtatcgtactttcctacatttgcataatctccaccatcttgaggatccagtcctcagagggaagacgaaaagccttctctacatgtgcctcccacctggccattgtctttctcttttatggcagcgccatctttacatatgtacggcccatctcaacttactcattaaagaaagataggttggtttcagtgttgtacagtgttgttacccccatgctaaaccctataatttacacattgaggaataaggacatcaaagaagctgtcaaaactatagggagcaagtggcagccaccaatttcctctttggatagtaaactcacttattga

SEQ ID NO: 5994 - protein, 321 aa, Homo sapiens; identical to SEQ ID NO: 711

SEQ ID NO: 5995 - DNA, 385 bp, Homo sapiens
gagctgaaggtaggaaattccaacattctgaagtcttcagcaaatcttagcagatcatctcctcctcacagtcctgtctttagagaacagggtcgatatttcggcttctgcgaactcagatgtcatcttttcttccctaaagtttttaaagttcctattgatatattcccctgcctagagggtttggtggtcgttttcttcctcttaactttattaaggtcatgctattgcagcatatgattcatttttataatctggtcttctctttgcccaattcctgaaaggaaaccaggcgacatcatggaaagaaagaatcaaacagctataactgaattcatcatcttgggattctccaacctaaatgaattgcagtttttactattca

SEQ ID NO: 5996 - protein, 79 aa, Homo sapiens
ELKVGNSNILKSSANLSRSSPPHSPVFREQGRYFGFCELRCHLFFPKVFKVPIDIFPCLEGLVVVFFLLTLLRSCYCSI

SEQ ID NO: 5997 - DNA, 1869 bp, Homo sapiens
agcaatggagaatgtcactacaatgaatgagtttcttctacttggcctgactggtgttcaggagctgcagcctttcttctttgggattttcttaatcatttacctgataaacttgattggaaatggatctatattggtgatggttgttttggaaccacaactccactcccctatgtatttttttctgggaaacctttcttgtctggatatttcttattcttcagtgacactgcccaagctgctcgtaaacctcgtgtgcagtcgcagggctatatcttttctaggctgtatcacccagctacacttcttccactttttgggaagcacagaggccattttactggctatcatggcctttgaccgttttgttgccatctgcaatcctcttcgctacactgtcatcatgaacccccaggtgtgtattctgttggcagctgcggcctggctcatcagcttcttttacgctctgatgcattctgtcatgactgcacacctgagtttttgtggctctcagaaactcaatcacttcttctacgatgtcaagccgctcttagaattggcctgtagtgacacattactcaatcaatggcttctttccattgtcacaggcagcatatccatgggagctttctttctgactcttctctcctgcttctatgtaattggcttccttctgtttaagaacaggtcctgcagaatactccacaaggctctgtccacttgtgcctcccattttatggtggtatgtcttttctatggacctgtgggcttcacatatattcgtcctgcttcagccacctccatgattcaggaccggataatggccatcatgtatagcgccgtcacccctgtactgaatccactaatctacacccttaggaacaaagaagtgatgatggctctgaagaaaatctttggtaggaagttgtttaaagactggcagcaacaccactaggactaatgagggatatctgatttctattaagactgatttccatcacttcactgtaagaaatgatttgtttacctggtttatatttttctttcaaaaattttgagcacatattatattaggcagtgtagtaggttcaagaaacacaggagcaagcaaaacaaattccataatgtcatcaaacataaagtttaatgtgatggaggccccaaataaccaaacgcgtaagtacatatgtcaggataattcggtggcaaggagaactaaggaggtaggaagtatggggagggttagagtaggaatctgctgtgtaaaaaagaatgtggcatttctcctaggacaaaaacctttggaattttccaagtaatagaagtatcttactgaaattccatatgagataatctttatttttgcctattttttttccttttgtgtttccttcagcaggaaagtactgatgataatttttctcacaacagtttttatctagaatatcatttttgttaatcttaattcttgaagagaatttttaatgggtatttaattttagggagagatttttctagccattgaaaatatcttgtttttccccagcttattgaagtataattaacaaataaaaattgcatatatttaggcttcacaacatgatgctttagtatatgtatacattgtgaagagactaccacaatcaagctaaacctacattactgtccctgcattagtttactgttgaatactagaagttcttcattctatctaactgcattttcatacccattaagccaatgtgacaagctctttgtttcagttggagtgtttgcacaatttaaatttgataaatttttgatagaattaaatttaaatttatcctccaactaaatttttgatagaattaaatttaaatttgtcctcca

SEQ ID NO: 5998 - protein, 316 aa, Homo sapiens; identical to SEQ ID NO: 713

SEQ ID NO: 5999 - DNA, 924 bp, Homo sapiens; identical to SEQ ID NO: 714

SEQ ID NO: 6000 - protein, 307 aa, Homo sapiens; identical to SEQ ID NO: 715

SEQ ID NO: 6001 - DNA, 2229 bp, Homo sapiens
ctctaataacgttaggcttggtatagaagatgcagagacatgctaaaatttctcccccaattattgccaagcagaaacttggacgatcgacatggaaattgtctccacaggaaacgaaactattactgaatttgtcctccttggcttctatgacatccctgaactgcatttcttgttttttattgtattcactgctgtctatgtcttcatcatcatagggaatatgctgattattgtagcagtggttagctcccagaggctccacaaacccatgtatattttcttggcgaatctgtccttcctggatattctctacacctccgcagtgatgccaaaaatgctggagggcttcctgcaagaagcaactatctctgtggctggttgcttgctccagttctttatcttcggctctctagccacagctgaatgcttactgctggctgtcatggcatatgaccgctacctggcaatttgctacccactccactacccactcctgatggggcccagacggtacatggggctggtggtcacaacctggctctctggatttgtggtagatggactggttgtggccctggtggcccagctgaggttctgtggccccaaccacattgaccagttttactgtgactttatgcttttcgtgggcctggcttgctcggatcccagagtggctcaggtgacaactctcattctgtctgtgttctgcctcactattccttttggactgattctgacatcttatgccagaattgtggtggcagtgctgagagttcctgctggggcaagcaggagaagggctttctccacatgctcctcccacctagctgtagtgaccacattctatggaacgctcatgatcttttatgttgcaccctctgctgtccattcccagctcctctccaaggtcttctccctgctctacactgtggtcacccctctcttcaatcctgtgatctataccatgaggaacaaggaggtgcatcaggcacttcggaagattctctgtatcaaacaaactgaaacacttgattgaaggagagtaatgaagatgttattttggacttcggacacctccactggggactcttccaggatgggttggagaggagtaactttgtcttattcgaccattctctttgaactcttctgcagttatactaaaaatgaaaatgatagggcaacaattttttaacttttattttaagttcaagggtacatgtgcaggtttgttacataggtaaacttgtgtcatgggggtttactgtacagattatttcatcacccaggtattaagcctagtactcattaatcatttttcctgatcttctccctcctcccaacctccaccctcaagtaggattcagtgtgttgttcccctctatgtatccatatgttttcataatttagctcccacttatgagtgaagacatacggtatttgattttctgttcctgtgttagtttgcgaaggatagtagcctccaattccatccatgtcaaataatcaaaattatttaaactttgattagttctttattaaatatgtcataaatatttaaaaataatacagcaataccaaaataaacctagaaatattgttttttatattattgttgtatgacatttaaaaatttctttctatgtgtatttatatttatacatacaagttggatcatggagtttgtaatctggttttccactgaacactgtgtcacgaacaactttttctattaacaagcatctatttctttattcttctgggcttcatcgtatggctaaacatgatttgttattctattttgggaatttttagttgtattctattcttttactgtacattgtttacatctggattttcctgtaataaacttttagcacctaaattgcaagatctaaggatatgtgtttttaaaaatctaaagctgaattccttttcttttaaacttcttttcttgtagaacatttcaaacatacataaaagagaagagcacagtgaacccccatgtactccatgtagccaccatccagcttcaacatcaacattttgctaatcttattttaattagctacagctccttgtttgttagttttcatggaaaattttagggcaaattccagatgttgtataactattatgttgtgtaagttatgtatgtacatattccacatatgtatttagtataatctgtgactaataaagacattttaaaaaaccatgcccaca

SEQ ID NO: 6002 - protein, 315 aa, Homo sapiens; identical to SEQ ID NO: 717

SEQ ID NO: 6003 - DNA, 344 bp, Homo sapiens
caactcttaattggccctcaaaacttagcctacttgcttctatcttcagaaagccttccccgaccttgatcccacaccttctgccccacaaccccaggctgggtttggtccttctctgctcccatggcacctacttccttccctattaccatttaccacattttcactaccaactcctgaatgacttgatgaaactactatttaaggaaggcaataagtgaagaatatataagaattatccgaggaacagttgctctaataacgttaggcttggtatagaagatgcagagacatgctaaaatttctcccccaattattgccaagcagaaacttggacgatcgac

SEQ ID NO: 6004 - protein, 51 aa, Homo sapiens
PTCFYLQKAFPDLDPTPSAPQPQAGFGPSLLPWHLLPSLLPFTTFSLPTPE

SEQ ID NO: 6005 - DNA, 473 bp, Homo sapiens
catcctagcagtgaatggaaacacacatatggggagaaactaaggctccctactaaaaacgtgcaacatgtgactgggacatcttgttgagctcaagcagggagggagctgaaggtaggaaattccaacattctgaagtcttcagcaaatcttagcagatcatctcctcctcacagtcctgtctttagagaacagggtcgatatttcgggaatcctatagaaagactccaagcctcagaatgagtttggaccagataaaataatctagagttaaagatggcccacatagggagtgccagattcactcacaaggaaatgcagatgggatcaaaggttaataaacacatattgctttgaatagcatatgaaaaccttccagcagctctaataacgttaggcttggtatagaagatgcagagacatgctaaaatttctcccccaattattgccaagcagaaacttggacgatcgac

SEQ ID NO: 6006 - protein, 50 aa, Homo sapiens
AQAGRELKVGNSNILKSSANLSRSSPPHSPVFREQGRYFGNPIERLQASE

SEQ ID NO: 6007 - DNA, 2879 bp, Homo sapiens
gtttgcttttagttctcattgtgagatcacaagtggaggctccaaccagtccagaagttcctttctatggggaagctgtggcagcaaggccgtgaagagagtctgacttaattgcaaagacgaggtttcaccatgttgaccaggctgatctcaaacatctgacctcaggaagtcagaggcaccaatgtgaggttccacctgctttccagcacattcttggtttcctcacttctgctagacaacgtttgatcagaaggaacagggaacgagaaggagctgctggatgacgataagcctgggaaagggaggctgggtgagcagagacagaaaagaaacacctacctgctgtgacctcacaaacacccaggctgagttttgataagacaggttgaatcacactggggtgacagcctcatccctccaggtacaaacaagaacaggccatggttaaccaaagctcccccatgggcttcctccttctgggcttctctgaacacccagcactggaaaggactctctttgtggttgtcttcacttcctacctcttgaccctggtgggcaacacactcatcatcctgctgtctgtactgtaccccaggctccactctccaatgtactttttcctctctgacctctccttcttggacctctgctttaccacaagttgtgtcccccagatgctggtcaacctctggggcccaaagaagaccatcagcttcctgggatgctctgtccagctcttcatcttcctgtccctggggaccactgagtgcatcctcctgacagtgatggcctttgaccgatacgtggctgtctgccagcccctccactatgccaccatcatccacccccgcctgtgctggcagctggcatctgtggcctgggttatgagtctggttcaatcgatagtccagacaccatccaccctccacttgcccttctgtccccaccagcagatagatgactttttatgtgaggtcccatctctgattcgactctcctgtggagatacctcctacaatgaaatccagttggctgtgtccagtgtcatcttcgtggttgtgcctctcagcctcatccttgcctcttatggagccactgcccaggcagtgctgaggattaactctgccacagcatggagaaaggcctttgggacctgctcctcccatctcactgtggtcaccctcttctacagctcagtcattgctgtctacctccagcccaaaaatccgtatgcccaagggaggggcaagttctttggtctcttctatgcagtgggcactccttcacttaaccctctcgtatacaccctgaggaacaaggagataaagcgagcactcaggaggttactagggaaggaaagagactccagggaaagctggagagctgcttaatatactttcgaaagtaagaagagtttcttcaagatttatgaacatgttaagttttccagactactacccttcccacatacacctgagccactgtggtgggtcacagtgtggctatgttatctatgagagggagaatgagaaagagagggacagagagataaaagaaattgggtgagaggagataggtagctccataaggcacacaaattcaaatattatcattcctatcactgtccattcttaatatttctatcctccattctgttctttttactgtcatcacttctatagatttcctaactccaccatgcctatttctggttatataattgctctccaattgtcatgtcagtgtaggggaactactccatcatagcattctggacaccttgcatgtatctacgtaggtcatgtaagcaaaggcttgaagaacagctaatctgagatttagaagaatgctttttgatcctcctggaatatgagaggatgggaggccctttagaacctgcctcaatgccatctctcactctccttcttatatccctgggagtatgtcatgtgacaagtctttactgtctcccaggttttggatggagcatggggttttctgccccacaccctttaggatatagctgaagaatataatgaggaatagctggattctagaactgactcctcaccagtggtatattccacaacagtgtcacagtcgtctggcccctttggtttccgtgtcatcctttttggtgtgtaggacaaggagccagggaattggcacgtttggcttttacttcttttttatatgtaaataataagccatctaagtgtaaaagtggctcatatcttctccagccaaatcagctaggccatggccttgccttgcttctcatgagtgtgcttgacagtcatcaccgtcactctatcttcatttctggttcttaccgtgttagcttagttcattcaagctactatcacaagctacacataaattgggtggtttataaataacaaacatttctttcttacagttctggaggctggaaactccaagattaaggcagatttcatgcctattgagggcctgctttctgattatagaaggtgacttcttgctgtgcccacacatggtgaaagggactaccaactctctggagtctcttttatgagggcactaattccaattatgaagcctcttccctcatgacctaatcactgcccaaaggccccatgttctaatgccatcatcttggtggtttaggatttcaacatatgaattttggaaggacataagcattcaaccccctgcacatgtcttctttcctacttcctcaaggttctttctgtccagttgctccttcttctattgacccttttttgccttctctttctccttcactgcctcaagttacagccagaggaaaggaggaactaaaacttagcaaatctataatcacatgcaaatacacagaatggattgttacaacc

SEQ ID NO: 6008 - protein, 316 aa, Homo sapiens; identical to SEQ ID NO: 721

SEQ ID NO: 6009 - DNA, 2994 bp, Homo sapiens
gtttgcttttagttctcattgtgagatcacaagtggaggctccaaccagtccagaagttcctttctatggggaagctgtggcagcaaggccgtgaagagagtctgacttaattgcaaagacgaggtttcaccatgttgaccaggctgatctcaaacatctgacctcaggaagtcagaggcaccaatgtgaggttccacctgctttccagcacattcttggtttcctcacttctgctagacaacgtttgatcagaaggaacagggaacgagaaggagctgctggatgacgataagcctgggaaagggaggctgggtgagcagagacagaaaagaaacacctacctgctgtgacctcacaaacacccaggctgagttttgataagacaggttgaatcacactggggtgacagcctcatccctccaggtacaaacaagaacaggccatggttaaccaaagctcccccatgggcttcctccttctgggcttctctgaacacccagcactggaaaggactctctttgtggttgtcttcacttcctacctcttgaccctggtgggcaacacactcatcatcctgctgtctgtactgtaccccaggctccactctccaatgtactttttcctctctgacctctccttcttggacctctgctttaccacaagttgtgtcccccagatgctggtcaacctctggggcccaaagaagaccatcagcttcctgggatgctctgtccagctcttcatcttcctgtccctggggaccactgagtgcatcctcctgacagtgatggcctttgaccgatacgtggctgtctgccagcccctccactatgccaccatcatccacccccgcctgtgctggcagctggcatctgtggcctgggttatgagtctggttcaatcgatagtccagacaccatccaccctccacttgcccttctgtccccaccagcagatagatgactttttatgtgaggtcccatctctgattcgactctcctgtggagatacctcctacaatgaaatccagttggctgtgtccagtgtcatcttcgtggttgtgcctctcagcctcatccttgcctcttatggagccactgcccaggcagtgctgaggattaactctgccacagcatggagaaaggcctttgggacctgctcctcccatctcactgtggtcaccctcttctacagctcagtcattgctgtctacctccagcccaaaaatccgtatgcccaagggaggggcaagttctttggtctcttctatgcagtgggcactccttcacttaaccctctcgtatacaccctgaggaacaaggagataaagcgagcactcaggaggttactagggaaggaaagagactccagggaaagctggagagctgcttaatatactttcgaaagtaagaagagtttcttcaagatttatgaacatgttaagttttccagactactacccttcccacatacacctgagccactgtggtgggtcacagtgtggctatgttatctatgagagggagaatgagaaagagagggacagagagataaaagaaattgggtgagaggagataggtagctccataaggcacacaaattcaaatattatcattcctatcactgtccattcttaatatttctatcctccattctgttctttttactgtcatcacttctatagatttcctaactccaccatgcctatttctggttatataattgctctccaattgtcatgtcagtgtaggggaactactccatcatagcattctggacaccttgcatgtatctacgtaggtcatgtaagcaaaggcttgaagaacagctaatctgagatttagaagaatgctttttgatcctcctggaatatgagaggatgggaggccctttagaacctgcctcaatgccatctctcactctccttcttatatccctgggagtatgtcatgtgacaagtctttactgtctcccaggttttggatggagcatggggttttctgccccacaccctttaggatatagctgaagaatataatgaggaatagctggattctagaactgactcctcaccagtggtatattccacaacagtgtcacagtcgtctggcccctttggtttccgtgtcatcctttttggtgtgtaggacaaggagccagggaattggcacgtttggcttttacttcttttttatatgtaaataataagccatctaagtgtaaaagtggctcatatcttctccagccaaatcagctaggccatggccttgccttgcttctcatgagtgtgcttgacagtcatcaccgtcactctatcttcatttctggttcttaccgtgttagcttagttcattcaagctactatcacaagctacacataaattgggtggtttataaataacaaacatttctttcttacagttctggaggctggaaactccaagattaaggcagatttcatgcctattgagggcctgctttctgattatagaaggtgacttcttgctgtgcccacacatggtgaaagggactaccaactctctggagtctcttttatgagggcactaattccaattatgaagcctcttccctcatgacctaatcactgcccaaaggccccatgttctaatgccatcatcttggtggtttaggatttcaacatatgaattttggaaggacataagcattcaaccccctgcacatgtcttctttcctacttcctcaaggttctttctgtccagttgctccttcttctattgacccttttttgccttctctttctccttcactgcctcaagttacagccagaggaaaggaggaactaaaacttagcaaatctataatcacatgcaaatacacagaatggattgttacaaccaaaatgcaggctctattgttttcaatttagcagcctttcaaatgtatatggttctggccacattaaagttgcaaataacactttttttgagactgaaataaaggtgaaatattgg

SEQ ID NO: 6010 - protein, 316 aa, Homo sapiens; identical to SEQ ID NO: 721

SEQ ID NO: 6011 - DNA, 2133 bp, Homo sapiens
tcatgtgtctcagcacagtcttttacagcaaaaatgcatgtcacctcctcctaaaggctttccgtggcccacccacccagattcctcctttattgtgcagactctttcctaacccacacctcatcttaatttatttgccttcaattctgggcggcggtgttggggagggtctcaattttcccatgtatttcccagtgtttattgaatacatgaggccatactcttctagtctctctgcttctcatgctaggaactgaaccgaccagcctatactttaaggcttgttatttcactgactaaggaaaggctacttaagagggcaagctcagacatacataatctggagtggatcttccatgggaaaacacgtatataacagaaattattggcaaaactataagtatggtctacagactttctttgccctcaaccaggaagtcagaggcaccaatgtgaggttccacctgctttccagcacattcttggtttcctcacttctgctagacaacgtttgatcagaaggaacagggaacgagaaggagctgctggatgacgataagcctgggaaagggaggctgggtgagcagagacagaaaagaaacacctacctgctgtgacctcacaaacacccaggctgagttttgataagacaggttgaatcacactggggtgacagcctcatccctccaggtacaaacaagaacaggccatggttaaccaaagctcccccatgggcttcctccttctgggcttctctgaacacccagcactggaaaggactctctttgtggttgtcttcacttcctacctcttgaccctggtgggcaacacactcatcatcctgctgtctgtactgtaccccaggctccactctccaatgtactttttcctctctgacctctccttcttggacctctgctttaccacaagttgtgtcccccagatgctggtcaacctctggggcccaaagaagaccatcagcttcctgggatgctctgtccagctcttcatcttcctgtccctggggaccactgagtgcatcctcctgacagtgatggcctttgaccgatacgtggctgtctgccagcccctccactatgccaccatcatccacccccgcctgtgctggcagctggcatctgtggcctgggttatgagtctggttcaatcgatagtccagacaccatccaccctccacttgcccttctgtccccaccagcagatagatgactttttatgtgaggtcccatctctgattcgactctcctgtggagatacctcctacaatgaaatccagttggctgtgtccagtgtcatcttcgtggttgtgcctctcagcctcatccttgcctcttatggagccactgcccaggcagtgctgaggattaactctgccacagcatggagaaaggcctttgggacctgctcctcccatctcactgtggtcaccctcttctacagctcagtcattgctgtctacctccagcccaaaaatccgtatgcccaagggaggggcaagttctttggtctcttctatgcagtgggcactccttcacttaaccctctcgtatacaccctgaggaacaaggagataaagcgagcactcaggaggttactagggaaggaaagagactccagggaaagctggagagctgcttaatatactttcgaaattctggaggctggaaactccaagattaaggcagatttcatgcctattgagggcctgctttctgattatagaaggtgacttcttgctgtgcccacacatggtgaaagggactaccaactctctggagtctcttttatgagggcactaattccaattatgaagcctcttccctcatgacctaatcactgcccaaaggccccatgttctaatgccatcatcttggtggtttaggatttcaacatatgaattttggaaggacataagcattcaaccccctgcacatgtcttctttcctacttcctcaaggttctttctgtccagttgctccttcttctattgacccttttttgccttctctttctccttcactgcctcaagttacagccagaggaaaggaggaactaaaacttagcaaatctataatcacatgcaaatacacagaatggattgttacaaccaaa

SEQ ID NO: 6012 - protein, 52 aa, Homo sapiens
MGKHVYNRNYWQNYKYGLQTFFALNQEVRGTNVRFHLLSSTFLVSSLLLDNV

SEQ ID NO: 6013 - DNA, 973 bp, Homo sapiens
gaagtcagaggcaccaatgtgaggttccacctgctttccagcacattcttggtttcctcacttctgctagacaacgtttgatcagaaggaacagggaacgagaaggagctgctggatgacgataagcctgggaaagggaggctgggtgagcagagacagaaaagaaacacctacctgctgtgacctcacaaacacccaggctgagttttgataagacaggttgaatcacactggggtgacagcctcatccctccagatgctggtcaacctctggggcccaaagaagaccatcagcttcctgggatgctctgtccagctcttcatcttcctgtccctggggaccactgagtgcatcctcctgacagtgatggcctttgaccgatacgtggctgtctgccagcccctccactatgccaccatcatccacccccgcctgtgctggcagctggcatctgtggcctgggttatgagtctggttcaatcgatagtccagacaccatccaccctccacttgcccttctgtccccaccagcagatagatgactttttatgtgaggtcccatctctgattcgactctcctgtggagatacctcctacaatgaaatccagttggctgtgtccagtgtcatcttcgtggttgtgcctctcagcctcatccttgcctcttatggagccactgcccaggcagtgctgaggattaactctgccacagcatggagaaaggcctttgggacctgctcctcccatctcactgtggtcaccctcttctacagctcagtcattgctgtctacctccagcccaaaaatccgtatgcccaagggaggggcaagttctttggtctcttctatgcagtgggcactccttcacttaaccctctcgtatacaccctgaggaacaaggagataaagcgagcactcaggaggttactagggaaggaaagagactccagggaaagctggagagctgcttaa

SEQ ID NO: 6014 - protein, 238 aa, Homo sapiens
MLVNLWGPKKTISFLGCSVQLFIFLSLGTTECILLTVMAFDRYVAVCQPLHYATIIHPRLCWQLASVAWVMSLVQSIVQTPSTLHLPFCPHQQIDDFLCEVPSLIRLSCGDTSYNEIQLAVSSVIFVVVPLSLILASYGATAQAVLRINSATAWRKAFGTCSSHLTVVTLFYSSVIAVYLQPKNPYAQGRGKFFGLFYAVGTPSLNPLVYTLRNKEIKRALRRLLGKERDSRESWRAA

SEQ ID NO: 6015 - DNA, 1137 bp, Homo sapiens; identical to SEQ ID NO: 724

SEQ ID NO: 6016 - protein, 378 aa, Homo sapiens; identical to SEQ ID NO: 725

SEQ ID NO: 6017 - DNA, 488 bp, Homo sapiens
gcttgcttccccttggtgttctgccataaattttatcatttctggattgctgtctgtcattttgggaagaaaatcaaacaagcatctgccctgctcagtcctgggtggagaagctaccagaaccacatctcctgtctgtcccaccataagtctctgcttcattcacgctttcatgtgtcgtgcatcaagcaagcatttgcctgtaggcttggggagctctgagaggggttgagagtgaacaaaattaatcaaatcgtataacagaagaggaagtcccatcctgccgaggatcctggatgtgagaacctgctgctggcctggtgggatcgtggtgccccaggagcatgaactgctcaggagcagaccctgaccagatcccctgcaggcctggaacagcctgatcagcagcctcctaagccccatggctgccacagtgggcctcattgtccttccctatcacctagccggggtgttcccagctgccagac

SEQ ID NO: 6018 - protein, 73 aa, Homo sapiens
ACFPLVFCHKFYHFWIAVCHFGKKIKQASALLSPGWRSYQNHISCLSHHKSLLHSRFHVSCIKQAFACRLGEL

SEQ ID NO: 6019 - DNA, 686 bp, Homo sapiens
agcatttgcctgtaggcttggggagctctgagaggggttgagagtgaacaaaattaatcaaatcgtataacagaagaggaagtcccatcctgccgaggatcctggatgtgagaacctgctgctggcctggtgggatcgtggtgccccaggagcatgaactgctcaggagcagaccctgaccagatcccctgcaggcctggaacagcctgatcagcagcctcctaagccccatggctgccacagtgggcctcattgtccttccctatcacctagccggggtgttcccagctgccagacagtgccaactggtggtgcctgcccatcagtgccccaagacagccactacttttcgaagaatgagaccaccagctgctttgtggccagctccagcttactgaatgtgtttcctgacccaaagtgacacagtgatcaccagcatgccccaggcagcatttgctgacaccgtcctggagatgaacaaggagtgcacccttagtgtgggggcagagagagagagagcacattgtctgcaggagtcagctgaatgatctcacagaccccacctgctgggctcttccattttatcacaattattccgcctgttcacgtgcagagagaacacttggggcagattttaagaccttagagagtaacttgtttacaaataaaatatctctttgatgatg

SEQ ID NO: 6020 - protein, 55 aa, Homo sapiens
MAATVGLIVLPYHLAGVFPAARQCQLVVPAHQCPKTATTFRRMRPPAALWPAPAY

SEQ ID NO: 6021 - DNA, 887 bp, Homo sapiens
tcaatgactttcgtgaactccttggctcctatgtgctcttcacctggaggaccagggcatgtgcagggatgaccaccttctccctgggacctgaacagggcagagaaatgggaagaaaatatctgaacagaagaggacttaggagagatctgaactccagctgccctacaaactccatctcagcttttcttctcacttcatgtgaaaactactccagtggctgactgaattgctgacccttcaagctctgtccttatccattacctcaaagcagtcattccttagtaaagtttccaacaaatagaaattaatgacactttggtagcactaatatggagattatcctttcattgagccttttatcctctgttctcctttgaagaacccctcactgtcaccttcccgagaataccctaagaccaataaatacttcagtatttcagagcggggagactctgagtcattcttactggaagtctaggaccaggtcacatgtgaatactatttcttgaaggtgtggtttcaacctctgttgccgatgtggttactaaaggttctgatcccacttgaacggaaaggtctgaggatattgattcagtcctgggtttttccctaactacaggatagggtggggtagagaaaggatatttgggggaaattttacttggatgaagattttcttggatgtagtttgaagactgcagtgtttgaagtctctgagggaagagatttggtctgtctggatcaagatttcaggcagattaggattccattcacagcccctgagcttccttcccaaggctgtattgtaattatagcaatatttcatggaggatttttctacatgataaactaagagccaagaaataaaatttttaaaatgccct

SEQ ID NO: 6022 - protein, 51 aa, Homo sapiens
MTTFSLGPEQGREMGRKYLNRRGLRRDLNSSCPTNSISAFLLTSCENYSSG

SEQ ID NO: 6023 - DNA, 785 bp, Homo sapiens
cggggagctggtcactgagggtgtcgctgagagcctcttcctgcccagaacagattacagcttccacaagttccattacagcttttcttctcacttcatgtgaaaactactccagtggctgactgaattgctgacccttcaagctctgtccttatccattacctcaaagcagtcattccttagtaaagtttccaacaaatagaaattaatgacactttggtagcactaatatggagattatcctttcattgagccttttatcctctgttctcctttgaagaacccctcactgtcaccttcccgagaataccctaagaccaataaatacttcagtatttcagagcggggagactctgagtcattcttactggaagtctaggaccaggtcacatgtgaatactatttcttgaaggtgtggtttcaacctctgttgccgatgtggttactaaaggttctgatcccacttgaacggaaaggtctgaggatattgattcagtcctgggtttttccctaactacaggatagggtggggtagagaaaggatatttgggggaaattttacttggatgaagattttcttggatgtagtttgaagactgcagtgtttgaagtctctgagggaagagatttggtctgtctggatcaagatttcaggcagattaggattccattcacagcccctgagcttccttcccaaggctgtattgtaattatagcaatatttcatggaggatttttctacatgataaactaagagccaagaaataaaatttttaaaatgccct

SEQ ID NO: 6024 - protein, 39 aa, Homo sapiens
GSWSLRVSLRASSCPEQITASTSSITAFLLTSCENYSSG

SEQ ID NO: 6025 - DNA, 954 bp, Homo sapiens
cgtggctgtgcaacggggagctggtcactgagggtgtcgctgagagcctcttcctgcccagaacagattacagcttccacaagttccattacctgacctttgtgccctcagcagaggacttctatgactgcagggtggagcactggggcttggaccagccgctcctcaagcactggggtgacaaaatatctgaacagaagaggacttaggagagatctgaactccagctgccctacaaactccatctcagcttttcttctcacttcatgtgaaaactactccagtggctgactgaattgctgacccttcaagctctgtccttatccattacctcaaagcagtcattccttagtaaagtttccaacaaatagaaattaatgacactttggtagcactaatatggagattatcctttcattgagccttttatcctctgttctcctttgaagaacccctcactgtcaccttcccgagaataccctaagaccaataaatacttcagtatttcagagcggggagactctgagtcattcttactggaagtctaggaccaggtcacatgtgaatactatttcttgaaggtgtggtttcaacctctgttgccgatgtggttactaaaggttctgatcccacttgaacggaaaggtctgaggatattgattcagtcctgggtttttccctaactacaggatagggtggggtagagaaaggatatttgggggaaattttacttggatgaagattttcttggatgtagtttgaagactgcagtgtttgaagtctctgagggaagagatttggtctgtctggatcaagatttcaggcagattaggattccattcacagcccctgagcttccttcccaaggctgtattgtaattatagcaatatttcatggaggatttttctacatgataaactaagagccaagaaataaaatttttaaaatgccct

SEQ ID NO: 6026 - protein, 55 aa, Homo sapiens
MTAGWSTGAWTSRSSSTGVTKYLNRRGLRRDLNSSCPTNSISAFLLTSCENYSSG

SEQ ID NO: 6027 - DNA, 1655 bp, Homo sapiens
tttcagtctcatctgcctccactcggcctcagttcctcatcactgttcctgtgctcacagtcatcaattatagaccccacaacatgcgccctgaagacagaatgttccatatcagagctgtgatcttgagagccctctccttggctttcctgctgagtctccgaggagctggggccatcaaggcggaccatgtgtcaacttatgccgcgtttgtacagacgcatagaccaacaggggagtttatgtttgaatttgatgaagatgagatgttctatgtggatctggacaagaaggagaccgtctggcatctggaggagtttggccaagccttttcctttgaggctcagggcgggctggctaacattgctatattgaacaacaacttgaataccttgatccagcgttccaaccacactcaggccaccaacgatccccctgaggtgaccgtgtttcccaaggagcctgtggagctgggccagcccaacaccctcatctgccacattgacaagttcttcccaccagtgctcaacgtcacgtggctgtgcaacggggagctggtcactgagggtgtcgctgagagcctcttcctgcccagaacagattacagcttccacaagttccattacctgacctttgtgccctcagcagaggacttctatgactgcagggtggagcactggggcttggaccagccgctcctcaagcactgggaggcccaagagccaatccagatgcctgagacaacggagactgtgctctgtgccctgggcctggtgctgggcctagtcggcatcatcgtgggcaccgtcctcatcataaagtctctgcgttctggccatgacccccgggcccaggggaccctgtgaaatactgtaaaggtgacaaaatatctgaacagaagaggacttaggagagatctgaactccagctgccctacaaactccatctcagcttttcttctcacttcatgtgaaaactactccagtggctgactgaattgctgacccttcaagctctgtccttatccattacctcaaagcagtcattccttagtaaagtttccaacaaatagaaattaatgacactttggtagcactaatatggagattatcctttcattgagccttttatcctctgttctcctttgaagaacccctcactgtcaccttcccgagaataccctaagaccaataaatacttcagtatttcagagcggggagactctgagtcattcttactggaagtctaggaccaggtcacatgtgaatactatttcttgaaggtgtggtttcaacctctgttgccgatgtggttactaaaggttctgatcccacttgaacggaaaggtctgaggatattgattcagtcctgggtttttccctaactacaggatagggtggggtagagaaaggatatttgggggaaattttacttggatgaagattttcttggatgtagtttgaagactgcagtgtttgaagtctctgagggaagagatttggtctgtctggatcaagatttcaggcagattaggattccattcacagcccctgagcttccttcccaaggctgtattgtaattatagcaatatttcatggaggatttttctacatgataaactaagagccaagaaataaaatttttaaaatgccct

SEQ ID NO: 6028 - protein, 260 aa, Homo sapiens; identical to SEQ ID NO: 730

SEQ ID NO: 6029 - DNA, 1609 bp, Homo sapiens
acagtttcagtctcatctgcctccactcggcctcagttcctcatcactgttcctgtgctcacagtcatcaattatagaccccacaacatgcgccctgaagacagaatgttccatatcagagctgtgatcttgagagccctctccttggctttcctgctgagtctccgaggagctggggccatcaaggcggaccatgtgtcaacttatgccgcgtttgtacagacgcatagaccaacaggggagtttatgtttgaatttgatgaagatgagatgttctatgtggatctggacaagaaggagaccgtctggcatctggaggagtttggccaagccttttcctttgaggctcagggcgggctggctaacattgctatattgaacaacaacttgaataccttgatccagcgttccaaccacactcaggccaccaacgcccaacaccctcatctgccacattgacaagttcttcccaccagtgctcaacgtcacgtggctgtgcaacggggagctggtcactgagggtgtcgctgagagcctcttcctgcccagaacagattacagcttccacaagttccattacctgacctttgtgccctcagcagaggacttctatgactgcagggtggagcactggggcttggaccagccgctcctcaagcactgggaggcccaagagccaatccagatgcctgagacaacggagactgtgctctgtgccctgggcctggtgctgggcctagtcggcatcatcgtgggcaccgtcctcatcataaagtctctgcgttctggccatgacccccgggcccaggggaccctgtgaaatactgtaaaggtgacaaaatatctgaacagaagaggacttaggagagatctgaactccagctgccctacaaactccatctcagcttttcttctcacttcatgtgaaaactactccagtggctgactgaattgctgacccttcaagctctgtccttatccattacctcaaagcagtcattccttagtaaagtttccaacaaatagaaattaatgacactttggtagcactaatatggagattatcctttcattgagccttttatcctctgttctcctttgaagaacccctcactgtcaccttcccgagaataccctaagaccaataaatacttcagtatttcagagcggggagactctgagtcattcttactggaagtctaggaccaggtcacatgtgaatactatttcttgaaggtgtggtttcaacctctgttgccgatgtggttactaaaggttctgatcccacttgaacggaaaggtctgaggatattgattcagtcctgggtttttccctaactacaggatagggtggggtagagaaaggatatttgggggaaattttacttggatgaagattttcttggatgtagtttgaagactgcagtgtttgaagtctctgagggaagagatttggtctgtctggatcaagatttcaggcagattaggattccattcacagcccctgagcttccttcccaaggctgtattgtaattatagcaatatttcatggaggatttttctacatgataaactaagagccaagaaataaaatttttaaaatgccct

SEQ ID NO: 6030 - protein, 123 aa, Homo sapiens
MRPEDRMFHIRAVILRALSLAFLLSLRGAGAIKADHVSTYAAFVQTHRPTGEFMFEFDEDEMFYVDLDKKETVWHLEEFGQAFSFEAQGGLANIAILNNNLNTLIQRSNHTQATNAQHPHLPH

SEQ ID NO: 6031 - DNA, 1702 bp, Homo sapiens
acgcgtagcattcctgccgtccctggaaaagtgctagaggcccacagtttcagtctcatctgcctccactcggcctcagttcctcatcactgttcctgtgctcacagtcatcaattatagaccccacaacatgcgccctgaagacagaatgttccatatcagagctgtgatcttgagagccctctccttggctttcctgctgagtctccgaggagctggggccatcaaggcggaccatgtgtcaacttatgccgcgtttgtacagacgcatagaccaacaggggagtttatgtttgaatttgatgaagatgagatgttctatgtggatctggacaagaaggagaccgtctggcatctggaggagtttggccaagccttttcctttgaggctcagggcgggctggctaacattgctatattgaacaacaacttgaataccttgatccagcgttccaaccacactcaggccaccaacgatccccctgaggtgaccgtgtttcccaaggagcctgtggagctgggccagcccaacaccctcatctgccacattgacaagttcttcccaccagtgctcaacgtcacgtggctgtgcaacggggagctggtcactgagggtgtcgctgagagcctcttcctgcccagaacagattacagcttccacaagttccattacctgacctttgtgccctcagcagaggacttctatgactgcagggtggagcactggggcttggaccagccgctcctcaagcactgggaggcccaagagccaatccagatgcctgagacaacggagactgtgctctgtgccctgggcctggtgctgggcctagtcggcatcatcgtgggcaccgtcctcatcataaagtctctgcgttctggccatgacccccgggcccaggggaccctgtgaaatactgtaaaggtgacaaaatatctgaacagaagaggacttaggagagatctgaactccagctgccctacaaactccatctcagcttttcttctcacttcatgtgaaaactactccagtggctgactgaattgctgacccttcaagctctgtccttatccattacctcaaagcagtcattccttagtaaagtttccaacaaatagaaattaatgacactttggtagcactaatatggagattatcctttcattgagccttttatcctctgttctcctttgaagaacccctcactgtcaccttcccgagaataccctaagaccaataaatacttcagtatttcagagcggggagactctgagtcattcttactggaagtctaggaccaggtcacatgtgaatactatttcttgaaggtgtggtttcaacctctgttgccgatgtggttactaaaggttctgatcccacttgaacggaaaggtctgaggatattgattcagtcctgggtttttccctaactacaggatagggtggggtagagaaaggatatttgggggaaattttacttggatgaagattttcttggatgtagtttgaagactgcagtgtttgaagtctctgagggaagagatttggtctgtctggatcaagatttcaggcagattaggattccattcacagcccctgagcttccttcccaaggctgtattgtaattatagcaatatttcatggaggatttttctacatgataaactaagagccaagaaataaaatttttaaaatgccct

SEQ ID NO: 6032 - protein, 260 aa, Homo sapiens; identical to SEQ ID NO: 730

SEQ ID NO: 6033 - DNA, 1172 bp, Homo sapiens
acagtttcagtctcatctgcctccactcggcctcagttcctcatcactgttcctgtgctcacagtcatcaattatagaccccacaacatgcgccctgaagacagaatgttccatatcagagctgtgatcttgagagccctctccttggctttcctgctgagtctccgaggagctggggccatcaaggcggaccatgtgtcaacttatgccgcgtttgtacagacgcatagaccaacaggggagtttatgtttgaatttgatgaagatgagatgttctatgtggatctggacaagaaggagaccgtctggcatctggaggagtttggccaagccttttcctttgaggctcagggcgggctggctaacattgctatattgaacaacaacttgaataccttgatccagcgttccaaccacactcaggccaccaacgcccaacaccctcatctgccacattgacaagttcttcccaccagtgctcaacgtcacgtggctgtgcaacggggagctggtcactgagggtgtcgctgagagcctcttcctgcccagaacagattacagcttccacaagttccattacctgacctttgtgccctcagcagaggacttctatgactgcagggtggagcactggggcttggaccagccgctcctcaagcactgggaggcccaagagccaatccagatgcctgagacaacggagactgtgctctgtgccctgggcctggtgctgggcctagtcggcatcatcgtgggcaccgtcctcatcataaagtctctgcgttctggccatgacccccgggcccaggggaccctgtgaaatactgtaaaggtgacaaaatatctgaacagaagaggacttaggagagatctgaactccagctgccctacaaactccatctcagcttttcttctcacttcatgtgaaaactactccagtggctgactgaattgctgacccttcaagctctgtccttatccattacctcaaagcagtcattccttagtaaagtttccaacaaatagaaattaatgacactttggtagcactaatatggagattatcctttcattgagccttttatcctctgttctcctttgaagaacccctcactgtcaccttcccgagaataccctaagaccaataaatacttcagtatttcagagcgggg

SEQ ID NO: 6034 - protein, 123 aa, Homo sapiens; identical to SEQ ID NO: 6030

SEQ ID NO: 6035 - DNA, 445 bp, Homo sapiens
tcaatgactttcgtgaactccttggctcctatgtgctcttcacctggaggaccagggcatgtgcagggatgaccaccttctccctgggacctgaacagggcagagaaatgggaagaaaatatctgaacagaagaggacttaggagagatctgaactccagctgccctacaaactccatctcagcttttcttctcacttcatgtgaaaactactccagtggctgactgaattgctgacccttcaagctctgtccttatccattacctcaaagcagtcattccttagtaaagtttccaacaaatagaaattaatgacactttggtagcactaatatggagattatcctttcattgagccttttatcctctgttctcctttgaagaacccctcactgtcaccttcccgagaataccctaagaccaataaatacttcagtatttcagag

SEQ ID NO: 6036 - protein, 51 aa, Homo sapiens; identical to SEQ ID NO: 6022

SEQ ID NO: 6037 - DNA, 521 bp, Homo sapiens
gatgcctgagacaacggagactgtgctctgtgccctgggcctggtgctgggcctagtcggcatcatcgtgggcaccgtcctcatcataaagtctctgcgttctggccatgacccccgggcccaggggaccctgtgaaatactgtaaaggtgggaatgtaaagaggaggccctaggatttgtagaatgtgacaaaatatctgaacagaagaggacttaggagagatctgaactccagctgccctacaaactccatctcagcttttcttctcacttcatgtgaaaactactccagtggctgactgaattgctgacccttcaagctctgtccttatccattacctcaaagcagtcattccttagtaaagtttccaacaaatagaaattaatgacactttggtagcactaatatggagattatcctttcattgagccttttatcctctgttctcctttgaagaacccctcactgtcaccttcccgagaataccctaagaccaataaatacttcagtatttcagag

SEQ ID NO: 6038 - protein, 44 aa, Homo sapiens [sequence omitted]

SEQ ID NO: 6039 - DNA, 343 bp, Homo sapiens
cggggagctggtcactgagggtgtcgctgagagcctcttcctgcccagaacagattacagcttccacaagttccattacagcttttcttctcacttcatgtgaaaactactccagtggctgactgaattgctgacccttcaagctctgtccttatccattacctcaaagcagtcattccttagtaaagtttccaacaaatagaaattaatgacactttggtagcactaatatggagattatcctttcattgagccttttatcctctgttctcctttgaagaacccctcactgtcaccttcccgagaataccctaagaccaataaatacttcagtatttcagag

SEQ ID NO: 6040 - protein, 39 aa, Homo sapiens; identical to SEQ ID NO: 6024

SEQ ID NO: 6041 - DNA, 512 bp, Homo sapiens
cgtggctgtgcaacggggagctggtcactgagggtgtcgctgagagcctcttcctgcccagaacagattacagcttccacaagttccattacctgacctttgtgccctcagcagaggacttctatgactgcagggtggagcactggggcttggaccagccgctcctcaagcactggggtgacaaaatatctgaacagaagaggacttaggagagatctgaactccagctgccctacaaactccatctcagcttttcttctcacttcatgtgaaaactactccagtggctgactgaattgctgacccttcaagctctgtccttatccattacctcaaagcagtcattccttagtaaagtttccaacaaatagaaattaatgacactttggtagcactaatatggagattatcctttcattgagccttttatcctctgttctcctttgaagaacccctcactgtcaccttcccgagaataccctaagaccaataaatacttcagtatttcagag

SEQ ID NO: 6042 - protein, 55 aa, Homo sapiens; identical to SEQ ID NO: 6026

SEQ ID NO: 6043 - DNA, 561 bp, Homo sapiens
ggagctgggccagcccaacaccctcatctgccacattgacaagttcttcccaccagtgctcaacgtcacgtggctgtgcaacggggagctggtcactgagggtgtcgctgagagcctcttcctgcccagaacagattacagcttccacaagttccattacctgacctttgtgccctcagcagaggacttctatgactgcagggggaccctgtgaaatactgtaaaggtgacaaaatatctgaacagaagaggacttaggagagatctgaactccagctgccctacaaactccatctcagcttttcttctcacttcatgtgaaaactactccagtggctgactgaattgctgacccttcaagctctgtccttatccattacctcaaagcagtcattccttagtaaagtttccaacaaatagaaattaatgacactttggtagcactaatatggagattatcctttcattgagccttttatcctctgttctcctttgaagaacccctcactgtcaccttcccgagaataccctaagaccaataaatacttcagtatttcagag

SEQ ID NO: 6044 - protein, 70 aa, Homo sapiens
ELGQPNTLICHIDKFFPPVLNVTWLCNGELVTEGVAESLFLPRTDYSFHKFHYLTFVPSAEDFYDCRGTL

SEQ ID NO: 6045 - DNA, 505 bp, Homo sapiens
tttcagtctcatctgcctccactcggcctcagttcctcatcactgttcctgtgctcacagtcatcaattatagaccccacaacatgcgccctgaagacagaatgttccatatcagagctgtgatcttgagagccctctccttggctttcctgctgagtctccgaggagctggggccatcaaggcggaccatgtgtcaacttatgccgcgtttgtacagacgcatagaccaacaggggagtttatgtttgaatttgatgaagatgagatgttctatgtggattgactgaattgctgacccttcaagctctgtccttatccattacctcaaagcagtcattccttagtaaagtttccaacaaatagaaattaatgacactttggtagcactaatatggagattatcctttcattgagccttttatcctctgttctcctttgaagaacccctcactgtcaccttcccgagaataccctaagaccaataaatacttcagtatttcagag

SEQ ID NO: 6046 - protein, 66 aa, Homo sapiens
MRPEDRMFHIRAVILRALSLAFLLSLRGAGAIKADHVSTYAAFVQTHRPTGEFMFEFDEDEMFYVD

SEQ ID NO: 6047 - DNA, 1213 bp, Homo sapiens
tttcagtctcatctgcctccactcggcctcagttcctcatcactgttcctgtgctcacagtcatcaattatagaccccacaacatgcgccctgaagacagaatgttccatatcagagctgtgatcttgagagccctctccttggctttcctgctgagtctccgaggagctggggccatcaaggcggaccatgtgtcaacttatgccgcgtttgtacagacgcatagaccaacaggggagtttatgtttgaatttgatgaagatgagatgttctatgtggatctggacaagaaggagaccgtctggcatctggaggagtttggccaagccttttcctttgaggctcagggcgggctggctaacattgctatattgaacaacaacttgaataccttgatccagcgttccaaccacactcaggccaccaacgatccccctgaggtgaccgtgtttcccaaggagcctgtggagctgggccagcccaacaccctcatctgccacattgacaagttcttcccaccagtgctcaacgtcacgtggctgtgcaacggggagctggtcactgagggtgtcgctgagagcctcttcctgcccagaacagattacagcttccacaagttccattacctgacctttgtgccctcagcagaggacttctatgactgcagggtggagcactggggcttggaccagccgctcctcaagcactgggaggcccaagagccaatccagatgcctgagacaacggagactgtgctctgtgccctgggcctggtgctgggcctagtcggcatcatcgtgggcaccgtcctcatcataaagtctctgcgttctggccatgacccccgggcccaggggaccctgtgaaatactgtaaaggtgacaaaatatctgaacagaagaggacttaggagagatctgaactccagctgccctacaaactccatctcagcttttcttctcacttcatgtgaaaactactccagtggctgactgaattgctgacccttcaagctctgtccttatccattacctcaaagcagtcattccttagtaaagtttccaacaaatagaaattaatgacactttggtagcactaatatggagattatcctttcattgagccttttatcctctgttctcctttgaagaacccctcactgtcaccttcccgagaataccctaagaccaataaatacttcagtatttcagag

SEQ ID NO: 6048 - protein, 260 aa, Homo sapiens; identical to SEQ ID NO: 730

SEQ ID NO: 6049 - DNA, 1260 bp, Homo sapiens
acgcgtagcattcctgccgtccctggaaaagtgctagaggcccacagtttcagtctcatctgcctccactcggcctcagttcctcatcactgttcctgtgctcacagtcatcaattatagaccccacaacatgcgccctgaagacagaatgttccatatcagagctgtgatcttgagagccctctccttggctttcctgctgagtctccgaggagctggggccatcaaggcggaccatgtgtcaacttatgccgcgtttgtacagacgcatagaccaacaggggagtttatgtttgaatttgatgaagatgagatgttctatgtggatctggacaagaaggagaccgtctggcatctggaggagtttggccaagccttttcctttgaggctcagggcgggctggctaacattgctatattgaacaacaacttgaataccttgatccagcgttccaaccacactcaggccaccaacgatccccctgaggtgaccgtgtttcccaaggagcctgtggagctgggccagcccaacaccctcatctgccacattgacaagttcttcccaccagtgctcaacgtcacgtggctgtgcaacggggagctggtcactgagggtgtcgctgagagcctcttcctgcccagaacagattacagcttccacaagttccattacctgacctttgtgccctcagcagaggacttctatgactgcagggtggagcactggggcttggaccagccgctcctcaagcactgggaggcccaagagccaatccagatgcctgagacaacggagactgtgctctgtgccctgggcctggtgctgggcctagtcggcatcatcgtgggcaccgtcctcatcataaagtctctgcgttctggccatgacccccgggcccaggggaccctgtgaaatactgtaaaggtgacaaaatatctgaacagaagaggacttaggagagatctgaactccagctgccctacaaactccatctcagcttttcttctcacttcatgtgaaaactactccagtggctgactgaattgctgacccttcaagctctgtccttatccattacctcaaagcagtcattccttagtaaagtttccaacaaatagaaattaatgacactttggtagcactaatatggagattatcctttcattgagccttttatcctctgttctcctttgaagaacccctcactgtcaccttcccgagaataccctaagaccaataaatacttcagtatttcagag

SEQ ID NO: 6050 - protein, 260 aa, Homo sapiens; identical to SEQ ID NO: 730

SEQ ID NO: 6051 - DNA, 1094 bp, Homo sapiens
tttcagtctcatctgcctccactcggcctcagttcctcatcactgttcctgtgctcacagtcatcaattatagaccccacaacatgcgccctgaagacagaatgttccatatcagagctgtgatcttgagagccctctccttggctttcctgctgagtctccgaggagctggggccatcaaggcggaccatgtgtcaacttatgccgcgtttgtacagacgcatagaccaacaggggagtttatgtttgaatttgatgaagatgagatgttctatgtggatctggacaagaaggagaccgtctggcatctggaggagtttggccaagccttttcctttgaggctcagggcgggctggctaacattgctatattgaacaacaacttgaataccttgatccagcgttccaaccacactcaggccaccaacgatccccctgaggtgaccgtgtttcccaaggagcctgtggagctgggccagcccaacaccctcatctgccacattgacaagttcttcccaccagtgctcaacgtcacgtggctgtgcaacggggagctggtcactgagggtgtcgctgagagcctcttcctgcccagaacagattacagcttccacaagttccattacctgacctttgtgccctcagcagaggacttctatgactgcagggtggagcactggggcttggaccagccgctcctcaagcactgggaggcccaagagccaatccagatgcctgagacaacggagactgtgctctgtgccctgggcctggtgctgggcctagtcggcatcatcgtgggcaccgtcctcatcataaagtctctgcgttctggccatgacccccgggcccaggggaccctgtgaaatactgtaaaggtgacaaaatatctgaacagaagaggacttaggagagatctgaactccagctgccctacaaactccatctcagcttttcttctcacttcatgtgaaaactactccagtggctgactgaattgctgacccttcaagctctgtccttatccattacctcaaagcagtcattccttagtaaagtttccaacaaatagaaattaatgacactttggtagc

SEQ ID NO: 6052 - protein, 260 aa, Homo sapiens; identical to SEQ ID NO: 730

SEQ ID NO: 6053 - DNA, 1048 bp, Homo sapiens
acagtttcagtctcatctgcctccactcggcctcagttcctcatcactgttcctgtgctcacagtcatcaattatagaccccacaacatgcgccctgaagacagaatgttccatatcagagctgtgatcttgagagccctctccttggctttcctgctgagtctccgaggagctggggccatcaaggcggaccatgtgtcaacttatgccgcgtttgtacagacgcatagaccaacaggggagtttatgtttgaatttgatgaagatgagatgttctatgtggatctggacaagaaggagaccgtctggcatctggaggagtttggccaagccttttcctttgaggctcagggcgggctggctaacattgctatattgaacaacaacttgaataccttgatccagcgttccaaccacactcaggccaccaacgcccaacaccctcatctgccacattgacaagttcttcccaccagtgctcaacgtcacgtggctgtgcaacggggagctggtcactgagggtgtcgctgagagcctcttcctgcccagaacagattacagcttccacaagttccattacctgacctttgtgccctcagcagaggacttctatgactgcagggtggagcactggggcttggaccagccgctcctcaagcactgggaggcccaagagccaatccagatgcctgagacaacggagactgtgctctgtgccctgggcctggtgctgggcctagtcggcatcatcgtgggcaccgtcctcatcataaagtctctgcgttctggccatgacccccgggcccaggggaccctgtgaaatactgtaaaggtgacaaaatatctgaacagaagaggacttaggagagatctgaactccagctgccctacaaactccatctcagcttttcttctcacttcatgtgaaaactactccagtggctgactgaattgctgacccttcaagctctgtccttatccattacctcaaagcagtcattccttagtaaagtttccaacaaatagaaattaatgacactttggtagc

SEQ ID NO: 6054 - protein, 123 aa, Homo sapiens; identical to SEQ ID NO: 6030

SEQ ID NO: 6055 - DNA, 1324 bp, Homo sapiens
cgtggctgtgcaacggggagctggtcactgagggtgtcgctgagagcctcttcctgcccagaacagattacagcttccacaagttccattacctgacctttgtgccctcagcagaggacttctatgactgcagggtggagcactggggcttggaccagccgctcctcaagcactgggaggcccaagagccaatccagatgcctgagacaacggagactgtgctctgtgccctgggcctggtgctgggcctagtcggcatcatcgtgggcaccgtcctcatcataaagtctctgcgttctggccatgacccccgggcccaggggaccctgtgaaatactgtaaaggtgggaatgtaaagaggaggccctaggatttgtagaatgtaaggaagggaggaaaaattcaatctgataagtgttcattgatcttctaatgggttaaaagcattcagccacataacaacaacaacaccgataactaactgagtagttaatatggtcaggcgctattctgaggatttacatttattaactcactttattctcacacatagtctttgaggtaggtactattattttcactatttcacatgagagatacttacatctttttacatacacagagactttaagcactttgatcaagttcccacagctatgaagtagtagggctagcttccaatccagaaagtctggatccaagactgtttatccactgtcctattcaccctattttgtgaaggaaaagaccaagttcaaattctccagagtccattgccaaataatggagtcagatctatatttctatacataattacaacacagtgtggtgggtgcctgtaactacttactgtctctacttggactcattccatggcaatgttcacacaaaaaatgcccctccagagatcttacaggtttctatttatcataacactcaccatgctttatatttttatatgttttgggaattctcttagcattagacagtgaacttccatgcagatgaccacatctaattcattattattattgttattcatgctggacctcaggtacaaaaggttaagaacttctcagttcattatatgatcatcattggtgcctccgagctctctctctctcccttgatttatttggtcccttttatctccagtccttactcccatatctaacctcttacccctacctcataggtaaacattttaatgaatttgatgtttccttttatttgcatagatcctctgtaatatgtagtagtgtccagtgtacatgtatttttaattaaccaaaatggcattaaattatagatctaattttgtaca

SEQ ID NO: 6056 - protein, 42 aa, Homo sapiens
MTAGWSTGAWTSRSSSTGRPKSQSRCLRQRRLCSVPWAWCWA

SEQ ID NO: 6057 - DNA, 1870 bp, Homo sapiens
agaggcccacagtttcagtctcatctgcctccactcggcctcagttcctcatcactgttcctgtgctcacagtcatcaattatagaccccacaacatgcgccctgaagacagaatgttccatatcagagctgtgatcttgagagccctctccttggctttcctgctgagtctccgaggagctggggccatcaaggcggaccatgtgtcaacttatgccgcgtttgtacagacgcatagaccaacaggggagtttatgtttgaatttgatgaagatgagatgttctatgtggatctggacaagaaggagaccgtctggcatctggaggagtttggccaagccttttcctttgaggctcagggcgggctggctaacattgctatattgaacaacaacttgaataccttgatccagcgttccaaccacactcaggccaccaacgatccccctgaggtgaccgtgtttcccaaggagcctgtggagctgggccagcccaacaccctcatctgccacattgacaagttcttcccaccagtgctcaacgtcacgtggctgtgcaacggggagctggtcactgagggtgtcgctgagagcctcttcctgcccagaacagattacagcttccacaagttccattacctgacctttgtgccctcagcagaggacttctatgactgcagggtggagcactggggcttggaccagccgctcctcaagcactgggaggcccaagagccaatccagatgcctgagacaacggagactgtgctctgtgccctgggcctggtgctgggcctagtcggcatcatcgtgggcaccgtcctcatcataaagtctctgcgttctggccatgacccccgggcccaggggaccctgtgaaatactgtaaaggtgggaatgtaaagaggaggccctaggatttgtagaatgtaaggaagggaggaaaaattcaatctgataagtgttcattgatcttctaatgggttaaaagcattcagccacataacaacaacaacaccgataactaactgagtagttaatatggtcaggcgctattctgaggatttacatttattaactcactttattctcacacatagtctttgaggtaggtactattattttcactatttcacatgagagatacttacatctttttacatacacagagactttaagcactttgatcaagttcccacagctatgaagtagtagggctagcttccaatccagaaagtctggatccaagactgtttatccactgtcctattcaccctattttgtgaaggaaaagaccaagttcaaattctccagagtccattgccaaataatggagtcagatctatatttctatacataattacaacacagtgtggtgggtgcctgtaactacttactgtctctacttggactcattccatggcaatgttcacacaaaaaatgcccctccagagatcttacaggtttctatttatcataacactcaccatgctttatatttttatatgttttgggaattctcttagcattagacagtgaacttccatgcagatgaccacatctaattcattattattattgttattcatgctggacctcaggtacaaaaggttaagaacttctcagttcattatatgatcatcattggtgcctccgagctctctctctctcccttgatttatttggtcccttttatctccagtccttactcccatatctaacctcttacccctacctcataggtaaacattttaatgaatttgatgtttccttttatttgcatagatcctctgtaatatgtagtagtgtccagtgtacatgtatttttaattaaccaaaatggcattaaattatagatctaattttgtaca

SEQ ID NO: 6058 - protein, 260 aa, Homo sapiens; identical to SEQ ID NO: 730

SEQ ID NO: 6059 - DNA, 1808 bp, Homo sapiens
agaggcccacagtttcagtctcatctgcctccactcggcctcagttcctcatcactgttcctgtgctcacagtcatcaattatagaccccacaacatgcgccctgaagacagaatgttccatatcagagctgtgatcttgagagccctctccttggctttcctgctgagtctccgaggagctggggccatcaaggcggaccatgtgtcaacttatgccgcgtttgtacagacgcatagaccaacaggggagtttatgtttgaatttgatgaagatgagatgttctatgtggatctggacaagaaggagaccgtctggcatctggaggagtttggccaagccttttcctttgaggctcagggcgggctggctaacattgctatattgaacaacaacttgaataccttgatccagcgttccaaccacactcaggccaccaacgatccccctgaggtgaccgtgtttcccaaggagcctgtggagctgggccagcccaacaccctcatctgccacattgacaagttcttcccaccagtgctcaacgtcacgtggctgtgcaacggggagctggtcactgagggtgtcgctgagagcctcttcctgcccagaacagattacagcttccacaagttccattacctgacctttgtgccctcagcagaggacttctatgactgcagggtggagcactggggcttggaccagccgctcctcaagcactggggtgctgggcctagtcggcatcatcgtgggcaccgtcctcatcataaagtctctgcgttctggccatgacccccgggcccaggggaccctgtgaaatactgtaaaggtgggaatgtaaagaggaggccctaggatttgtagaatgtaaggaagggaggaaaaattcaatctgataagtgttcattgatcttctaatgggttaaaagcattcagccacataacaacaacaacaccgataactaactgagtagttaatatggtcaggcgctattctgaggatttacatttattaactcactttattctcacacatagtctttgaggtaggtactattattttcactatttcacatgagagatacttacatctttttacatacacagagactttaagcactttgatcaagttcccacagctatgaagtagtagggctagcttccaatccagaaagtctggatccaagactgtttatccactgtcctattcaccctattttgtgaaggaaaagaccaagttcaaattctccagagtccattgccaaataatggagtcagatctatatttctatacataattacaacacagtgtggtgggtgcctgtaactacttactgtctctacttggactcattccatggcaatgttcacacaaaaaatgcccctccagagatcttacaggtttctatttatcataacactcaccatgctttatatttttatatgttttgggaattctcttagcattagacagtgaacttccatgcagatgaccacatctaattcattattattattgttattcatgctggacctcaggtacaaaaggttaagaacttctcagttcattatatgatcatcattggtgcctccgagctctctctctctcccttgatttatttggtcccttttatctccagtccttactcccatatctaacctcttacccctacctcataggtaaacattttaatgaatttgatgtttccttttatttgcatagatcctctgtaatatgtagtagtgtccagtgtacatgtatttttaattaaccaaaatggcattaaattatagatctaattttgtaca

SEQ ID NO: 6060 - protein, 231 aa, Homo sapiens
MRPEDRMFHIRAVILRALSLAFLLSLRGAGAIKADHVSTYAAFVQTHRPTGEFMFEFDEDEMFYVDLDKKETVWHLEEFGQAFSFEAQGGLANIAILNNNLNTLIQRSNHTQATNDPPEVTVFPKEPVELGQPNTLICHIDKFFPPVLNVTWLCNGELVTEGVAESLFLPRTDYSFHKFHYLTFVPSAEDFYDCRVEHWGLDQPLLKHWGAGPSRHHRGHRPHHKVSAFWP

SEQ ID NO: 6061 - DNA, 1866 bp, Homo sapiens
agaggcccacagtttcagtctcatctgcctccactcggcctcagttcctcatcactgttcctgtgctcacagtcatcaattatagaccccacaacatgcgccctgaagacagaatgttccatatcagagctgtgatcttgagagccctctccttggctttcctgctgagtctccgaggagctggggccatcaaggcggaccatgtgtcaacttatgccgcgtttgtacagacgcatagaccaacaggggagtttatgtttgaatttgatgaagatgagatgttctatgtggatctggacaagaaggagaccgtctggcatctggaggagtttggccaagccttttcctttgaggctcagggcgggctggctaacattgctatattgaacaacaacttgaataccttgatccagcgttccaaccacactcaggccaccaacgatccccctgaggtgaccgtgtttcccaaggagcctgtggagctgggccagcccaacaccctcatctgccacattgacaagttcttcccaccagtgctcaacgtcacgtggctgtgcaacggggagctggtcactgagggtgtcgctgagagcctcttcctgcccagaacagattacagcttccacaagttccattacctgacctttgtgccctcagcagaggacttctatgactgcagggtggagcactggggcttggaccagccgctcctcaagcactgggcatcccaggccatcaccaccctgagacaacggagactgtgctctgtgccctgggcctggtgctgggcctagtcggcatcatcgtgggcaccgtcctcatcataaagtctctgcgttctggccatgacccccgggcccaggggaccctgtgaaatactgtaaaggtgggaatgtaaagaggaggccctaggatttgtagaatgtaaggaagggaggaaaaattcaatctgataagtgttcattgatcttctaatgggttaaaagcattcagccacataacaacaacaacaccgataactaactgagtagttaatatggtcaggcgctattctgaggatttacatttattaactcactttattctcacacatagtctttgaggtaggtactattattttcactatttcacatgagagatacttacatctttttacatacacagagactttaagcactttgatcaagttcccacagctatgaagtagtagggctagcttccaatccagaaagtctggatccaagactgtttatccactgtcctattcaccctattttgtgaaggaaaagaccaagttcaaattctccagagtccattgccaaataatggagtcagatctatatttctatacataattacaacacagtgtggtgggtgcctgtaactacttactgtctctacttggactcattccatggcaatgttcacacaaaaaatgcccctccagagatcttacaggtttctatttatcataacactcaccatgctttatatttttatatgttttgggaattctcttagcattagacagtgaacttccatgcagatgaccacatctaattcattattattattgttattcatgctggacctcaggtacaaaaggttaagaacttctcagttcattatatgatcatcattggtgcctccgagctctctctctctcccttgatttatttggtcccttttatctccagtccttactcccatatctaacctcttacccctacctcataggtaaacattttaatgaatttgatgtttccttttatttgcatagatcctctgtaatatgtagtagtgtccagtgtacatgtatttttaattaaccaaaatggcattaaattatagatctaattttgtaca

SEQ ID NO: 6062 - protein, 232 aa, Homo sapiens
MRPEDRMFHIRAVILRALSLAFLLSLRGAGAIKADHVSTYAAFVQTHRPTGEFMFEFDEDEMFYVDLDKKETVWHLEEFGQAFSFEAQGGLANIAILNNNLNTLIQRSNHTQATNDPPEVTVFPKEPVELGQPNTLICHIDKFFPPVLNVTWLCNGELVTEGVAESLFLPRTDYSFHKFHYLTFVPSAEDFYDCRVEHWGLDQPLLKHWASQAITTLRQRRLCSVPWAWCWA

SEQ ID NO: 6063 - DNA, 460 bp, Homo sapiens
acagtttcagtctcatctgcctccactcggcctcagttcctcatcactgttcctgtgctcacagtcatcaattatagaccccacaacatgcgccctgaagacagaatgttccatatcagagctgtgatcttgagagccctctccttggctttcctgctgagtctccgaggagctggggccatcaaggcggaccatgtgtcaacttatgccgcgtttgtacagacgcatagaccaacaggggagtttatgtttgaatttgatgaagatgagatgttctatgtggatctggacaagaaggagaccgtctggcatctggaggagtttggccaagccttttcctttgaggctcagggcgggctggctaacattgctatattgaacaacaacttgaataccttgatccagcgttccaaccacactcaggccaccaacgatccccctgaggtgaccgtgtttccca

SEQ ID NO: 6064 - protein, 123 aa, Homo sapiens
MRPEDRMFHIRAVILRALSLAFLLSLRGAGAIKADHVSTYAAFVQTHRPTGEFMFEFDEDEMFYVDLDKKETVWHLEEFGQAFSFEAQGGLANIAILNNNLNTLIQRSNHTQATNDPPEVTVF

SEQ ID NO: 6065 - DNA, 429 bp, Homo sapiens
tttcagtctcatctgcctccactcggcctcagttcctcatcactgttcctgtgctcacagtcatcaattatagaccccacaacatgcgccctgaagacagaatgttccatatcagagctgtgatcttgagagccctctccttggctttcctgctgagtctccgaggagctggggccatcaaggcggaccatgtgtcaacttatgccgcgtttgtacagacgcatagaccaacaggggagtttatgtttgaatttgatgaagatgagatgttctatgtggatctggacaagaaggagaccgtctggcatctggaggagtttggccaagccttttcctttgaggctcagggcgggctggctaacattgctatattgaacaacaacttgaataccttgatccagcgttccaaccacactcaggccaccaacg

SEQ ID NO: 6066 - protein, 114 aa, Homo sapiens
MRPEDRMFHIRAVILRALSLAFLLSLRGAGAIKADHVSTYAAFVQTHRPTGEFMFEFDEDEMFYVDLDKKETVWHLEEFGQAFSFEAQGGLANIAILNNNLNTLIQRSNHTQAT

SEQ ID NO: 6067 - DNA, 1112 bp, Homo sapiens
acttgggttcatggtctctaatatttcaaacaggagctccctttagcgagtccttcttttcctgactgcagctcttttcattttgccatccttttccagctccatgatggttctgcaggtttctgcggccccccggacagtggctctgacggcgttactgatggtgctgctcacatctgtggtccagggcagggccactccagagaattaccttttccagggacggcaggaatgctacgcgtttaatgggacacagcgcttcctggagagatacatctacaaccgggaggagttcgcgcgcttcgacagcgacgtgggggagttccgggcggtgacggagctggggcggcctgctgcggagtactggaacagccagaaggacatcctggaggagaagcgggcagtgccggacaggatgtgcagacacaactacgagctgggcgggcccatgaccctgcagcgccgagtccagcctagggtgaatgtttccccctccaagaaggggcccttgcagcaccacaacctgcttgtctgccacgtgacggatttctacccaggcagcattcaagtccgatggttcctgaatggacaggaggaaacagctggggtcgtgtccaccaacctgatccgtaatggagactggaccttccagatcctggtgatgctggaaatgaccccccagcagggagatgtctacacctgccaagtggagcacaccagcctggatagtcctgtcaccgtggagtggaaggcacagtctgattctgcccggagtaagacattgacgggagctgggggcttcgtgctggggctcatcatctgtggagtgggcatcttcatgcacaggaggagcaagaaagggttcctgagctcactgaaaagactattgtgccttaggaaaagcatttgctgtgtttcgttagcatctggctccaggacagaccttcaacttccaaattggatactgctgccaagaagttgctctgaagtcagtttctatcattctgctctttgattcaaagcactgtttctctcactgggcctccaaccatgttcccttcttcttagcaccacaaataatcaaaacccaacatgactgtttgttttccttt

SEQ ID NO: 6068 - protein, 303 aa, Homo sapiens
MMVLQVSAAPRTVALTALLMVLLTSVVQGRATPENYLFQGRQECYAFNGTQRFLERYIYNREEFARFDSDVGEFRAVTELGRPAAEYWNSQKDILEEKRAVPDRMCRHNYELGGPMTLQRRVQPRVNVSPSKKGPLQHHNLLVCHVTDFYPGSIQVRWFLNGQEETAGVVSTNLIRNGDWTFQILVMLEMTPQQGDVYTCQVEHTSLDSPVTVEWKAQSDSARSKTLTGAGGFVLGLIICGVGIFMHRRSKKGFLSSLKRLLCLRKSICCVSLASGSRTDLQLPNWILLPRSCSEVSFYHSAL

SEQ ID NO: 6069 - DNA, 1154 bp, Homo sapiens
acttgggttcatggtctctaatatttcaaacaggagctccctttagcgagtccttcttttcctgactgcagctcttttcattttgccatccttttccagctccatgatggttctgcaggtttctgcggccccccggacagtggctctgacggcgttactgatggtgctgctcacatctgtggtccagggcagggccactccagagaattaccttttccagggacggcaggaatgctacgcgtttaatgggacacagcgcttcctggagagatacatctacaaccgggaggagttcgcgcgcttcgacagcgacgtgggggagttccgggcggtgacggagctggggcggcctgctgcggagtactggaacagccagaaggacatcctggaggagaagcgggcagtgccggacaggatgtgcagacacaactacgagctgggcgggcccatgaccctgcagcgccgagtccagcctagggtgaatgtttccccctccaagaaggggcccttgcagcaccacaacctgcttgtctgccacgtgacggatttctacccaggcagcattcaagtccgatggttcctgaatggacaggaggaaacagctggggtcgtgtccaccaacctgatccgtaatggagactggaccttccagatcctggtgatgctggaaatgaccccccagcagggagatgtctacacctgccaagtggagcacaccagcctggatagtcctgtcaccgtggagtggaaggcacagtctgattctgcccggagtaagacattgacgggagctgggggcttcgtgctggggctcatcatctgtggagtgggcatcttcatgcacaggaggagcaagaaagttcaacgaggatctgcataaacagggttcctgagctcactgaaaagactattgtgccttaggaaaagcatttgctgtgtttcgttagcatctggctccaggacagaccttcaacttccaaattggatactgctgccaagaagttgctctgaagtcagtttctatcattctgctctttgattcaaagcactgtttctctcactgggcctccaaccatgttcccttcttcttagcaccacaaataatcaaaacccaacatgactgtttgttttcctttaaaaatatgcaccaaatc

SEQ ID NO: 6070 - protein, 258 aa, Homo sapiens; identical to SEQ ID NO: 732

SEQ ID NO: 6071 - DNA, 2385 bp, Homo sapiens
acttgggttcatggtctctaatatttcaaacaggagctccctttagcgagtccttcttttcctgactgcagctcttttcattttgccatccttttccagctccatgatggttctgcaggtttctgcggccccccggacagtggctctgacggcgttactgatggtgctgctcacatctgtggtccagggcagggccactccagagaattaccttttccagggacggcaggaatgctacgcgtttaatgggacacagcgcttcctggagagatacatctacaaccgggaggagttcgcgcgcttcgacagcgacgtgggggagttccgggcggtgacggagctggggcggcctgctgcggagtactggaacagccagaaggacatcctggaggagaagcgggcagtgccggacaggatgtgcagacacaactacgagctgggcgggcccatgaccctgcagcgccgagtccagcctagggtgaatgtttccccctccaagaaggggcccttgcagcaccacaacctgcttgtctgccacgtgacggatttctacccaggcagcattcaagtccgatggttcctgaatggacaggaggaaacagctggggtcgtgtccaccaacctgatccgtaatggagactggaccttccagatcctggtgatgctggaaatgaccccccagcagggagatgtctacacctgccaagtggagcacaccagcctggatagtcctgtcaccgtggagtggaaggcacagtctgattctgcccggagtaagacattgacgggagctgggggcttcgtgctggggctcatcatctgtggagtgggcatcttcatgcacaggaggagcaagaaagggttcctgagctcactgaaaagactattgtgccttaggaaaagcatttgctgtgtttcgttagcatctggctccaggacagaccttcaacttccaaattggatactgctgccaagaagttgctctgaagtcagtttctatcattctgctctttgattcaaagcactgtttctctcactgggcctccaaccatgttcccttcttcttagcaccacaaataatcaaaacccaacatgactgtttgttttcctttaaaaatatgcaccaaatcatctctcatcacttttctctgagggttttagtagacagtaggagttaataaagaagttcattttggtttaaacataggaaagaagagaaccatgaaaatggggatatgttaactattgtataatggggcctgttacacatgacactcttctgaattgactgtatttcagtgagctgcccccaaatcaagtttagtgccctcatccatttatgtctcagaccactattcttaactattcaatggtgagcagactgcaaatctgcctgataggacccatattcccacagcactaattcaacatataccttactgagagcatgttttatcattaccattaagaagttaaatgaacatcagaatttaaaatcataaatataatctaatacactttaaccattttctttgtgtgccatcacaaatactccttaaccaaatacggcttggacttttgaatgcatccaatagacgtcatttgtcgtctaagtctgcattcatccaccagcctaggcctcctgtcttaattttcatacagacagaaatgactccccactggggaaagagcaaagcaatacatgtagcactctttttcaaacactggtctttttttttttcttaacaatccaacattgttatgtgttttgcgtctcatattgacaccttttggtcaaggtagaggacatgtttgttgtaagctttctttttcgtgtagaggatggattcttcactcctgatacacacaatcagtgcacagcagctctcttatacatccagttgatgccttcagtctccctggcttcttacaagcatcttctgggccttgtgtgtccctgggcacctgtccctggtcaattcccgaaagctactgtgctcctcttgcccatctccccttgcaaataatatcttccatcgggggaccggcttcctccaatttcaggagaggtggggctgaaggcacagacttgggcgtcactggcacagatataagtaaatacagctggagtctgcagagaggctggactgagtcagggagtcaggaaagagaagccacacacaaggacaaccaatcatgtttctcataatcttcttaacctagggaataggacacaatcattttttctttttaaaacatctttatccctgatcagcctcatttcctcaaaaactataaaggaaaatgctgctgacttgtttttgcgtagtaatttcagctgtcacataataagctaaggaagacagtatatagtaaataaggacc

SEQ ID NO: 6072 - protein, 303 aa, Homo sapiens; identical to SEQ ID NO: 6068

SEQ ID NO: 6073 - DNA, 2409 bp, Homo sapiens
acttgggttcatggtctctaatatttcaaacaggagctccctttagcgagtccttcttttcctgactgcagctcttttcattttgccatccttttccagctccatgatggttctgcaggtttctgcggccccccggacagtggctctgacggcgttactgatggtgctgctcacatctgtggtccagggcagggccactccagagaattaccttttccagggacggcaggaatgctacgcgtttaatgggacacagcgcttcctggagagatacatctacaaccgggaggagttcgcgcgcttcgacagcgacgtgggggagttccgggcggtgacggagctggggcggcctgctgcggagtactggaacagccagaaggacatcctggaggagaagcgggcagtgccggacaggatgtgcagacacaactacgagctgggcgggcccatgaccctgcagcgccgagtccagcctagggtgaatgtttccccctccaagaaggggcccttgcagcaccacaacctgcttgtctgccacgtgacggatttctacccaggcagcattcaagtccgatggttcctgaatggacaggaggaaacagctggggtcgtgtccaccaacctgatccgtaatggagactggaccttccagatcctggtgatgctggaaatgaccccccagcagggagatgtctacacctgccaagtggagcacaccagcctggatagtcctgtcaccgtggagtggaaggcacagtctgattctgcccggagtaagacattgacgggagctgggggcttcgtgctggggctcatcatctgtggagtgggcatcttcatgcacaggaggagcaagaaagttcaacgaggatctgcataaacagggttcctgagctcactgaaaagactattgtgccttaggaaaagcatttgctgtgtttcgttagcatctggctccaggacagaccttcaacttccaaattggatactgctgccaagaagttgctctgaagtcagtttctatcattctgctctttgattcaaagcactgtttctctcactgggcctccaaccatgttcccttcttcttagcaccacaaataatcaaaacccaacatgactgtttgttttcctttaaaaatatgcaccaaatcatctctcatcacttttctctgagggttttagtagacagtaggagttaataaagaagttcattttggtttaaacataggaaagaagagaaccatgaaaatggggatatgttaactattgtataatggggcctgttacacatgacactcttctgaattgactgtatttcagtgagctgcccccaaatcaagtttagtgccctcatccatttatgtctcagaccactattcttaactattcaatggtgagcagactgcaaatctgcctgataggacccatattcccacagcactaattcaacatataccttactgagagcatgttttatcattaccattaagaagttaaatgaacatcagaatttaaaatcataaatataatctaatacactttaaccattttctttgtgtgccatcacaaatactccttaaccaaatacggcttggacttttgaatgcatccaatagacgtcatttgtcgtctaagtctgcattcatccaccagcctaggcctcctgtcttaattttcatacagacagaaatgactccccactggggaaagagcaaagcaatacatgtagcactctttttcaaacactggtctttttttttttcttaacaatccaacattgttatgtgttttgcgtctcatattgacaccttttggtcaaggtagaggacatgtttgttgtaagctttctttttcgtgtagaggatggattcttcactcctgatacacacaatcagtgcacagcagctctcttatacatccagttgatgccttcagtctccctggcttcttacaagcatcttctgggccttgtgtgtccctgggcacctgtccctggtcaattcccgaaagctactgtgctcctcttgcccatctccccttgcaaataatatcttccatcgggggaccggcttcctccaatttcaggagaggtggggctgaaggcacagacttgggcgtcactggcacagatataagtaaatacagctggagtctgcagagaggctggactgagtcagggagtcaggaaagagaagccacacacaaggacaaccaatcatgtttctcataatcttcttaacctagggaataggacacaatcattttttctttttaaaacatctttatccctgatcagcctcatttcctcaaaaactataaaggaaaatgctgctgacttgtttttgcgtagtaatttcagctgtcacataataagctaaggaagacagtatatagtaaataaggacc

SEQ ID NO: 6074 - protein, 258 aa, Homo sapiens; identical to SEQ ID NO: 732

SEQ ID NO: 6075 - DNA, 896 bp, Homo sapiens
acttgggttcatggtctctaatatttcaaacaggagctccctttagcgagtccttcttttcctgactgcagctcttttcattttgccatccttttccagctccatgatggttctgcaggtttctgcggccccccggacagtggctctgacggcgttactgatggtgctgctcacatctgtggtccagggcagggccactccagagaattaccttttccagggacggcaggaatgctacgcgtttaatgggacacagcgcttcctggagagatacatctacaaccgggaggagttcgcgcgcttcgacagcgacgtgggggagttccgggcggtgacggagctggggcggcctgctgcggagtactggaacagccagaaggacatcctggaggagaagcgggcagtgccggacaggatgtgcagacacaactacgagctgggcgggcccatgaccctgcagcgccgagtccagcctagggtgaatgtttccccctccaagaaggggcccttgcagcaccacaacctgcttgtctgccacgtgacggatttctacccaggcagcattcaagtccgatggttcctgaatggacaggaggaaacagctggggtcgtgtccaccaacctgatccgtaatggagactggaccttccagatcctggtgatgctggaaatgaccccccagcagggagatgtctacacctgccaagtggagcacaccagcctggatagtcctgtcaccgtggagtggaaggcacagtctgattctgcccggagtaagacattgacgggagctgggggcttcgtgctggggctcatcatctgtggagtgggcatcttcatgcacaggaggagcaagaaagttcaacaaggatctgcataaacaggcaatattcctg

SEQ ID NO: 6076 - protein, 258 aa, Homo sapiens [sequence omitted]

SEQ ID NO: 6077 - DNA, 634 bp, Homo sapiens
atggtctctaatatttcaaacaggagctccctttagcgagtccttcttttcctgactgcagctcttttcattttgccatccttttccagctccatgatggttctgcaggtttctgcggccccccggacagtggctctgacggcgttactgatggtgctgctcacatctgtggtccagggcagggccactccagagaattaccttttccagggacggcaggaatgctacgcgtttaatgggacacagcgcttcctggagagatacatctacaaccgggaggagttcgcgcgcttcgacagcgacgtgggggagttccgggcggtgacggagctggggcggcctgctgcggagtactggaacagccagaaggacatcctggaggagaagcgggcagtgccggacaggatgtgcagacacaactacgagctgggcgggcccatgaccctgcagcgccgaggctggagtgctgtggcaccatcatggctcactgcagcctcaacctcctgggctcaagtgatcctcctgcctcagcctcccatgtagctagaactacagatacacgtaccaccatgtctggctaatttatttttctttttagagatgggttctcactatgttgcccaggccggtctca

SEQ ID NO: 6078 - protein, 149 aa, Homo sapiens
MMVLQVSAAPRTVALTALLMVLLTSVVQGRATPENYLFQGRQECYAFNGTQRFLERYIYNREEFARFDSDVGEFRAVTELGRPAAEYWNSQKDILEEKRAVPDRMCRHNYELGGPMTLQRRGWSAVAPSWLTAASTSWAQVILLPQPPM

SEQ ID NO: 6079 - DNA, 1054 bp, Homo sapiens
atggtctctaatatttcaaacaggagctccctttagcgagtccttcttttcctgactgcagctcttttcattttgccatccttttccagctccatgatggttctgcaggtttctgcggccccccggacagtggctctgacggcgttactgatggtgctgctcacatctgtggtccagggcagggccactccagagaattaccttttccagggacggcaggaatgctacgcgtttaatgggacacagcgcttcctggagagatacatctacaaccgggaggagttcgcgcgcttcgacagcgacgtgggggagttccgggcggtgacggagctggggcggcctgctgcggagtactggaacagccagaaggacatcctggaggagaagcgggcagtgccggacaggatgtgcagacacaactacgagctgggcgggcccatgaccctgcagcgccgaggcagcattcaagtccgatggttcctgaatggacaggaggaaacagctggggtcgtgtccaccaacctgatccgtaatggagactggaccttccagatcctggtgatgctggaaatgaccccccagcagggagatgtctacacctgccaagtggagcacaccagcctggatagtcctgtcaccgtggagtggaaggcacagtctgattctgcccggagtaagacattgacgggagctgggggcttcgtgctggggctcatcatctgtggagtgggcatcttcatgcacaggaggagcaagaaagttcaacgaggatctgcataaacagggttcctgagctcactgaaaagactattgtgccttaggaaaagcatttgctgtgtttcgttagcatctggctccaggacagaccttcaacttccaaattggatactgctgccaagaagttgctctgaagtcagtttctatcattctgctctttgattcaaagcactgtttctctcactgggcctccaaccatgttcccttcttcttagcaccacaaataatcaaaacccaacatgactgtttgttttcctttaaaaatatgcaccaaatc

SEQ ID NO: 6080 - protein, 228 aa, Homo sapiens
MMVLQVSAAPRTVALTALLMVLLTSVVQGRATPENYLFQGRQECYAFNGTQRFLERYIYNREEFARFDSDVGEFRAVTELGRPAAEYWNSQKDILEEKRAVPDRMCRHNYELGGPMTLQRRGSIQVRWFLNGQEETAGVVSTNLIRNGDWTFQILVMLEMTPQQGDVYTCQVEHTSLDSPVTVEWKAQSDSARSKTLTGAGGFVLGLIICGVGIFMHRRSKKVQRGSA

SEQ ID NO: 6081 - DNA, 2309 bp, Homo sapiens
atggtctctaatatttcaaacaggagctccctttagcgagtccttcttttcctgactgcagctcttttcattttgccatccttttccagctccatgatggttctgcaggtttctgcggccccccggacagtggctctgacggcgttactgatggtgctgctcacatctgtggtccagggcagggccactccagagaattaccttttccagggacggcaggaatgctacgcgtttaatgggacacagcgcttcctggagagatacatctacaaccgggaggagttcgcgcgcttcgacagcgacgtgggggagttccgggcggtgacggagctggggcggcctgctgcggagtactggaacagccagaaggacatcctggaggagaagcgggcagtgccggacaggatgtgcagacacaactacgagctgggcgggcccatgaccctgcagcgccgaggcagcattcaagtccgatggttcctgaatggacaggaggaaacagctggggtcgtgtccaccaacctgatccgtaatggagactggaccttccagatcctggtgatgctggaaatgaccccccagcagggagatgtctacacctgccaagtggagcacaccagcctggatagtcctgtcaccgtggagtggaaggcacagtctgattctgcccggagtaagacattgacgggagctgggggcttcgtgctggggctcatcatctgtggagtgggcatcttcatgcacaggaggagcaagaaagttcaacgaggatctgcataaacagggttcctgagctcactgaaaagactattgtgccttaggaaaagcatttgctgtgtttcgttagcatctggctccaggacagaccttcaacttccaaattggatactgctgccaagaagttgctctgaagtcagtttctatcattctgctctttgattcaaagcactgtttctctcactgggcctccaaccatgttcccttcttcttagcaccacaaataatcaaaacccaacatgactgtttgttttcctttaaaaatatgcaccaaatcatctctcatcacttttctctgagggttttagtagacagtaggagttaataaagaagttcattttggtttaaacataggaaagaagagaaccatgaaaatggggatatgttaactattgtataatggggcctgttacacatgacactcttctgaattgactgtatttcagtgagctgcccccaaatcaagtttagtgccctcatccatttatgtctcagaccactattcttaactattcaatggtgagcagactgcaaatctgcctgataggacccatattcccacagcactaattcaacatataccttactgagagcatgttttatcattaccattaagaagttaaatgaacatcagaatttaaaatcataaatataatctaatacactttaaccattttctttgtgtgccatcacaaatactccttaaccaaatacggcttggacttttgaatgcatccaatagacgtcatttgtcgtctaagtctgcattcatccaccagcctaggcctcctgtcttaattttcatacagacagaaatgactccccactggggaaagagcaaagcaatacatgtagcactctttttcaaacactggtctttttttttttcttaacaatccaacattgttatgtgttttgcgtctcatattgacaccttttggtcaaggtagaggacatgtttgttgtaagctttctttttcgtgtagaggatggattcttcactcctgatacacacaatcagtgcacagcagctctcttatacatccagttgatgccttcagtctccctggcttcttacaagcatcttctgggccttgtgtgtccctgggcacctgtccctggtcaattcccgaaagctactgtgctcctcttgcccatctccccttgcaaataatatcttccatcgggggaccggcttcctccaatttcaggagaggtggggctgaaggcacagacttgggcgtcactggcacagatataagtaaatacagctggagtctgcagagaggctggactgagtcagggagtcaggaaagagaagccacacacaaggacaaccaatcatgtttctcataatcttcttaacctagggaataggacacaatcattttttctttttaaaacatctttatccctgatcagcctcatttcctcaaaaactataaaggaaaatgctgctgacttgtttttgcgtagtaatttcagctgtcacataataagctaaggaagacagtatatagtaaataaggacc

SEQ ID NO: 6082 - protein, 228 aa, Homo sapiens; identical to SEQ ID NO: 6080

SEQ ID NO: 6083 - DNA, 2235 bp, Homo sapiens
caaacaggagctccctttagcgagtccttcttttcctgactgcagctcttttcattttgccatccttttccagctccatgatggttctgcaggtttctgcggccccccggacagtggctctgacggcgttactgatggtgctgctcacatctgtggtccagggcagggccactccagagaattaccttttccagggacggcaggaatgctacgcgtttaatgggacacagcgcttcctggagagatacatctacaaccgggaggagttcgcgcgcttcgacagcgacgtgggggagttccgggcggtgacggagctggggcggcctgctgcggagtactggaacagccagaaggacatcctggaggagaagcgggcagtgccggacaggatgtgcagacacaactacgagctgggcgggcccatgaccctgcagcgccgaggtgagtgagggctttgggccggcggtcccagggcagccccgcgggcccgtgcccagggcgcaggagcagccgggttggcctaagggaccttagtgccgggcggaaaggggactttgggttggggattcatggggggagcccatctggagcttgtcaggggagcgagcgcggggacctggactgggctgagcatggagtgaggaggacgagagcagagagacccccgggacttcatcaggcctggcagctgactgcatgtggggtgaaaaaaggaagccacaggacagcgcacaagggtatggtgtggagatggaggtggagatggcacagcaggccacacagagaagaaacctacagggaggtagctgggtttgaggtgcttgaggggcagatgggtggtctgatgggcaggtagacagaagggtctgcagccggggaggagactgagatacatgagaccatccagggagaggggacccagggggaagagcaaaggaccggatcctgggaactggacagttgtgatttggccaagacagaaaagcctgtgaaagagaccaaaaaaacccaagtgcagtgtgaggagaggcccgcagagaagagtcttggaagctgaggggaggtgacctcagcagcacagtggacagcggtgccagtgacttgggaaggtcagaaaacagaagatggaaagtgggtttggaaaccagggagacctggggagagcaggttggccgcagcggcaggagctggaatgggagggggtgcatgaggctgagtgtggcgcatcctcctcggggctgagatggattttacttgtcttgggttccccacggctgtcacagggcagtgtctcagttcattcgtctttttccttcaggaagtctgggtgtaaagggatggagagaggtgaggtgtgtgcagtaagaggatttctcaaggatgggacaggaaggccttggagctttggcttcctcctgtgaacttgtggggtggggagcctggtgcaccaacctgagggacttgagggagtagtatcaggatgtgggattgagccctggaccttttttctagaaagaggaaaaaaatgaagggaggaggaggaggaagctggggagatcacacctttgattttcttgttcctggaaagtgaaaggaagttcacctgctatgagtgagaaggtggacacactgggtggggatgaggtgagtgacatgagcttaggaaagttgctgaggtaattggttgagagaggtgttcaaataaaaataacgcaattggcaaaaactgttactaagactttgtagaggcaccaatcagtgacatggcagcattttctttcacagtaatcaactgccagattgcagacagccctgatgccagcctaaggagtgtgggtttctcctccaggcccgcaggtccccaacctcactcctctgaagactcttctggagatcctctgtgatgcacagatctccagactcagtgcccccagactcagattccctgggtggggaggtctggggatctctgcttgtaatcagctccctagaggttcccatgtagccagataagtattgtcagaacactgaagatttttgaaaaatgaaaaagagaaggttggagatgtgtcttcagaagactactaagggtgctggctagaggagggaccagaggcagggagatgaggtaggaaactgctattatttgtcagggaaattgcaatcaaggcatgagttagaacagggaaaacacagaggcaagggagaggtggaagggggaggaaagaagtagtg

SEQ ID NO: 6084 - protein, 123 aa, Homo sapiens
MMVLQVSAAPRTVALTALLMVLLTSVVQGRATPENYLFQGRQECYAFNGTQRFLERYIYNREEFARFDSDVGEFRAVTELGRPAAEYWNSQKDILEEKRAVPDRMCRHNYELGGPMTLQRRGE

SEQ ID NO: 6085 - DNA, 845 bp, Homo sapiens
agcagaagggactgccttcccctcagtgctcgcccctccctagtgatcactcagtgcccctgagctcattcttttcagtaaattctctctctgcgtggtgagaaaacaggcctggagaggctctgcgacccgcttaggaccacagaactcgagaattaccttttccagggacggcaggaatgctacgcgtttaatgggacacagcgcttcctggagagatacatctacaaccgggaggagttcgcgcgcttcgacagcgacgtgggggagttccgggcggtgacggagctggggcggcctgctgcggagtactggaacagccagaaggacatcctggaggagaagcgggcagtgccggacaggatgtgcagacacaactacgagctgggcgggcccatgaccctgcagcgccgaggctggagtgctgtggcaccatcatggctcactgcagcctcaacctcctgggctcaagtgatcctcctgcctcagcctcccatgtagctagaactacagatacacgtaccaccatgtctggctaatttatttttctttttagagatgggttctcactatgttgcccaggccggtctcaaaaccctgggctcaagtgatcctcatgcctcaacctcccaaagtgctaagattataggcatgaccaccatgcctggccttttctgctttctgaggaggaaaaaggtactggtggcagagatccaaaagaaaagttgccagtggcagtgtggaaattcacctgagaacaacaggacaagctggggcacaaatgcaaagatgcagagggaggcaacacctggtcatctgtgagaccttcatgggacctgaagacg

SEQ ID NO: 6086 - protein, 45 aa, Homo sapiens
MCRHNYELGGPMTLQRRGWSAVAPSWLTAASTSWAQVILLPQPPM

SEQ ID NO: 6087 - DNA, 787 bp, Homo sapiens
gagtgagggctttgggccggcggtcccagggcagccccgcgggcccgtgcccagggcgcaggagcagccgggttggcctaagggaccttagtgccgggcggaaaggggactttgggttggggattcatggggggagcccatctggagcttgtcaggggagcgagcgcggggacctggactgggctgagcatggagtgaggaggacgagagcagagagacccccgggacttcatcaggcctggcagctgactgcatgtggggtgaaaaaaggaagccacaggacagcgcacaaggaaagaggaaaaaaatgaagggaggaggaggaggaagctggggagatcacacctttgattttcttgttcctggaaagtgaaaggaagttcacctgctatgagtgagaaggtggacacactgggtggggatgaggctggagtgctgtggcaccatcatggctcactgcagcctcaacctcctgggctcaagtgatcctcctgcctcagcctcccatgtagctagaactacagatacacgtaccaccatgtctggctaatttatttttctttttagagatgggttctcactatgttgcccaggccggtctcaaaaccctgggctcaagtgatcctcatgcctcaacctcccaaagtgctaagattataggcatgaccaccatgcctggccttttctgctttctgaggaggaaaaaggtactggtggcagagatccaaaagaaaagttgccagtggcagtgtggaaattcacctgagaacaacaggacaagctgggg

SEQ ID NO: 6088 - protein, 42 aa, Homo sapiens
MRLECCGTIMAHCSLNLLGSSDPPASASHVARTTDTRTTMSG

SEQ ID NO: 6089 - DNA, 1188 bp, Homo sapiens
ccctttaatgagttcttgttttcctgactgcagctctcttcattctgccaaccttttccaactccatgatgatcctgcaggtttcagggggcccctggacagtggctctgacagcattactgatggtgctgctcatatctgtggtccagagcagggccactccagagaattccgtctaccaggaacggcaggaatgctatgcgttcaatgggactcagcgcgttgtggacgggctcatctacaaccgggaggaatacgtgcattttgacagcgcagtgggggagttcctagcagtgatggagctggggcggcccataggcgagtacttcaatagccagaaggactttatggaacggaagcgagccgaggtggacaaggtgtgcagacacaagtacgagctgatggagccactcatccggcagcgccgaggagacgtaaccataactgctgttagggggtgttggacgacgattctttctggctacttcctgctgaaaaggggcgtcgtgtcggggggctgcagttggggctcctcctgaggttgatctaaggcttcttggaagaatggcatgtccatgtgtggctttgtttgcagcaccatttgaagtttgattgcttctaggcaaaaagagataaattttacaagaaggtttaaaatatagggttaccatatgagtattaagattaccacctatagactgtaactatggcagtagagtttgatacctgttacaccaatggattgtaatactggtttgtctccactagatgtcgctgtacattaccagaaacgttaatataaaagcatcatttcctttgagaaaacatgtttcccccttgacttgctattagggcataatttttggtttaggccattctttataacttatgatatgattgggagaaaaacgttattgggtggctaaaataactttggtgttaatcttggcaattcctttcctttaattattaaatttcttaattattaaattctttcatgactttcacagaccctcttacaatgtactcaactttctgacttgtcttaaacaaccagtcatttccttttaggacaagaatttactatacaagatcctttcttatataaaatccctttatttgtaaccttctttccatagcttagagtgcaccatttaccaatcttcaataaaaaagtcctatcaaact

SEQ ID NO: 6090 - protein, 157 aa, Homo sapiens [sequence omitted]

SEQ ID NO: 6091 - DNA, 805 bp, Homo sapiens
atgatgatcctgcaggtttcagggggcccctggacagtggctctgacagcattactgatggtgctgctcatatctgtggtccagagcagggccactccagagaattccgtctaccaggaacggcaggaatgctatgcgttcaatgggactcagcgcgttgtggacgggctcatctacaaccgggaggaatacgtgcattttgacagcgcagtgggggagttcctagcagtgatggagctggggcggcccataggcgagtacttcaatagccagaaggactttatggaacggaagcgagccgaggtggacaaggtgtgcagacacaagtacgagctgatggagccactcatccggcagcgccgagtccagcctagggtgaacatctcccctccaagaaggagccccagcagcaccacgacctgcttgtctaccacgtgacagatttctacccagacagcattcaagtccgatgcttcctgaatggacaggaggaaacagctggggtcgtgtccaccaacctgatccgtaatggagactggaccttccagatcctggagatgctggaaatgaccccccagcagggaaacatctacacctgccaagtggagcaccccagcctggacagtcctgtcaccgtggagtggaaggcacagtctgattctgtgcagagcaagatgctgacaggagccaggggcttcatgctggggctcatcatctgtggagtggacatcttcacgcacagaaggaggaagaaagttcaacaaggatctgcataaacaggcaatattcctgctttgatttcctt

SEQ ID NO: 6092 - protein, 145 aa, Homo sapiens
MMILQVSGGPWTVALTALLMVLLISVVQSRATPENSVYQERQECYAFNGTQRVVDGLIYNREEYVHFDSAVGEFLAVMELGRPIGEYFNSQKDFMERKRAEVDKVCRHKYELMEPLIRQRRVQPRVNISPPRRSPSSTTTCLSTT

SEQ ID NO: 6093 - DNA, 732 bp, Homo sapiens
agtgtattttcaccaggtaaagaaagctttttatggttcactgactgaggacaatcaaccccttcacaatctagaacctgaagattggatcttctgagaacatcagagaaagactgcccttgccatccacactgcagtaaacatcagaaccgtgaactttggcttcatgatctcacaactgagaaggatccctccacattcttggaaatatacacccattggaacccgtaagcagaccatgtgtcaacgtatgcagagtttgtgcagacacacagaccctctggggagtatatgtttgaatctgatgaagatgagcagttatttgtgcacctggacaagaaggagatggtctggcatctgtgagagtttattcacactgtgtcaaactttctcagtcagaagttgacataaggaagtcaccagcttcggtctcctttaaatctccaggcctaactttcttttgaatctctgctcttcaaccacaatgacttatgtaccccaagacccctctacctcctggctgcctatgatcctcctgcacctagcactcagcaaagggtctgacatttagatagcactcaatcaatatgaagaatttaaagtgtagtgacaaggtggtgcccacactggatggtctgtatgctgtggtctcatcagggacctttctctgcactgcatttttcctgagaaatcccagagttcaataaatacctgtgtatgtcagagctagac

SEQ ID NO: 6094 - protein, 79 aa, Homo sapiens
MISQLRRIPPHSWKYTPIGTRKQTMCQRMQSLCRHTDPLGSICLNLMKMSSYLCTWTRRRWSGICESLFTLCQTFSVRS

SEQ ID NO: 6095 - DNA, 1997 bp, Homo sapiens
aaaaccaaagcccacaagcccacagatccacagtcccacacactgcaggcctgggccagctgtgtttgcttgggtttgggatggattggagggcgtccgaggcatggatggtccccagggccccaaagggagcttgggaccccagggagagccaggacctcctggacaacagggcacccctgggacccagggtcttcccgggccccagggtgccatcggccctcatggagagaagggtcctcaagggaagccagggctccccggcatgcctgggtcccccaggcgaggtgatccagccactgcccattcagatgcccaagaagactcggcgctcggtggatggaagccgtctgatgcaggaagatgaggccataccgaccgggggagcccccggcagtcctggggggctggaggagatctttggctcactcgactccctgcgggaggagatcgagcagatgaggcggccaacagggacccaggacagccctgctcgcacctgccaggacctgaagctgtgccacccagagcttcccgatggagagtactgggtcgaccccaaccagggctgtgctcgggatgccttccgagttttctgcaacttcacagcagggggtgagacctgtgtgacgcctagggatgacgtcacgcagttctcttacgtggactcagagggctccccagtgggtgtggtccagctcaccttcctgcggctgctcagcgtctcagcccaccaggacgtctcctacccctgctctggagcagcccgtgacggtcccctgagactccgtggggccaatgaggatgagctgagcccggagactagcccctatgtcaaagaattcagagatggctgccagacacagcaaggccggacggtgctggaggtgcgaacgcctgtgctggagcagctgccagtgctggatgcctccttctcagacctgggagccccaccgaggcggggaggggtgctgctggggcctgtctgcttcatgggataggaccgtctctgtctgatcctgtccattcggaaccaggcccacctggaatcccacaacatcagctctgtgccacctcccaagagggctcctcactatctagggagccctgggccagggcgtggagagccctcagtcggggcaggccaggggaggggtgaagtggttgcctggacaccccacgggaggagtggcatctggggctcttggccctcccacctggagcctgttacccgttagagagctgagacccttatttaaaactcacctcccaatcaccccaaacaaatggaagagaagagaaaggacatggcgtattttgtatttaaaagtaattgtattaattatttaaagtgtggaaagcaaaataacaaaaaagagaaacgccaacaaaaatcagcagatgttgaagacaggggtctcgggggtgggctccggcacccacatcctggagtcaggactttcctcagtgactgtgtgtaggggggtttcagggctgaaccccacctccctcccaccttcctcccacctcacctgtcgcacccactgtgaaagttggaatatgtggtctccctggcctcagggctctgactctgccagggtggggctctctaacccacaggtgttggctgcctggcccatgtgcccactgtctcttccacttggtctgggtttggcaggcactgcctgctacttgagggccaggatgctcccccagggaagaaacggaatagtgtggggtgtgtgcagggctgcatcccgcagatggctggaatattaaaattcttctatattggctggtaaattgccatggccctgagccactgagtatgttcattgccacccctgtccctcccctgggcacccctcactttccctgatcctgcaattaaagggttaatgtgtggcatatggaagggactcccaggaccctgtgcccagcttccatgctgactgatggttaaataatgtgattgtctcctcccaggtgtctgtgtc

SEQ ID NO: 6096 - protein, 306 aa, Homo sapiens
MDWRASEAWMVPRAPKGAWDPRESQDLLDNRAPLGPRVFPGPRVPSALMERRVLKGSQGSPACLGPPGEVIQPLPIQMPKKTRRSVDGSRLMQEDEAIPTGGAPGSPGGLEEIFGSLDSLREEIEQMRRPTGTQDSPARTCQDLKLCHPELPDGEYWVDPNQGCARDAFRVFCNFTAGGETCVTPRDDVTQFSYVDSEGSPVGVVQLTFLRLLSVSAHQDVSYPCSGAARDGPLRLRGANEDELSPETSPYVKEFRDGCQTQQGRTVLEVRTPVLEQLPVLDASFSDLGAPPRRGGVLLGPVCFMG

SEQ ID NO: 6097 - DNA, 6114 bp, Homo sapiens
cacacagaagcggcagccaccgaggagggagcagtgccgggagccccgacggcgccttgctgcatggagctgggccgctgacagctgtcgctgcccgcagcctctgacctccctgggaccccggcgtctgaggctcatagtctgctccctgtcttctgtcagcctcagggcatccagcgtctcaggccgacctgggtccctgggacccggcgtttcggcttctcagccatggagcggtgcagccgctgccatcgcctcctcctcctcctacctctggtgctggggctgagcgcggccccaggctgggcaggtgcaccccctgtggatgtgctccgggccctgaggttcccctccctccctgatggtgtccggagagcgaaaggcatctgtccagctgatgtggcctaccgagtggcacgacctgcccagctcagtgcacccactcgccagcttttcccaggaggatttcccaaagatttctctctgctgactgttgtccggacccgccctggtctccaagctcccctcctgactctctacagtgcccagggtgtccgacagctgggcctggagctgggccgacctgtccgcttcctgtatgaagaccagactgggcggcctcaacctccctctcagccagtcttccgaggcctcagcctagcagatggcaagtggcaccgtgtggctgtggctgtgaagggccagtctgtcaccctcattgttgactgcaagaagcgagtcacccggcctctcccccgaagtgctcgtccagtattggacacccatggagtgatcatctttggtgcccgtattctggatgaagaagtctttgagggtgatgtccaggagctggccattgtcccaggggtccaggcagcctatgaatcatgtgaacagaaggagctggaatgcgaggggggccagagggaaagaccccaaaaccaacagcctcacagagcccagagatctccacagcagcaaccatcaagacttcacaggccacaaaatcaggaaccccagagccaggctgcccatggaccccgagggctgaagggagagaaaggagagcctgcagtgttggaacctggtatgctcgtggaggggccccctggcccagaaggccctgcgggattgattggtccccctggcatccaggggaacccaggcccagttggagaccctggagagaggggcccccctggccgagcagggctccctggatcagatggggctcctggtcctcctggcacatctctcatgctcccattccggtttggcagtggtgggggtgacaagggccctgtggtggcggcccaggaggctcaggcccaggcgatcctgcagcaggcgaggctggcgctccgtggaccccctggccccatgggatacacagggcgccctggacccttgggccaacctgggagccctggcctgaaaggagagtctggagacttaggacctcagggccccagaggacctcagggcctcacaggccctcctggcaaggctgggcgaaggggccgggcaggtgctgatggagcccgagggatgcctggagatcctggagtgaagggtgaccgaggttttgatggactcccagggctccctggagagaagggccataggggtgatactggtgcccagggccttcctggtccccctggtgaggatggagagaggggagatgacggggagattgggcctcgagggctgcctggagagtcgggacctcgaggtctccttggccccaaaggcccacctggtattcctggaccccctggcgtccgaggcatggatggtccccagggccccaaagggagcttgggaccccagggagagccaggacctcctggacaacagggcacccctgggacccagggtcttcccgggccccagggtgccatcggccctcatggagagaagggtcctcaagggaagccagggctccccggcatgcctggctcagacggacccccgggtcacccagggaaggaaggtccccctggaaccaaaggaaaccagggtccctctggacctcagggacctctaggatacccaggacctcgaggggtcaagggtgtggacggaattcggggtctgaagggtcataagggtgagaagggtgaggatggctttcctgggttcaaaggtgacataggcgtgaaaggtgacaggggcgaagttggagtccctggttccaggggagaggatggtcctgaggggccaaagggacgcactggaccgactggagaccctgggcccccagggctcatgggcgagaagggcaagctgggtgttcctggtctgcctggctatcctggacgtcagggacccaaggggtccctaggatttcctggctttcctggtgccagtggagagaagggagcccggggcctgtcggggaagtcagggcctcggggagaacggggccccacgggtccacggggtcagcggggaccccgaggtgccactgggaagtctggagctaagggaacatctggtggtgatggcccccatgggccccctggagagaggggcctccctggacctcagggtcccaacgggtttcctggaccgaaaggacccccgggcccccctgggaaggatgggctgccgggacacccaggccaaagaggagaagtgggtttccaagggaagaccggcccccctggtcctccaggagtggtgggacctcagggagcagcaggagaaaccggccctatgggggagagaggtcacccaggccccccggggccccctggagagcagggactacctgggacagctggaaaagaaggaacaaagggtgaccctggtccccctggggccccagggaaggatggtcctgctggtctgaggggattcccaggagagagaggcctcccaggcactgctggtggacctggtttgaaggggaatgaaggtccgtctggcccccctggccctgcaggctcccctggggaacgaggtgcagcaggatcagggggacccattggtccgccagggcgcccaggcccgcagggtccccctggagcagcaggagagaaaggtgtcccaggtgagaagggccccattggcccgactggccgagatggagtgcagggtcctgtggggcttcctggtcctgctgggcctccaggtgtggctggagaggatggagacaagggtgaggtgggggaccccggacagaagggcaccaaagggaacaagggtgaacatggccctcctggaccccctggacccattggtcctgtggggcagcctggagcagcgggagcagatggggagcccggagctcggggaccccagggacactttggagccaaaggtgatgaaggaacaagaggattcaatgggcccccaggacccattggcctacagggtttgccaggcccctctggggagaagggagaaacaggagatgtgggtcctatgggaccacctggccccccaggacctcgaggtccagctggacccaatggcgctgatggcccacaaggtcccccaggaggtgttgggaacctgggtccccctggagagaagggggaaccaggagagtcaggatctccagggatccagggcgagccaggtgtcaagggtccacgcggggaacgtggagagaaaggagagtcggggcagccaggagagccagggccaccagggcctaaaggccccacaggcgatgatggccccaaagggaaccctggtcctgttggttttcctggtgaccctggcccccctggagaaggtggccctcggggccaggatggtgctaagggtgaccgaggcgaggatggtgagccaggacagcctggatcccctggtcccaccggggagaatggacccccagggccacttggaaagcgaggtcctgctggctcgcctggttccgaggggcgacaaggagggaagggagccaagggagatcctggcgctataggtgccccggggaagacaggcccggtgggtcctgcaggcccagcagggaaacctggccctgatggtctgagggggctcccaggctcagtgggtcagcaaggccgacctggagctacaggccaggctgggcccccaggtcctgtgggacccccagggctgcctggtctccggggcgatgctggagccaagggagagaagggccacccaggtctcattggactgattgggcccccgggtgagcagggagagaagggagatcggggacttcctgggcctcagggctcccctgggcagaagggtgagatgggtatcccaggagcatccggccccattggtcctggaggtccccccggcctccccggacctgctggccccaaaggagccaaaggagccacaggcccaggcggacccaagggagagaagggtgtgcagggccctccaggacacccgggtcccccaggcgaggtgatccagccactgcccattcagatgcccaagaagactcggcgctcggtggatggaagccgtctgatgcaggaagatgaggccataccgaccgggggagcccccggcagtcctggggggctggaggagatctttggctcactcgactccctgcgggaggagatcgagcagatgaggcggccaacagggacccaggacagccctgctcgcacctgccaggacctgaagctgtgccacccagagcttcccgatggagagtactgggtcgaccccaaccagggctgtgctcgggatgccttccgagttttctgcaacttcacagcagggggtgagacctgtgtgacgcctagggatgacgtcacgcagttctcttacgtggactcagagggctccccagtgggtgtggtccagctcaccttcctgcggctgctcagcgtctcagcccaccaggacgtctcctacccctgctctggagcagcccgtgacggtcccctgagactccgtggggccaatgaggatgagctgagcccggagactagcccctatgtcaaagaattcagagatggctgccagacacagcaaggccggacggtgctggaggtgcgaacgcctgtgctggagcagctgccagtgctggatgcctccttctcagacctgggagccccaccgaggcggggaggggtgctgctggggcctgtctgcttcatgggataggaccgtctctgtctgatcctgtccattcggaaccaggcccacctggaatcccacaacatcagctctgtgccacctcccaagagggctcctcactatctagggagccctgggccagggcgtggagagccctcagtcggggcaggccaggggaggggtgaagtggttgcctggacaccccacgggaggagtggcatctggggctcttggccctcccacctggagcctgttacccgttagagagctgagacccttatttaaaactcacctcccaatcaccccaaacaaatggaagagaagagaaaggacatggcgtattttgtatttaaaagtaattgtattaattatttaaagtgtggaaagcaaaataacaaaaaagagaaacgccaacaaaaatcagcagatgttgaagacaggggtctcgggggtgggctccggcacccacatcctggagtcaggactttcctcagtgactgtgtgtaggggggtttcagggctgaaccccacctccctcccaccttcctcccacctcacctgtcgcacccactgtgaaagttggaatatgtggtctccctggcctcagggctctgactctgccagggtggggctctctaacccacaggtgttggctgcctggcccatgtgcccactgtctcttccacttggtctgggtttggcaggcactgcctgctacttgagggccaggatgctcccccagggaagaaacggaatagtgtggggtgtgtgcagggctgcatcccgcagatggctggaatattaaaattcttctatattggctggtaaattgccatggccctgagccactgagtatgttcattgccacccctgtccctcccctgggcacccctcactttccctgatcctgcaattaaagggttaatgtgtggcatatggaagggactcccaggaccctgtgcccagcttccatgctgactgatggttaaataatgtgattgtctcctcccaggtgtctgtgtc

SEQ ID NO: 6098 - protein, 1629 aa, Homo sapiens; identical to SEQ ID NO: 736

SEQ ID NO: 6099 - DNA, 6435 bp, Homo sapiens
cacacagaagcggcagccaccgaggagggagcagtgccgggagccccgacggcgccttgctgcatggagctgggccgctgacagctgtcgctgcccgcagcctctgacctccctgggaccccggcgtctgaggctcatagtctgctccctgtcttctgtcagcctcagggcatccagcgtctcaggccgacctgggtccctgggacccggcgtttcggcttctcagccatggagcggtgcagccgctgccatcgcctcctcctcctcctacctctggtgctggggctgagcgcggccccaggctgggcaggtgcaccccctgtggatgtgctccgggccctgaggttcccctccctccctgatggtgtccggagagcgaaaggcatctgtccagctgatgtggcctaccgagtggcacgacctgcccagctcagtgcacccactcgccagcttttcccaggaggatttcccaaagatttctctctgctgactgttgtccggacccgccctggtctccaagctcccctcctgactctctacagtgcccagggtgtccgacagctgggcctggagctgggccgacctgtccgcttcctgtatgaagaccagactgggcggcctcaacctccctctcagccagtcttccgaggcctcagcctagcagatggcaagtggcaccgtgtggctgtggctgtgaagggccagtctgtcaccctcattgttgactgcaagaagcgagtcacccggcctctcccccgaagtgctcgtccagtattggacacccatggagtgatcatctttggtgcccgtattctggatgaagaagtctttgagggtgatgtccaggagctggccattgtcccaggggtccaggcagcctatgaatcatgtgaacagaaggagctggaatgcgaggggggccagagggaaagaccccaaaaccaacagcctcacagagcccagagatctccacagcagcaaccatcaagacttcacaggccacaaaatcaggaaccccagagccagcccactgagtctctctactatgactacgagcccccctattatgatgtgatgactacggggacaacccctgattatcaggaccccaccccaggtgaagaggaagaaatcctggagtcgagcctcttgccaccccttgaggaggagcagacagatctccaggtcccccccacagccgacaggttccaggcagaggaatatggggagggtggcacagacccccctgaagggccctacgattacacctatggctatggggatgattatcgtgaggagacagagcttggccctgccctctctgcggagacagcccactcaggagccgctgcccatggaccccgagggctgaagggagagaaaggagagcctgcagtgttggaacctggtatgctcgtggaggggccccctggcccagaaggccctgcgggattgattggtccccctggcatccaggggaacccaggcccagttggagaccctggagagaggggcccccctggccgagcagggctccctggatcagatggggctcctggtcctcctggcacatctctcatgctcccattccggtttggcagtggtgggggtgacaagggccctgtggtggcggcccaggaggctcaggcccaggcgatcctgcagcaggcgaggctggcgctccgtggaccccctggccccatgggatacacagggcgccctggacccttgggccaacctgggagccctggcctgaaaggagagtctggagacttaggacctcagggccccagaggacctcagggcctcacaggccctcctggcaaggctgggcgaaggggccgggcaggtgctgatggagcccgagggatgcctggagatcctggagtgaagggtgaccgaggttttgatggactcccagggctccctggagagaagggccataggggtgatactggtgcccagggccttcctggtccccctggtgaggatggagagaggggagatgacggggagattgggcctcgagggctgcctggagagtcgggacctcgaggtctccttggccccaaaggcccacctggtattcctggaccccctggcgtccgaggcatggatggtccccagggccccaaagggagcttgggaccccagggagagccaggacctcctggacaacagggcacccctgggacccagggtcttcccgggccccagggtgccatcggccctcatggagagaagggtcctcaagggaagccagggctccccggcatgcctggctcagacggacccccgggtcacccagggaaggaaggtccccctggaaccaaaggaaaccagggtccctctggacctcagggacctctaggatacccaggacctcgaggggtcaagggtgtggacggaattcggggtctgaagggtcataagggtgagaagggtgaggatggctttcctgggttcaaaggtgacataggcgtgaaaggtgacaggggcgaagttggagtccctggttccaggggagaggatggtcctgaggggccaaagggacgcactggaccgactggagaccctgggcccccagggctcatgggcgagaagggcaagctgggtgttcctggtctgcctggctatcctggacgtcagggacccaaggggtccctaggatttcctggctttcctggtgccagtggagagaagggagcccggggcctgtcggggaagtcagggcctcggggagaacggggccccacgggtccacggggtcagcggggaccccgaggtgccactgggaagtctggagctaagggaacatctggtggtgatggcccccatgggccccctggagagaggggcctccctggacctcagggtcccaacgggtttcctggaccgaaaggacccccgggcccccctgggaaggatgggctgccgggacacccaggccaaagaggagaagtgggtttccaagggaagaccggcccccctggtcctccaggagtggtgggacctcagggagcagcaggagaaaccggccctatgggggagagaggtcacccaggccccccggggccccctggagagcagggactacctgggacagctggaaaagaaggaacaaagggtgaccctggtccccctggggccccagggaaggatggtcctgctggtctgaggggattcccaggagagagaggcctcccaggcactgctggtggacctggtttgaaggggaatgaaggtccgtctggcccccctggccctgcaggctcccctggggaacgaggtgcagcaggatcagggggacccattggtccgccagggcgcccaggcccgcagggtccccctggagcagcaggagagaaaggtgtcccaggtgagaagggccccattggcccgactggccgagatggagtgcagggtcctgtggggcttcctggtcctgctgggcctccaggtgtggctggagaggatggagacaagggtgaggtgggggaccccggacagaagggcaccaaagggaacaagggtgaacatggccctcctggaccccctggacccattggtcctgtggggcagcctggagcagcgggagcagatggggagcccggagctcggggaccccagggacactttggagccaaaggtgatgaaggaacaagaggattcaatgggcccccaggacccattggcctacagggtttgccaggcccctctggggagaagggagaaacaggagatgtgggtcctatgggaccacctggccccccaggacctcgaggtccagctggacccaatggcgctgatggcccacaaggtcccccaggaggtgttgggaacctgggtccccctggagagaagggggaaccaggagagtcaggatctccagggatccagggcgagccaggtgtcaagggtccacgcggggaacgtggagagaaaggagagtcggggcagccaggagagccagggccaccagggcctaaaggccccacaggcgatgatggccccaaagggaaccctggtcctgttggttttcctggtgaccctggcccccctggagaaggtggccctcggggccaggatggtgctaagggtgaccgaggcgaggatggtgagccaggacagcctggatcccctggtcccaccggggagaatggacccccagggccacttggaaagcgaggtcctgctggctcgcctggttccgaggggcgacaaggagggaagggagccaagggagatcctggcgctataggtgccccggggaagacaggcccggtgggtcctgcaggcccagcagggaaacctggccctgatggtctgagggggctcccaggctcagtgggtcagcaaggccgacctggagctacaggccaggctgggcccccaggtcctgtgggacccccagggctgcctggtctccggggcgatgctggagccaagggagagaagggccacccaggtctcattggactgattgggcccccgggtgagcagggagagaagggagatcggggacttcctgggcctcagggctcccctgggcagaagggtgagatgggtatcccaggagcatccggccccattggtcctggaggtccccccggcctccccggacctgctggccccaaaggagccaaaggagccacaggcccaggcggacccaagggagagaagggtgtgcagggccctccaggacacccgggtcccccaggcgaggtgatccagccactgcccattcagatgcccaagaagactcggcgctcggtggatggaagccgtctgatgcaggaagatgaggccataccgaccgggggagcccccggcagtcctggggggctggaggagatctttggctcactcgactccctgcgggaggagatcgagcagatgaggcggccaacagggacccaggacagccctgctcgcacctgccaggacctgaagctgtgccacccagagcttcccgatggagagtactgggtcgaccccaaccagggctgtgctcgggatgccttccgagttttctgcaacttcacagcagggggtgagacctgtgtgacgcctagggatgacgtcacgcagttctcttacgtggactcagagggctccccagtgggtgtggtccagctcaccttcctgcggctgctcagcgtctcagcccaccaggacgtctcctacccctgctctggagcagcccgtgacggtcccctgagactccgtggggccaatgaggatgagctgagcccggagactagcccctatgtcaaagaattcagagatggctgccagacacagcaaggccggacggtgctggaggtgcgaacgcctgtgctggagcagctgccagtgctggatgcctccttctcagacctgggagccccaccgaggcggggaggggtgctgctggggcctgtctgcttcatgggataggaccgtctctgtctgatcctgtccattcggaaccaggcccacctggaatcccacaacatcagctctgtgccacctcccaagagggctcctcactatctagggagccctgggccagggcgtggagagccctcagtcggggcaggccaggggaggggtgaagtggttgcctggacaccccacgggaggagtggcatctggggctcttggccctcccacctggagcctgttacccgttagagagctgagacccttatttaaaactcacctcccaatcaccccaaacaaatggaagagaagagaaaggacatggcgtattttgtatttaaaagtaattgtattaattatttaaagtgtggaaagcaaaataacaaaaaagagaaacgccaacaaaaatcagcagatgttgaagacaggggtctcgggggtgggctccggcacccacatcctggagtcaggactttcctcagtgactgtgtgtaggggggtttcagggctgaaccccacctccctcccaccttcctcccacctcacctgtcgcacccactgtgaaagttggaatatgtggtctccctggcctcagggctctgactctgccagggtggggctctctaacccacaggtgttggctgcctggcccatgtgcccactgtctcttccacttggtctgggtttggcaggcactgcctgctacttgagggccaggatgctcccccagggaagaaacggaatagtgtggggtgtgtgcagggctgcatcccgcagatggctggaatattaaaattcttctatattggctggtaaattgccatggccctgagccactgagtatgttcattgccacccctgtccctcccctgggcacccctcactttccctgatcctgcaattaaagggttaatgtgtggcatatggaagggactcccaggaccctgtgcccagcttccatgctgactgatggttaaataatgtgattgtctcctcccaggtgtctgtgtc

SEQ ID NO: 6100 - protein, 1736 aa, Homo sapiens; identical to SEQ ID NO: 738

SEQ ID NO: 6101 - DNA, 6177 bp, Homo sapiens
cacacagaagcggcagccaccgaggagggagcagtgccgggagccccgacggcgccttgctgcatggagctgggccgctgacagctgtcgctgcccgcagcctctgacctccctgggaccccggcgtctgaggctcatagtctgctccctgtcttctgtcagcctcagggcatccagcgtctcaggccgacctgggtccctgggacccggcgtttcggcttctcagccatggagcggtgcagccgctgccatcgcctcctcctcctcctacctctggtgctggggctgagcgcggccccaggctgggcaggtgcaccccctgtggatgtgctccgggccctgaggttcccctccctccctgatggtgtccggagagcgaaaggcatctgtccagctgatgtggcctaccgagtggcacgacctgcccagctcagtgcacccactcgccagcttttcccaggaggatttcccaaagatttctctctgctgactgttgtccggacccgccctggtctccaagctcccctcctgactctctacagtgcccagggtgtccgacagctgggcctggagctgggccgacctgtccgcttcctgtatgaagaccagactgggcggcctcaacctccctctcagccagtcttccgaggcctcagcctagcagatggcaagtggcaccgtgtggctgtggctgtgaagggccagtctgtcaccctcattgttgactgcaagaagcgagtcacccggcctctcccccgaagtgctcgtccagtattggacacccatggagtgatcatctttggtgcccgtattctggatgaagaagtctttgagggtgatgtccaggagctggccattgtcccaggggtccaggcagcctatgaatcatgtgaacagaaggagctggaatgcgaggggggccagagggaaagaccccaaaaccaacagcctcacagagcccagagatctccacagcagcaaccatcaagacttcacaggccacaaaatcaggaaccccagagccaggaccccaccccaggtgaagaggaagaaatcctggagtcgagcctcttgccaccccttgaggaggctgcccatggaccccgagggctgaagggagagaaaggagagcctgcagtgttggaacctggtatgctcgtggaggggccccctggcccagaaggccctgcgggattgattggtccccctggcatccaggggaacccaggcccagttggagaccctggagagaggggcccccctggccgagcagggctccctggatcagatggggctcctggtcctcctggcacatctctcatgctcccattccggtttggcagtggtgggggtgacaagggccctgtggtggcggcccaggaggctcaggcccaggcgatcctgcagcaggcgaggctggcgctccgtggaccccctggccccatgggatacacagggcgccctggacccttgggccaacctgggagccctggcctgaaaggagagtctggagacttaggacctcagggccccagaggacctcagggcctcacaggccctcctggcaaggctgggcgaaggggccgggcaggtgctgatggagcccgagggatgcctggagatcctggagtgaagggtgaccgaggttttgatggactcccagggctccctggagagaagggccataggggtgatactggtgcccagggccttcctggtccccctggtgaggatggagagaggggagatgacggggagattgggcctcgagggctgcctggagagtcgggacctcgaggtctccttggccccaaaggcccacctggtattcctggaccccctggcgtccgaggcatggatggtccccagggccccaaagggagcttgggaccccagggagagccaggacctcctggacaacagggcacccctgggacccagggtcttcccgggccccagggtgccatcggccctcatggagagaagggtcctcaagggaagccagggctccccggcatgcctggctcagacggacccccgggtcacccagggaaggaaggtccccctggaaccaaaggaaaccagggtccctctggacctcagggacctctaggatacccaggacctcgaggggtcaagggtgtggacggaattcggggtctgaagggtcataagggtgagaagggtgaggatggctttcctgggttcaaaggtgacataggcgtgaaaggtgacaggggcgaagttggagtccctggttccaggggagaggatggtcctgaggggccaaagggacgcactggaccgactggagaccctgggcccccagggctcatgggcgagaagggcaagctgggtgttcctggtctgcctggctatcctggacgtcagggacccaaggggtccctaggatttcctggctttcctggtgccagtggagagaagggagcccggggcctgtcggggaagtcagggcctcggggagaacggggccccacgggtccacggggtcagcggggaccccgaggtgccactgggaagtctggagctaagggaacatctggtggtgatggcccccatgggccccctggagagaggggcctccctggacctcagggtcccaacgggtttcctggaccgaaaggacccccgggcccccctgggaaggatgggctgccgggacacccaggccaaagaggagaagtgggtttccaagggaagaccggcccccctggtcctccaggagtggtgggacctcagggagcagcaggagaaaccggccctatgggggagagaggtcacccaggccccccggggccccctggagagcagggactacctgggacagctggaaaagaaggaacaaagggtgaccctggtccccctggggccccagggaaggatggtcctgctggtctgaggggattcccaggagagagaggcctcccaggcactgctggtggacctggtttgaaggggaatgaaggtccgtctggcccccctggccctgcaggctcccctggggaacgaggtgcagcaggatcagggggacccattggtccgccagggcgcccaggcccgcagggtccccctggagcagcaggagagaaaggtgtcccaggtgagaagggccccattggcccgactggccgagatggagtgcagggtcctgtggggcttcctggtcctgctgggcctccaggtgtggctggagaggatggagacaagggtgaggtgggggaccccggacagaagggcaccaaagggaacaagggtgaacatggccctcctggaccccctggacccattggtcctgtggggcagcctggagcagcgggagcagatggggagcccggagctcggggaccccagggacactttggagccaaaggtgatgaaggaacaagaggattcaatgggcccccaggacccattggcctacagggtttgccaggcccctctggggagaagggagaaacaggagatgtgggtcctatgggaccacctggccccccaggacctcgaggtccagctggacccaatggcgctgatggcccacaaggtcccccaggaggtgttgggaacctgggtccccctggagagaagggggaaccaggagagtcaggatctccagggatccagggcgagccaggtgtcaagggtccacgcggggaacgtggagagaaaggagagtcggggcagccaggagagccagggccaccagggcctaaaggccccacaggcgatgatggccccaaagggaaccctggtcctgttggttttcctggtgaccctggcccccctggagaaggtggccctcggggccaggatggtgctaagggtgaccgaggcgaggatggtgagccaggacagcctggatcccctggtcccaccggggagaatggacccccagggccacttggaaagcgaggtcctgctggctcgcctggttccgaggggcgacaaggagggaagggagccaagggagatcctggcgctataggtgccccggggaagacaggcccggtgggtcctgcaggcccagcagggaaacctggccctgatggtctgagggggctcccaggctcagtgggtcagcaaggccgacctggagctacaggccaggctgggcccccaggtcctgtgggacccccagggctgcctggtctccggggcgatgctggagccaagggagagaagggccacccaggtctcattggactgattgggcccccgggtgagcagggagagaagggagatcggggacttcctgggcctcagggctcccctgggcagaagggtgagatgggtatcccaggagcatccggccccattggtcctggaggtccccccggcctccccggacctgctggccccaaaggagccaaaggagccacaggcccaggcggacccaagggagagaagggtgtgcagggccctccaggacacccgggtcccccaggcgaggtgatccagccactgcccattcagatgcccaagaagactcggcgctcggtggatggaagccgtctgatgcaggaagatgaggccataccgaccgggggagcccccggcagtcctggggggctggaggagatctttggctcactcgactccctgcgggaggagatcgagcagatgaggcggccaacagggacccaggacagccctgctcgcacctgccaggacctgaagctgtgccacccagagcttcccgatggagagtactgggtcgaccccaaccagggctgtgctcgggatgccttccgagttttctgcaacttcacagcagggggtgagacctgtgtgacgcctagggatgacgtcacgcagttctcttacgtggactcagagggctccccagtgggtgtggtccagctcaccttcctgcggctgctcagcgtctcagcccaccaggacgtctcctacccctgctctggagcagcccgtgacggtcccctgagactccgtggggccaatgaggatgagctgagcccggagactagcccctatgtcaaagaattcagagatggctgccagacacagcaaggccggacggtgctggaggtgcgaacgcctgtgctggagcagctgccagtgctggatgcctccttctcagacctgggagccccaccgaggcggggaggggtgctgctggggcctgtctgcttcatgggataggaccgtctctgtctgatcctgtccattcggaaccaggcccacctggaatcccacaacatcagctctgtgccacctcccaagagggctcctcactatctagggagccctgggccagggcgtggagagccctcagtcggggcaggccaggggaggggtgaagtggttgcctggacaccccacgggaggagtggcatctggggctcttggccctcccacctggagcctgttacccgttagagagctgagacccttatttaaaactcacctcccaatcaccccaaacaaatggaagagaagagaaaggacatggcgtattttgtatttaaaagtaattgtattaattatttaaagtgtggaaagcaaaataacaaaaaagagaaacgccaacaaaaatcagcagatgttgaagacaggggtctcgggggtgggctccggcacccacatcctggagtcaggactttcctcagtgactgtgtgtaggggggtttcagggctgaaccccacctccctcccaccttcctcccacctcacctgtcgcacccactgtgaaagttggaatatgtggtctccctggcctcagggctctgactctgccagggtggggctctctaacccacaggtgttggctgcctggcccatgtgcccactgtctcttccacttggtctgggtttggcaggcactgcctgctacttgagggccaggatgctcccccagggaagaaacggaatagtgtggggtgtgtgcagggctgcatcccgcagatggctggaatattaaaattcttctatattggctggtaaattgccatggccctgagccactgagtatgttcattgccacccctgtccctcccctgggcacccctcactttccctgatcctgcaattaaagggttaatgtgtggcatatggaagggactcccaggaccctgtgcccagcttccatgctgactgatggttaaataatgtgattgtctcctcccaggtgtctgtgtc

SEQ ID NO: 6102 - protein, 1650 aa, Homo sapiens; identical to SEQ ID NO: 740

SEQ ID NO: 6103 - DNA, 1193 bp, Homo sapiens
agccaccgaggagggagcagtgccgggagccccgacggcgccttgctgcatggagctgggccgctgacagctgtcgctgcccgcagcctctgacctccctgggaccccggcgtctgaggctcatagtctgctccctgtcttctgtcagcctcagggcatccagcgtctcaggccgacctgggtccctgggacccggcgtttcggcttctcagccatggagcggtgcagccgctgccatcgcctcctcctcctcctacctctggtgctggggctgagcgcggccccaggctgggcaggtgcaccccctgtggatgtgctccgggccctgaggttcccctccctccctgatggtgtccggagagcgaaaggcatctgtccagctgatgtggcctaccgagtggcacgacctgcccagctcagtgcacccactcgccagcttttcccaggaggatttcccaaagatttctctctgctgactgttgtccggacccgccctggtctccaagctcccctcctgactctctacagtgcccagggtgtccgacagctgggcctggagctgggccgacctgtccgcttcctgtatgaagaccagactgggcggcctcaacctccctctcagccagtcttccgaggcctcagcctagcagatggcaagtggcaccgtgtggctgtggctgtgaagggccagtctgtcaccctcattgttgactgcaagaagcgagtcacccggcctctcccccgaagtgctcgtccagtattggacacccatggagtgatcatctttggtgcccgtattctggatgaagaagtctttgagggtgatgtccaggagctggccattgtcccaggggtccaggcagcctatgaatcatgtgaacagaaggagctggaatgcgaggggggccagagggaaagaccccaaaaccaacagcctcacagagcccagagatctccacagcagcaaccatcaagacttcacaggccacaaaatcaggaaccccagagccaggtgagggagctgggagaacccccaagtgcagcacaccccagagagggaagacacccaggcatctctcctccttagttgtcctccccaccctcatctccctattcccatcaccccctcctcctagtcctcattcatcagcctttttattttcatctaaaaataaaaagagttgttatgaaga

SEQ ID NO: 6104 - protein, 290 aa, Homo sapiens
MERCSRCHRLLLLLPLVLGLSAAPGWAGAPPVDVLRALRFPSLPDGVRRAKGICPADVAYRVARPAQLSAPTRQLFPGGFPKDFSLLTVVRTRPGLQAPLLTLYSAQGVRQLGLELGRPVRFLYEDQTGRPQPPSQPVFRGLSLADGKWHRVAVAVKGQSVTLIVDCKKRVTRPLPRSARPVLDTHGVIIFGARILDEEVFEGDVQELAIVPGVQAAYESCEQKELECEGGQRERPQNQQPHRAQRSPQQQPSRLHRPQNQEPQSQVRELGEPPSAAHPREGRHPGISPP

SEQ ID NO: 6105 - DNA, 2897 bp, Homo sapiens
ccgagacttcccgtctgtacaaagatggctgccacattggcgctgtcattttggtactgagcagagcgacgggcttaattcgacccaatccaggccagagtctttctctcaggggcttcctcgtgctcagctaatcctccgatcaatccttgggaatccctgggacctcttcggtatccctactctcagccagggatcatgtcttgggccgctcgcccgcccttcctccctcagcggcatgccgcagggcagtgtgggccggtgggggtgcgaaaagaaatgcattgtggggtcgcgtcccggtggcggcggcgacggccctggctggatcccgcagcggcggcggcggcggcggtggcaggcggagaacaacaaaccccggagccggagccaggggaggctggacgggacgggatgggcgacagcgggcgggactcccgaagcccagacagctcctccccaaatccccttccccagggagtccctcccccttctcctcctgggccacccctacccccttcaacagctccatcccttggaggctctggggccccacccccacccccgatgccaccacccccactgggctctccctttccagtcatcagttcttccatggggtcccctggtctgccccctccagctcccccaggattctccgggcctgtcagcagcccccagattaactcaacagtgtcactccctgggggtgggtctggcccccctgaagatgtgaagccaccagtcttaggggtccggggcctgcactgtccaccccctccaggtggccctggggctggcaaacggctatgtgcaatctgcggggacagaagctcaggcaaacactacggggtttacagctgtgagggttgcaagggcttcttcaaacgcaccatccgcaaagaccttacatactcttgccgggacaacaaagactgcacagtggacaagcgccagcggaaccgctgtcagtactgccgctatcagaagtgcctggccactggcatgaagagggaggcggtacaggaggagcgtcagcggggaaaggacaaggatggggatggggagggggctgggggagcccccgaggagatgcctgtggacaggatcctggaggcagagcttgctgtggaacagaagagtgaccagggcgttgagggtcctgggggaaccgggggtagcggcagcagcccaaatgaccctgtgactaacatctgtcaggcagctgacaaacagctattcacgcttgttgagtgggcgaagaggatcccacacttttcctccttgcctctggatgatcaggtcatattgctgcgggcaggctggaatgaactcctcattgcctccttctcacaccgatccattgatgttcgagatggcatcctccttgccacaggtcttcacgtgcaccgcaactcagcccattcagcaggagtaggagccatctttgatcgggtgctgacagagctagtgtccaaaatgcgtgacatgaggatggacaagacagagcttggctgcctgagggcaatcattctgtttaatccagatgccaagggcctctccaaccctagtgaggtggaggtcctgcgggagaaagtgtatgcatcactggagacctactgcaaacagaagtaccctgagcagcagggacggtttgccaagctgctgctacgtcttcctgccctccggtccattggccttaagtgtctagagcatctgtttttcttcaagctcattggtgacacccccatcgacaccttcctcatggagatgcttgaggctccccatcaactggcctgagctcagacccagacgtggtgcttctcacactggaggagcacacatccaagagggactccaagccctggggcagggtggggggccatgttcccagaaccttgatggggtgagaagtacagggcagaaccaagaacataaaccctccaagggatctgcttgatatcccaagttggaagggaccccagatacctgtgaggactggttgtctctcttcggtggccttgagtctctgaatttgtcgggttctcccatgatttggggtgatttctcaccctctgtccttcccccagcacaaagcactggccttgcctccaggaccttgcttccttctcatcttgcctcattttgcttcccatctgaagagtggaaatggggaactcccccagaggtggatactggggggcaggcctcccaagctgatggacatgagagtagggccctgacaggccttcctcctctcaaacctggcagatgggggcctctctggaagagggaggggccctgtcactgtccagagtctctttttacacttcacctccttctgcagtcagactgaaatataaaaaaggtggtggtggtggtgaaggggctggtggagatgtaggaaccgatctgctatttttaatttcctgtgaggatagagacttgcagttagactcaaagaagtactgtactttcccaggttgactaagaaatgccagtggtggaggtgggtgtttgggaaaggcagggccctgaaatggcctgtccctagggctctccaagcactagccttcccagcttcccgccgccccccctatctcttcctgtctaacttggggaaggggcctgggctgtgaggacagggcccccacaggggatggtttcacgagtgtagtcccggaggccttccctttacagctctcctccagccctgggcacatagcataggctggggacacaggatcctggcctgagaattgaggggaggtggccagcccgcagaggtggggtgctggggctgcatgatttttgccctgcgtcccttctctttggggctcctttcccctctcatacataaaatcgctttcaaattaaaatcgctgttttctggactg

SEQ ID NO: 6106 - protein, 533 aa, Homo sapiens; identical to SEQ ID NO: 742

SEQ ID NO: 6107 - DNA, 1485 bp, Homo sapiens
ttggggttgtgctccagggatggcctttcacatagactgcagtgtaaatgacagcctctggaatgtgcattgcagggccttgcttagtggtagggaatgatttccatcacttctgtgacattctgcttcccaataagtcttcctgtgacttccctatttcccccatcccagattaactcaacagtgtcactccctgggggtgggtctggcccccctgaagatgtgaagccaccagtcttaggggtccggggcctgcactgtccaccccctccaggtggccctggggctggcaaacggctatgtgcaatctgcggggacagaagctcaggcaaacactacggggtttacagctgtgagggttgcaagggcttcttcaaacgcaccatccgcaaagaccttacatactcttgccgggacaacaaagactgcacagtggacaagcgccagcggaaccgctgtcagtactgccgctatcagaagtgcctggccactggcatgaagagggaggcggtacaggaggagcgtcagcggggaaaggacaaggatggggatggggagggggctgggggagcccccgaggagatgcctgtggacaggatcctggaggcagagcttgctgtggaacagaagagtgaccagggcgttgagggtcctgggggaaccgggggtagcggcagcagcgtgagtgttggggtcaatccactctccttcgtgatgggggttgggggaggcagtctaggtctgttctacatcccctccccctcctttcccctcataaccttcctaacactacttgggactggaggtgctgccaaacaaggtctttcaaacatctgaggtggatgtgatagctccttctgtctccactccccaaacaacccactggcagaaccataggcatgtcccaaataaataattgtttgcactaatgccagaagagaagactcacttacagggattggtttggatggggctcacaggaagactatatgtaaggagggggtgtcaaaagcctcttacaagggggctcccagcatatctcaaaatcttccataactcttacccccgtcccctgcagccaaatgaccctgtgactaacatctgtcaggcagctgacaaacagctattcacgcttgttgagtgggcgaagaggatcccacacttttcctccttgcctctggatgatcaggtcatattgctgcgggcaggtcagtgaccttggatccctttgacttcttgacatttgacccctctttgacttcccgatctttagtgaccccagtggccttaccttgcgtacccagggagccaaacttgctgacctcgccacctcttttctccttctcttccactgatgtgctttgaatcccttggcctgatttctggctcctgacccttgctgccccacccaggctggaatgaactcctcattgcctccttctcacaccgatccattgatgttcgagatggcatcctccttgccac

SEQ ID NO: 6108 - protein, 246 aa, Homo sapiens [sequence omitted]

SEQ ID NO: 6109 - DNA, 2152 bp, Homo sapiens
atattggtaaaggcattagggcgaaggtggaacggaacttcctgttctcgcgggatctaaaggcgggactgccacgtccaagcaaaccgggaaaggagaggatcccggagccgcgtgatggccagaggcctgggggccccccactgggtggccgtgggactgctgacctgggcgaccttggggcttctggtggctggactcgggggtcatgacgacctgcacgacgatctgcaagaggacttccatggccacagccacaggcactcacatgaagatttccaccatggccacagccatgcccatggccatggccacactcacgagagcatctggcatggacatacccacgatcacgaccatggacattcacatgaggatttacaccatggccatagccatggctactcccatgagagcctctaccacagaggacatggacatgaccatgagcatagccatggaggctatggggagtctggggctccaggcatcaagcaggacctggatgctgtcactctctgggcttatgcactgggggccacagtgctgatctcagcagctccattttttgtcctcttccttatccccgtggagtcgaactctccccggcatcgctctctacttcagatcttgctcagttttgcttccggtgggctcctgggagatgctttcctgcacctcattcctcatgctcttgaacctcattctcaccacactctggagcaacccggacatggacactcccacagtggccagggccccattctgtctgtgggactgtgggttctcagtggaattgttgcctttcttgtcgtggagaaatttgtgagacatgtgaaaggaggacatggtcacagtcatggacatggacacgctcacagtcatacacgtggaagtcatggacatggaagacaagagcgttctaccaaggagaagcagagctcagaggaagaagaaaaggaaacaagaggggttcagaagaggcgaggagggagcacagtacccaaagatgggccagtgagacctcagaacgctgaagaagaaaaaagaggcttagacctgcgtgtgtcggggtacctgaatctggctgctgacttggcacacaacttcactgatggtctggccattggggcttcctttcgagggggccggggactagggatcctgaccacaatgactgtcctgctacatgaagtgccccacgaggtcggagactttgccatcttggtccagtctggctgcagcaaaaagcaggcgatgcgtctgcaactactgacagcagtaggggcactggcaggcacagcctgtgcccttctcactgaaggaggagcagtgggcagtgaaattgcaggtggtgcaggtcctggctgggtcctgccatttactgcaggtggctttatctacgtagcaacagtgtctgtgttgcccgagctgctgagggaggcatcaccattgcaatcacttctggaggtgctggggctgctggggggagttatcatgatggtgctgattgcccaccttgagtgaggggtggataaactacccctgccccaaacctctacccctaactccaggtcaggggtgcgtagaggttgggggccctggccagggacatctgccaaaggaaggaactgtagcctgggagaatggttactttggcattagggccttcaagggctggcagtcttacagaggctggagcggtgagaatgagaggccagagggaccatagtgttgggcactgtctgaccatgttgcatttggaaggctaaatggggccatgaagaaggctggaagggacagggggtgatggcagcctacctggtgtcccctaccccacctgttctcggagaaccaagttgctacacaggaagttctccaaggtccagtttcctttctcccaccagttggtggaggcttcagggaagaccagagtcctggacagagagggtaacaggaggagtcggggataaacatcaaacatcaatcgtgtgtcctgatttgggagtgattggggggatggggtgggagagggttagttggtattctcatggcctgattttttttgtttctattccttttatatcactgtgtttgaatcgagggggaggggtggtaaccggaaataaagacctccgatcttccgccccac

SEQ ID NO: 6110 - protein, 469 aa, Homo sapiens; identical to SEQ ID NO: 744

SEQ ID NO: 6111 - DNA, 2408 bp, Homo sapiens
tcgcgggatctaaaggcgggactgccacgtccaagcaaaccgggaaaggagaggatcccggagccggtgagaattctctgttttttctctaccatcctttccaggccttttcctcacctaatgagtcgtagagacgagggcccagagagtctgtaaagtggctggtgaaagattagtgtcccagggccctacatccgggaggtggttcgggataaagagaactagtcttgggaacaatgtaggtgggaacttaagggaatgggagagcggcccatagaggtggacggagggcgcgattggagtaaagcggaccctgtgtaggtatagagttgagtcaagtggagtcactgcctctgtccctctggtcagcgtgatggccagaggcctgggggccccccactgggtggccgtgggactgctgacctgggcgaccttggggcttctggtggctggactcgggggtcatgacgacctgcacgacgatctgcaagaggacttccatggccacagccacaggcactcacatgaagatttccaccatggccacagccatgcccatggccatggccacactcacgagagcatctggcatggacatacccacgatcacgaccatggacattcacatgaggatttacaccatggccatagccatggctactcccatgagagcctctaccacagaggacatggacatgaccatgagcatagccatggaggctatggggagtctggggctccaggcatcaagcaggacctggatgctgtcactctctgggcttatgcactgggggccacagtgctgatctcagcagctccattttttgtcctcttccttatccccgtggagtcgaactctccccggcatcgctctctacttcagatcttgctcagttttgcttccggtgggctcctgggagatgctttcctgcacctcattcctcatgctcttgaacctcattctcaccacactctggagcaacccggacatggacactcccacagtggccagggccccattctgtctgtgggactgtgggttctcagtggaattgttgcctttcttgtcgtggagaaatttgtgagacatgtgaaaggaggacatggtcacagtcatggacatggacacgctcacagtcatacacgtggaagtcatggacatggaagacaagagcgttctaccaaggagaagcagagctcagaggaagaagaaaaggaaacaagaggggttcagaagaggcgaggagggagcacagtacccaaagatgggccagtgagacctcagaacgctgaagaagaaaaaagaggcttagacctgcgtgtgtcggggtacctgaatctggctgctgacttggcacacaacttcactgatggtctggccattggggcttcctttcgagggggccggggactagggatcctgaccacaatgactgtcctgctacatgaagtgccccacgaggtcggagactttgccatcttggtccagtctggctgcagcaaaaagcaggcgatgcgtctgcaactactgacagcagtaggggcactggcaggcacagcctgtgcccttctcactgaaggaggagcagtgggcagtgaaattgcaggtggtgcaggtcctggctgggtcctgccatttactgcaggtggctttatctacgtagcaacagtgtctgtgttgcccgagctgctgagggaggcatcaccattgcaatcacttctggaggtgctggggctgctggggggagttatcatgatggtgctgattgcccaccttgagtgaggggtggataaactacccctgccccaaacctctacccctaactccaggtcaggggtgcgtagaggttgggggccctggccagggacatctgccaaaggaaggaactgtagcctgggagaatggttactttggcattagggccttcaagggctggcagtcttacagaggctggagcggtgagaatgagaggccagagggaccatagtgttgggcactgtctgaccatgttgcatttggaaggctaaatggggccatgaagaaggctggaagggacagggggtgatggcagcctacctggtgtcccctaccccacctgttctcggagaaccaagttgctacacaggaagttctccaaggtccagtttcctttctcccaccagttggtggaggcttcagggaagaccagagtcctggacagagagggtaacaggaggagtcggggataaacatcaaacatcaatcgtgtgtcctgatttgggagtgattggggggatggggtgggagagggttagttggtattctcatggcctgattttttttgtttctattccttttatatcactgtgtttgaatcgagggggaggggtggtaaccggaaataaagacctccgatcttccgccccac

SEQ ID NO: 6112 - protein, 469 aa, Homo sapiens; identical to SEQ ID NO: 744

SEQ ID NO: 6113 - DNA, 2739 bp, Homo sapiens
tcgcgggatctaaaggcgggactgccacgtccaagcaaaccgggaaaggagaggatcccggagccggtgagaattctctgttttttctctaccatcctttccaggccttttcctcacctaatgagtcgtagagacgagggcccagagagtctgtaaagtggctggtgaaagattagtgtcccagggccctacatccgggaggtggttcgggataaagagaactagtcttgggaacaatgtaggtgggaacttaagggaatgggagagcggcccatagaggtggacggagggcgcgattggagtaaagcggaccctgtgtaggtatagagttgagtcaagtggagtcactgcctctgtccctctggtcagcgtgatggccagaggcctgggggccccccactgggtggccgtgggactgctgacctgggcgaccttggggcttctggtggctggactcgggggtcatgacgacctgcacgacgatctgcaagaggacttccatggccacagccacaggcactcacatgaagatttccaccatggccacagccatgcccatggccatggccacactcacgagagcatctggcatggacatacccacgatcacgaccatggacattcacatgaggatttacaccatggccatagccatggctactcccatgagagcctctaccacagaggacatggacatgaccatgagcatagccatggaggctatggggagtctggggctccaggcatcaagcaggacctggatgctgtcactctctgggcttatgcactgggggccacagtgctgatctcagcagctccattttttgtcctcttccttatccccgtggagtcgaactctccccggcatcgctctctacttcagatcttgctcagttttgcttccggtgggctcctgggagatgctttcctgcacctcattcctcatgctcttgaacctcattctcaccacactctggagcaacccggacatggacactcccacagtggccagggccccattctgtctgtgggactgtgggttctcagtggaattgttgcctttcttgtcgtggagaaatttgtgagacatgtgaaaggaggacatggtcacagtcatggacatggacacgctcacagtcatacacgtggaagtcatggacatggaagacaagagcgttctaccaaggagaagcagagctcagaggaagaagaaaaggaaacaagaggggttcagaagaggcgaggagggagcacagtacccaaagatgggccagtgagacctcagaacgctgaagaagaaaaaagaggcttagacctgcgtgtgtcggggtacctgaatctggctgctgacttggcacacaacttcactgatggtctggccattggggcttcctttcgagggggccggggactagggatcctgaccacaatgactgtcctgctacatgaagtgccccacgaggtcggagactttgccatcttggtccagtctggctgcagcaaaaagcaggcgatgcgtctgcaactactgacagcagtaggggcactggcaggcacagcctgtgcccttctcactgaaggaggagcagtgggcagtgaaattgcaggtggtgcaggtcctggctgggtcctgccatttactgcaggtggctttatctacgtagcaacagtgtctgtgttgcccgagctgctgagggaggcatcaccattgcaatcacttctggaggtgctggggctgctggggggagttatcatgatggtgctgattgcccaccttgagtgaggggtggataaactacccctgccccaaacctctacccctaactccaggtcaggggtgcgtagaggttgggggccctggccagggacatctgccaaaggaaggaactgtagcctgggagaatggttactttggcattagggccttcaagggctggcagtcttacagaggctggagcggtgagaatgagaggccagagggaccatagtgttgggcactgtctgaccatgttgcatttggaaggctaaatggggccatgaagaaggctggaagggacagggggtgatggcagcctacctggtgtcccctaccccacctgttctcggagaaccaagttgctacacaggaagttctccaaggtccagtttcctttctcccaccagttggtggaggcttcagggaagaccagagtcctggacagagagggtaacaggaggagtcggggataaacatcaaacatcaatcgtgtgtcctgatttgggagtgattggggggatggggtgggagagggttagttggtattctcatggcctgattttttttgtttctattccttttatatcactgtgtttgaatcgagggggaggggtggtaaccggaaataaagacctccgatcttccgccccacatgcagtctttgtctttttggggggaatggggccccttgtcttctccacacccggggcccctaagcagcagtgtcgggccacgccccctcggtgggaggtcggcctgcgctggtggccgcagatggcctaaggctggcgggcctttgattggccccggctttgcccttgccacgcccctctgcgctgggattggcttagtgctgggattcccacccacccacagcccgccatggcgtctcagctccagaaccgactccgctccgcactggccttggtcacaggttgagggggttctttccccgggcggtttggggtattggagtgaggtca

SEQ ID NO: 6114 - protein, 469 aa, Homo sapiens; identical to SEQ ID NO: 744

SEQ ID NO: 6115 - DNA, 760 bp, Homo sapiens
cgggatctaaaggcgggactgccacgtccaagcaaaccgggaaaggagaggatcccggagccggtgagaattctctgttttttctctaccatcctttccaggccttttcctcacctaatgagtcgtagagacgagggcccagagagtctgtaaagtggctggtgaaagattagtgtcccagggccctacatccgggaggtggttcgggataaagagaactagtcttgggaacaatgtaggtgggaacttaagggaatgggagagcggcccatagaggtggacggagggcgcgattggagtaaagcggaccctgtgtaggtatagagttgagtcaagtggagtcactgcctctgtccctctggtcagcgtgatggccagaggcctgggggccccccactgggtggccgtgggactgctgacctgggcgaccttggggcttctggtggctggactcgggggtcatgacgacctgcacgacgatctgcaagaggacttccatggccacagccacaggcactcacatgaagatttccaccatggccacagccatgcccatggccatggccacactcacgagagcatctggcatggacatacccacgatcacgaccatggacattcacatgaggatttacaccatggccatagccatggctactcccatgagagcctctaccacagatgctgatctcagcagctccattttttgtcctcttccttatccccgtggagtcgaactctccccggcatcgctctctac

SEQ ID NO: 6116 - protein, 105 aa, Homo sapiens
MARGLGAPHWVAVGLLTWATLGLLVAGLGGHDDLHDDLQEDFHGHSHRHSHEDFHHGHSHAHGHGHTHESIWHGHTHDHDHGHSHEDLHHGHSHGYSHESLYHRC

SEQ ID NO: 6117 - DNA, 997 bp, Homo sapiens
cgggatctaaaggcgggactgccacgtccaagcaaaccgggaaaggagaggatcccggagccggtgagaattctctgttttttctctaccatcctttccaggccttttcctcacctaatgagtcgtagagacgagggcccagagagtctgtaaagtggctggtgaaagattagtgtcccagggccctacatccgggaggtggttcgggataaagagaactagtcttgggaacaatgtaggtgggaacttaagggaatgggagagcggcccatagaggtggacggagggcgcgattggagtaaagcggaccctgtgtaggtatagagttgagtcaagtggagtcactgcctctgtccctctggtcagcgtgatggccagaggcctgggggccccccactgggtggccgtgggactgctgacctgggcgaccttggggcttctggtggctggactcgggggtcatgacgacctgcacgacgatctgcaagaggacttccatggccacagccacaggcactcacatgaagatttccaccatggccacagccatgcccatggccatggccacactcacgagagcatctggcatggacatacccacgatcacgaccatggacattcacatgaggatttacaccatggccatagccatggctactcccatgagagcctctaccacagaggacatggacatgaccatgagcatagccatggaggctatggggagtctggggctccaggcatcaagcaggacctggatgctgtcactctctgggcttatgcactgggggccacagtgctgatctcagcagctccattttttgtcctcttccttatccccgtggagtcgaactctccccggcatcgctctctacttcagatcttgctcagttttgcttccggtgggctcctgggagatgctttcctgcacctcattcctcatgctcttgaacctcattctcaccacactctggagcaacccggacatggacactcc

SEQ ID NO: 6118 - protein, 208 aa, Homo sapiens
MARGLGAPHWVAVGLLTWATLGLLVAGLGGHDDLHDDLQEDFHGHSHRHSHEDFHHGHSHAHGHGHTHESIWHGHTHDHDHGHSHEDLHHGHSHGYSHESLYHRGHGHDHEHSHGGYGESGAPGIKQDLDAVTLWAYALGATVLISAAPFFVLFLIPVESNSPRHRSLLQILLSFASGGLLGDAFLHLIPHALEPHSHHTLEQPGHGH

SEQ ID NO: 6119 - DNA, 989 bp, Homo sapiens; identical to SEQ ID NO: 745

SEQ ID NO: 6120 - protein, 261 aa, Homo sapiens; identical to SEQ ID NO: 746

SEQ ID NO: 6121 - DNA, 1016 bp, Homo sapiens
gggattcccacccacccacagcccgccatggcgtctcagctccagaaccgactccgctccgcactggccttggtcacaggtgcggggagcggcatcggccgagcggtcagtgtacgcctggccggagagggggccaccgtagctgcctgcgacctggaccgggcagcggcacaggagacggtgcggctgctgggcgggccagggagcaaggaggggccgccccgagggaaccatgctgccttccaggctgacgtgtctgaggccagggccgccaggtgcctgctggaacaagtgcaggcctgcttttctcgcccaccatctgtcgttgtgtcctgtgcgggcatcacccaggatgagtttctgctgcacatgtctgaggatgactgggacaaagtcatagctgtcaacctcaagggcaccttcctagtcactcaggctgcagcacaagccctggtgtccaatggttgtcgtggttccatcatcaacatcagtagcatcgtaggaaaggtggggaacgtggggcagacaaactatgcagcatccaaggctggagtgattgggctgacccagaccgcagcccgggagcttggacgacatgggatccgctgtaactctgtcctcccagggttcattgcaacacccatgacacagaaagtgccacagaaagtggtggacaagattactgaaatgatcccgatgggacacttgggggaccctgaggatgtggcagatgtggtcgcattcttggcatctgaagatagtggatacatcacagggacctcagtggaagtcactggaggtcttttcatgtaactgcctcaaggaccctggactctgctcacccccccaccactctgcctggcctcctgctgatgaggactctaagttcccaggatacaaaaggggtggcagtgtatggttcaggaatgctgaatatgggaagcaggggtgcttgtgaccctaataaattccaagtcctcttccctgccacctccggctcttcttgtgtccaagcc

SEQ ID NO: 6122 - protein, 261 aa, Homo sapiens; identical to SEQ ID NO: 746

SEQ ID NO: 6123 - DNA, 195 bp, Homo sapiens
acaaagtcatagctgtcaacctcaagggcaccttcctagtcactcaggctgcagcacaagccctggtgtccaatggttgtcgtggttccatcatcaacatcagtagcatcgtaggaaaggtcaggttgagttggacgaggtcagccagccaagtggtatagagaggagaacccctccttgagactcctgactcat

SEQ ID NO: 6124 - protein, 52 aa, Homo sapiens
KVIAVNLKGTFLVTQAAAQALVSNGCRGSIINISSIVGKVRLSWTRSASQVV

SEQ ID NO: 6125 - DNA, 623 bp, Homo sapiens
ccacagacatgggatccgctgtaactctgtcctcccagggttcattgcaacacccatgacacagaaagtgccacagaaagtggtggacaaggtaggaggctgtgggtggagggcagaatcattcagagactcaatctctctgggcttcacagagagagagagagagagagagagagaatactgggcacagttcctggcaaacattaaatattcaatgaatgtatgagaaatgaagacaaaaaagggtcacagactcagtcttcaaaaaaatccataaaagaagctttcacccacatgagtatttccttacagattactgaaatgatcccgatgggacacttgggggaccctgaggatgtggcagatgtggtcgcattcttggcatctgaagatagtggatacatcacagggacctcagtggaagtcactggaggtcttttcatgtaactgcctcaaggaccctggactctgctcacccccccaccactctgcctggcctcctgctgatgaggactctaagttcccaggatacaaaaggggtggcagtgtatggttcaggaatgctgaatatgggaagcaggggtgcttgtgaccctaataaattccaagtcctcttccctgcc

SEQ ID NO: 6126 - protein, 78 aa, Homo sapiens
MWQMWSHSWHLKIVDTSQGPQWKSLEVFSCNCLKDPGLCSPPHHSAWPPADEDSKFPGYKRGGSVWFRNAEYGKQGCL

SEQ ID NO: 6127 - DNA, 650 bp, Homo sapiens
ccacagacatgggatccgctgtaactctgtcctcccagggttcattgcaacacccatgacacagaaagtgccacagaaagtggtggacaaggtaggaggctgtgggtggagggcagaatcattcagagactcaatctctctgggcttcacagagagagagagagagagagagagagaatactgggcacagttcctggcaaacattaaatattcaatgaatgtatgagaaatgaagacaaaaaagggtcacagactcagtcttcaaaaaaatccataaaagaagctttcacccacatgagtatttccttacagattactgaaatgatcccgatgggacacttgggggaccctgaggatgtggcagatgtggtcgcattcttggcatctgaagatagtggatacatcacagggacctcagtggaagtcactggaggtcttttcatgtaactgcctcaaggaccctggactctgctcacccccccaccactctgcctggcctcctgctgatgaggactctaagttcccaggatacaaaaggggtggcagtgtatggttcaggaatgctgaatatgggaagcaggggtgcttgtgaccctaataaattccaagtcctcttccctgccacctccggctcttcttgtgtccaagcc

SEQ ID NO: 6128 - protein, 78 aa, Homo sapiens; identical to SEQ ID NO: 6126

SEQ ID NO: 6129 - DNA, 1750 bp, Homo sapiens
gacgtagggccccagcgcccgggccatggcggcggcggtggcgggagctgctgtctgagcagcggttgcggaccgagcgaacttggcccaggagcccgggcctagggagaggcgcggcggcggcgggagcgcgaacggctggagctggccttcttcgccttctcctcggctgtggagccctggtggggggtctgcgcccggtcaccatgacgacgccggcgaatgcccagaatgccagcaaaacgtgggaactgagtctgtatgagctgcaccggaccccgcaggaagccataatggatggcacagagattgctgtttcccctcggtcactgcattcagaactcatgtgccctatctgcctggacatgctgaagaatacgatgaccaccaaggagtgcctccacagattctgctctgactgcattgtcacagccctacggagcgggaacaaggagtgtcctacctgccgaaagaagctggtgtccaagcgatccctacggccagaccccaactttgatgccctgatctctaagatctatcctagccgggaggaatacgaggcccatcaagaccgagtgcttatccgcctgagccgcctgcacaaccagcaggcattgagctccagcattgaggaggggctacgcatgcaggccatgcacagggcccagcgtgtgaggcggccgataccagggtcagatcagaccacaacgatgagtgggggggaaggagagcccggggagggagaaggggatggagaagatgtgagctcagactccgcccctgactctgccccaggccctgctcccaagcgaccccgtggagggggcgcaggggggagcagtgtagggacagggggaggcggcactggtggggtgggtgggggtgccggttcggaagactctggtgaccggggagggactctgggagggggaacgctgggccccccaagccctcctggggcccccagccccccagagccaggtggagaaattgagctcgtgttccggccccaccccctgctcgtggagaagggagaatactgccagacgaggtatgtgaagacaactgggaatgccacagtggaccacctctccaagtacttggccctgcgcattgccctcgagcggaggcaacagcaggaagcaggggagccaggagggcctggagggggcgcctctgacaccggaggacctgatgggtgtggcggggagggtgggggtgccggaggaggtgacggtcctgaggagcctgctttgcccagcctggagggcgtcagtgaaaagcagtacaccatctacatcgcacctggaggcggggcgttcacgacgttgaatggctcgctgaccctggagctggtgaatgagaaattctggaaggtgtcccggccactggagctgtgctatgctcccaccaaggatccaaagtgaccccaccaggggacagccagaggaaggggaccatggggtatccctgtgtcctggtctatcaccccagcttctttgtcccccagtacccccagcccagccagccaataagaggacacaaatgaggacacgtggcttttatacaaagtatctatatgagattcttctatattgtacagagtggggcaaaacacgcccccatctgctgccttttctattgccctgcaacgtcccatctatacgaggtgttggagaaggtgaagaaccctcccattcacgcccgcctaccaacaacaaacgtgcttttttcctctttgaaacctgca

SEQ ID NO: 6130 - protein, 406 aa, Homo sapiens; identical to SEQ ID NO: 748

SEQ ID NO: 6131 - DNA, 1983 bp, Homo sapiens
gccatggcggcggcggtggcgggagctgctgtctgagcagcggttgcggaccgagcgaacttggcccaggagcccgggcctagggagaggcgcggcggcggcgggagcgcgaacggctggagctggccttcttcgccttctcctcggctgtggagccctggtggggggtctgcgcccggtcaccatgacgacgccggcgaatgcccagaatgccagcaaaacgtgggaactgagtctgtatgagctgcaccggaccccgcaggaagccataatggatggcacagagattgctgtttcccctcggtcactgcattcagaactcatgtgccctatctgcctggacatgctgaagaatacgatgaccaccaaggagtgcctccacagattctgctctgactgcattgtcacagccctacggagcgggtaataggagagacatgtttgagatgagatgaaggggtacaaagttagggccctctcactggtcttggttcagcctaggcttcagttcccttgactgaccactcagggcttcccttctcctaccccaggaacaaggagtgtcctacctgccgaaagaagctggtgtccaagcgatccctacggccagaccccaactttgatgccctgatctctaagatctatcctagccgggaggaatacgaggcccatcaagaccgagtgcttatccgcctgagccgcctgcacaaccagcaggcattgagctccagcattgaggaggggctacgcatgcaggccatgcacaggtgtgagggtcaggagagaagcagaactgatgggatgggtccgtgggtcagtccttgttgcctgctagcttctaagcctcagcatcctaggagctgaccacagactgatcattagggctggaaatcatgggtgtaaattgcagtttcttagtaaacaactggccctgctcttcttaagaaaaatatagggctgggcacagtgactcacatctgtaatcccagcactttgggaggtgaggatgggaggatcacttgagcccaggagtttgagaccaccttgaataacatagggaaatctcatctctacaacaaattaaacatttagctgggcatggtggcacatgcctgtagtcctaccttcttgggaggctgaggtaataggatcacttgagcctgggaagaaagtggatgttgcagtgaaccatgatcacaccactgcacactgcactccagcctgctgggcgacagaacaaggccctgtcacaaaaaaaaaaaaaggaaaaatgtagtttaccccatgactttctagaagttagaacagtagagcgattttgagaataagccccggattcatactgctggaagttaaatcacctcctaggccagcatctctcagtctttcatgtgtatccagattacctgtagatcttcagatgcaaactgtgattcagtaggtctagagttgggcccgagagtctgcatttcacaagctcacaggggatgtgtatgctgctaccgcactttgagaggtgacagcctatgatcactaacaagttacttaacctctctaagcctcagtttcctcagccataaaatagaggtaatataattacctgtgtcataggattcattgtattaggtaaggggattggtgcaaaacacttagtatactgagtgcttagcacattgtgtttaataaatattaggtatcgtcattaggatttttcttatctcttaattctctgaagtttaaagtctaagccctttatcctggatgccttctaaccttaaccacttgcttctacagggcccagcgtgtgaggcggccgataccagggtcagatcagaccacaacgatgagtgggggggaaggagagcccggggagggagaaggggatggagaagatgtgagctcagactccgcccctgactctgccccaggccctgctcccaagcgaccccgtggagggggcgcaggggggagcagtgtagggac

SEQ ID NO: 6132 - protein, 80 aa, Homo sapiens
MTTPANAQNASKTWELSLYELHRTPQEAIMDGTEIAVSPRSLHSELMCPICLDMLKNTMTTKECLHRFCSDCIVTALRSG

SEQ ID NO: 6133 - DNA, 1532 bp, Homo sapiens
ggctgctgtttctaaaacccctttccctctaacccacaccacctttctactcactgatgccttcaggaagccataatggatggcacagagattgctgtttcccctcggtcactgcattcagaactcatgtgccctatctgcctggacatgctgaagaatacgatgaccaccaaggagtgcctccacagattctgctctgactgcattgtcacagccctacggagcgggaacaaggagtgtcctacctgccgaaagaagctggtgtccaagcgatccctacggccagaccccaactttgatgccctgatctctaagatctatcctagccgggaggaatacgaggcccatcaagaccgagtgcttatccgcctgagccgcctgcacaaccagcaggcattgagctccagcattgaggaggggctacgcatgcaggccatgcacagggcccagcgtgtgaggcggccgataccagggtcagatcagaccacaacgatgagtgggggggaaggagagcccggggagggagaaggggatggagaagatgtgagctcagactccgcccctgactctgccccaggccctgctcccaagcgaccccgtggagggggcgcaggggggagcagtgtagggacagggggaggcggcactggtggggtgggtgggggtgccggttcggaagactctggtgaccggggagggactctgggagggggaacgctgggccccccaagccctcctggggcccccagccccccagagccaggtggagaaattgagctcgtgttccggccccaccccctgctcgtggagaagggagaatactgccagacgaggtatgtgaagacaactgggaatgccacagtggaccacctctccaagtacttggccctgcgcattgccctcgagcggaggcaacagcaggaagcaggggagccaggagggcctggagggggcgcctctgacaccggaggacctgatgggtgtggcggggagggtgggggtgccggaggaggtgacggtcctgaggagcctgctttgcccagcctggagggcgtcagtgaaaagcagtacaccatctacatcgcacctggaggcggggcgttcacgacgttgaatggctcgctgaccctggagctggtgaatgagaaattctggaaggtgtcccggccactggagctgtgctatgctcccaccaaggatccaaagtgaccccaccaggggacagccagaggaaggggaccatggggtatccctgtgtcctggtctatcaccccagcttctttgtcccccagtacccccagcccagccagccaataagaggacacaaatgaggacacgtggcttttatacaaagtatctatatgagattcttctatattgtacagagtggggcaaaacacgcccccatctgctgccttttctattgccctgcaacgtcccatctatacgaggtgttggagaaggtgaagaaccctcccattcacgcccgcctaccaacaacaaacgtgcttttttcctctttgaaacctgca

SEQ ID NO: 6134 - protein, 377 aa, Homo sapiens
MDGTEIAVSPRSLHSELMCPICLDMLKNTMTTKECLHRFCSDCIVTALRSGNKECPTCRKKLVSKRSLRPDPNFDALISKIYPSREEYEAHQDRVLIRLSRLHNQQALSSSIEEGLRMQAMHRAQRVRRPIPGSDQTTTMSGGEGEPGEGEGDGEDVSSDSAPDSAPGPAPKRPRGGGAGGSSVGTGGGGTGGVGGGAGSEDSGDRGGTLGGGTLGPPSPPGAPSPPEPGGEIELVFRPHPLLVEKGEYCQTRYVKTTGNATVDHLSKYLALRIALERRQQQEAGEPGGPGGGASDTGGPDGCGGEGGGAGGGDGPEEPALPSLEGVSEKQYTIYIAPGGGAFTTLNGSLTLELVNEKFWKVSRPLELCYAPTKDPK

SEQ ID NO: 6135 - DNA, 1045 bp, Homo sapiens
gggtgccggttcggaagactctggtgaccggggagggactctgggagggggaacgctgggccccccaagccctcctggggcccccagccccccagagccaggtggagaaattgagctcgtgttccggccccaccccctgctcgtggagaagggagaatactgccagacgaggtgaggagccctgtctttccccagccactgagaaaccaaagatcacctagatttccatcagaagtgggctttgcccaaacccaaaataccaccccaacccagaatccattttggaaagcccctacctccagtcctcatctgaggcgctctggctctaagcctgtcctccctcccattccaggtatgtgaagacaactgggaatgccacagtggaccacctctccaagtacttggccctgcgcattgccctcgagcggaggcaacagcaggaagcaggggagccaggagggcctggagggggcgcctctgacaccggaggacctgatgggtgtggcggggagggtgggggtgccggaggaggtgacggtcctgaggagcctgctttgcccagcctggagggcgtcagtgaaaagcagtacaccatctacatcgcacctggaggcggggcgttcacgacgttgaatggctcgctgaccctggagctggtgaatgagaaattctggaaggtgtcccggccactggagctgtgctatgctcccaccaaggatccaaagtgaccccaccaggggacagccagaggaaggggaccatggggtatccctgtgtcctggtctatcaccccagcttctttgtcccccagtacccccagcccagccagccaataagaggacacaaatgaggacacgtggcttttatacaaagtatctatatgagattcttctatattgtacagagtggggcaaaacacgcccccatctgctgccttttctattgccctgcaacgtcccatctatacgaggtgttggagaaggtgaagaaccctcccattcacgcccgcctaccaacaacaaacgtgcttttttcctctttgaaa

SEQ ID NO: 6136 - protein, 86 aa, Homo sapiens
MPQWTTSPSTWPCALPSSGGNSRKQGSQEGLEGAPLTPEDLMGVAGRVGVPEEVTVLRSLLCPAWRASVKSSTPSTSHLEAGRSRR

SEQ ID NO: 6137 - DNA, 594 bp, Homo sapiens
gtgataggcactgcggattcagcagagactaaatcaaagtccttgatctcggagagcacatatttcatctaattgaattcacataccagccttatgaggaggtgttcttcctgtttcagaactgaaggaaaagctgaacaggcggtctttggaaaggacagaagccaggatagttccagcatccaggcagcagacaccaatggtcagtgcttctactttggatcaaaaagagagaactccaataggcttagggtgggtcaggtgctcacactcatctgaggaaggggagggtcccttgaggaatagtaccatagactacccaatgttggaggataatggccccaacgcaaaaatgggatcttgccaccagacaaatgggatatagatgccaggctgcaaaatccaacaaatgtacacgtgcccaaatcccgactccatcactaatagccatgcaatcctctgactatcaattagattaattgacactcttttttctctcgctactgtggtacatgcagtagttacctttattcttcactttgttttctcataagactaacaagcagttttttaaaataaagaaataaaagcaaa

SEQ ID NO: 6138 - protein, 61 aa, Homo sapiens
MRRCSSCFRTEGKAEQAVFGKDRSQDSSSIQAADTNGQCFYFGSKRENSNRLRVGQVLTLI

SEQ ID NO: 6139 - DNA, 659 bp, Homo sapiens
aggagagcccggagccggatccactctcagcctcaggaagcagcagcctccgctccgcggcgggtgtgctcggcagtcacagacccactcaggacacctcccgttgccgacgggctagacctgccttaaaggggtccccgtgtctctccagtctagagcctaagttcaaacgaggcgtataggcgaggacagcaggaaggctccaagtcaaacaaacggatgggaagtggtcttgggaaacctgaagacactgggatattcagaaggccaaggggatccagcttatcctgttgggcaaggtgctgggagtgaaggcaggtcacctgaatgatactggtgccatttctgaagttggtgaaactccgcattacatcctgactcagagattccactgatgatttccaggaactaccaaagccacggatcagctgagttacccgggctaatagcaggaggaaacagtgtcagagagggatctggctgatcttcaactccactaagttctccccaagggtcttgctccatcacccacgctggagtgcagtggcacaatcacagctcactacaacctcaactttcctggctcagtgattatcccacctcagcctcctgagtagctgggactaacaggcatgtgccaacatgtcccactcattttt

SEQ ID NO: 6140 - protein, 30 aa, Homo sapiens
MGSGLGKPEDTGIFRRPRGSSLSCWARCWE

SEQ ID NO: 6141 - DNA, 863 bp, Homo sapiens
cgctccgcggcgggtgtgctcggcagtcacagacccactcaggacacctcccgttgccgacgggctagacctgccttaaaggggtccccgtgtctctccagtctagagcctaagttcaaacgaggcgtataggcgaggacagcaggaaggctccaagtcaaacaaacggatgggaagtggtcttgggaaacctgaagacactgggatattcagaaggccaaggggatccagcttatcctgttgggcaaggtgctgggagtgaaggcaggtcacctgaatgatactggtgccatttctgaagttggtgaaactccgcattacatcctgactcagagattccactgatgatttccaggaactaccaaagccacggatcagctgagttacccgggctaatagcaggaggaaacagtgtcagagagggatctggctgatcttcaactccactaagttctccccaaggtatagccatccttatcatcaaaccctcttttctggtattctctcaatccagtctttcatactctattcccccaccatgtaatctgcatcctttcatttttcttttccacttcccttaccactgatcccatcattaccatattttcctcataccttcttcccctcgaagtcgctcagcctgtccacgctcaatcaaagcctcagcctccttcacaaatgccactaaacccccaaaagggggagacagcaactcttcaatgaattcctggaaagacacaaacacatatacacaggtgtcctggtgtcagcagatttgcccaattctggcatcatgactaatgtagatccatctgaatggcatctttcagctgctgcaaaagttaaggaaaatcctctatgga

SEQ ID NO: 6142 - protein, 30 aa, Homo sapiens; identical to SEQ ID NO: 6140

SEQ ID NO: 6143 - DNA, 608 bp, Homo sapiens
ggtgtgctcggcagtcacagacccactcaggacacctcccgttgccgacgggctagacctgccttaaaggggtccccgtgtctctccagtctagagcctaagttcaaacgaggcgtataggcgaggacagcaggaaggctccaagtcaaacaaacggatgggaagtggtcttgggaaacctgaagacactgggatattcagaaggccaaggggatccagcttatcctgttgggcaaggtgctgggagtgaaggcaggaactaccaaagccacggatcagctgagttacccgggctaatagcaggaggaaacagtgtcagagagggatctggctgatcttcaactccactaagttctccccaagggtcttgctccatcacccacgctggagtgcagtggcacaatcacagctcactacaacctcaactttcctggctcagtgattatcccacctcagcctcctgagtagctgggactaacaggcatgtgccaacatgtcccactcattttttttttattttttgtagagatggggtttcaccatgttgtccaggctggtctcaaactcctgggctcaagcgatcctccctgccttggcctgtgctggga

SEQ ID NO: 6144 - protein, 30 aa, Homo sapiens; identical to SEQ ID NO: 6140

SEQ ID NO: 6145 - DNA, 1077 bp, Homo sapiens
ggggacatcctgaagtgaaggactgctttccccaaactagacatttccctttgtcttcccttaggagcgggctgcagatgacagcaaagaggttgagagcttccagcagctgctcaatgctcggacacaggaattcattgaagagttgctgtctcccccttttgggggtttagtggcatttgtgaaggaggctgaggctttgattgagcgtggacaggctgagcgacttcgaggggaagaagcccgggtaactcagctgatccgtggctttggtagttcctggaaatcatcagtggaatctctgagtcaggatgtaatgcggagtttcaccaacttcagaaatggcaccagtatcattcagggagcgctgacccagctgatccagctctatcatcgcttccaccgggtgctgtcccagccgcagctccgagccctccctgcccgggctgagctcatcaacattcaccaccttatggtggagctcaagaagcataagcccaacttctgatgtgccagaaaccgccctgagatctgccggtcatctccatggacttctgcaccccattccatacccttcttcacctggggtaccccttccagttttccccttgcttcccaggcccttgacatggcttacctgccttcactcccagcaccttgcccaacaggataagctggatccccttggccttctgaatatcccagtgtcttcaggtttcccaagaccacttccctgtgggcttccaaaatggcctttatcatttctccagtctgtcaccctcctttcctgctcccatacacccaaggcttgtttcttcccctgtaaaaaccactgcctcaatctctggttcactcaactagtcaccatgtcctgaggcatgaagcctcctcagctcttggaattgctggcaaggggtgactgcctctgagtcattgtgtttttcaaagtgatttcttttctgtagctttttgacctaagatctcagcaatttgaacactaacctctcccctcctggctcaagaattactccgaagtcagtctgcagaaaataaatatttagtatgacatgacactta

SEQ ID NO: 6146 - protein, 63 aa, Homo sapiens
MRSFTNFRNGTSIIQGALTQLIQLYHRFHRVLSQPQLRALPARAELINIHHLMVELKKHKPNF

SEQ ID NO: 6147 - DNA, 3338 bp, Homo sapiens
agtttgtgtttcagacttccatatttccatttgcagttgggtgaagtggttagagctgaaaggggacagctggagtcaaacaacttaactcaaatatctgggaacgatttcgcgctgaggaagaccctttgggacttgtagctccactccggggaacggactcgccgggactgacagttgccggaagtgaggctgcggggaatggccgccgctgcgaccatggcggctgcggcccgggaactggtgttgcgggctgggacctcagatatggaggaggaagagggcccgctggtgagagcgcggagctgtttctcctccgtagttccggtgctcctagcttcagaaagacctgagctgggtttaggcacaagggtgggaacttggctgctacccgtgatattacctgtttggctccccgtacccttccctgtgatcagacccgaccctgagcgggaccctagtggctgaaactcatgttctggggcacaaaatttcaacttcactccacattttggggtagagtcacgaagtagtatagtgtaaaggttaagaacatggcctctgaagccagactgcctgagttctatctctgccacttacacgctgtgtgcccttgggcaagttaaccagcttctctgtgccatcatttctcacacctttaaggtgaggaagatagaacctattgtatacatcgtcgttaggattagatgaatatgtgtaagattgcacctggcatgcaggcgggtggtcctgggctccaggaaccactgcaacttggggagttggatatcacttctgatgaattcatcctggatgaagtggatgggtgtagatctccgtcactattcaaagcaagttgagctggagctacagcagattgaacagaaatccattcgggattatattcaagagagtgagaatatagcatctctacacaaccagatcacagcctgtgatgctgtcctggagcgaatggagcagatgttgggagcttttcagagtgacctcagctccatcagctctgagatccggacactgcaggaacagtcaggagccatgaacattcgacttcgaaatcgccaggcagttcgggggaaacttggggagcttgttgatggtctggtggtgccttctgctctggtcacggcaattctggaggctccagtgacagagcccaggttcttggagcagctacaggagctggatgccaaggcagccgcagtcagagagcaggaagctagaggcacagcagcctgcgcagatgtcagaggcgtgctcgatcggctccgggtcaaggcagtgacgaagatccgagagtttatcctccagaagatttattccttcaggaaacccatgaccaactatcagatcccccagacggccctgctgaagtacaggttcttctatcagtttctgctgggcaatgaacgagcaacagcaaaggagatcagggatgaatatgtggagacgctgagcaagatttacctgtcttactaccgctcttacctggggcggctcatgaaggtgcagtatgaggaagtcgctgagaaagatgatctaatgggtgtggaagatacagcaaagaaaggattcttctcaaagccatcgctccgcagcaggaacaccattttcaccctaggaacccgcggctctgtcatctcccccactgaacttgaggcccccatcctggtgcctcacacagcgcagcgcggagagcagaggtatccatttgaggccctcttccgcagccagcactacgccctcctagacaattcctgccgcgaataccttttcatctgtgaattttttgttgtgtctggcccagctgcacacgacctgttccatgctgtcatgggccgtacactcagcatgaccctgaaacacctggattcttatctagctgactgctacgatgccattgctgtttttctctgtatccacattgttctccggttccgtaacattgcagcaaagagggatgttcctgccctggacaggtactgggaacaggtgcttgccttgctatggccacggtttgaactgatcctggagatgaatgttcagagcgtccgaagcactgacccccagcgcctaggggggttggatactcggccccactatatcacacgccgctatgcagagttctcctccgctcttgtcagtatcaaccagacaattcctaatgaacggaccatgcaattgctgggacagctgcaggtggaggtggagaattttgtcctccgagtggcagctgagttctcctcaaggaaggagcagcttgtgtttctgatcaacaactatgacatgatgctgggtgtgctgatggagcgggctgcagatgacagcaaagaggttgagagcttccagcagctgctcaatgctcggacacaggaattcattgaagagttgctgtctcccccttttgggggtttagtggcatttgtgaaggaggctgaggctttgattgagcgtggacaggctgagcgacttcgaggggaagaagcccgggtaactcagctgatccgtggctttggtagttcctggaaatcatcagtggaatctctgagtcaggatgtaatgcggagtttcaccaacttcagaaatggcaccagtatcattcagggagcgctgacccagctgatccagctctatcatcgcttccaccgggtgctgtcccagccgcagctccgagccctccctgcccgggctgagctcatcaacattcaccaccttatggtggagctcaagaagcataagcccaacttctgatgtgccagaaaccgccctgagatctgccggtcatctccatggacttctgcaccccattccatacccttcttcacctggggtaccccttccagttttccccttgcttcccaggcccttgacatggcttacctgccttcactcccagcaccttgcccaacaggataagctggatccccttggccttctgaatatcccagtgtcttcaggtttcccaagaccacttccctgtgggcttccaaaatggcctttatcatttctccagtctgtcaccctcctttcctgctcccatacacccaaggcttgtttcttcccctgtaaaaaccactgcctcaatctctggttcactcaactagtcaccatgtcctgaggcatgaagcctcctcagctcttggaattgctggcaaggggtgactgcctctgagtcattgtgtttttcaaagtgatttcttttctgtagctttttgacctaagatctcagcaatttgaacactaacctctcccctcctggctcaagaattactccgaagtcagtctgcagaaaataaatatttagtatgacatgacactta

SEQ ID NO: 6148 - protein, 656 aa, Homo sapiens
MNSSWMKWMGVDLRHYSKQVELELQQIEQKSIRDYIQESENIASLHNQITACDAVLERMEQMLGAFQSDLSSISSEIRTLQEQSGAMNIRLRNRQAVRGKLGELVDGLVVPSALVTAILEAPVTEPRFLEQLQELDAKAAAVREQEARGTAACADVRGVLDRLRVKAVTKIREFILQKIYSFRKPMTNYQIPQTALLKYRFFYQFLLGNERATAKEIRDEYVETLSKIYLSYYRSYLGRLMKVQYEEVAEKDDLMGVEDTAKKGFFSKPSLRSRNTIFTLGTRGSVISPTELEAPILVPHTAQRGEQRYPFEALFRSQHYALLDNSCREYLFICEFFVVSGPAAHDLFHAVMGRTLSMTLKHLDSYLADCYDAIAVFLCIHIVLRFRNIAAKRDVPALDRYWEQVLALLWPRFELILEMNVQSVRSTDPQRLGGLDTRPHYITRRYAEFSSALVSINQTIPNERTMQLLGQLQVEVENFVLRVAAEFSSRKEQLVFLINNYDMMLGVLMERAADDSKEVESFQQLLNARTQEFIEELLSPPFGGLVAFVKEAEALIERGQAERLRGEEARVTQLIRGFGSSWKSSVESLSQDVMRSFTNFRNGTSIIQGALTQLIQLYHRFHRVLSQPQLRALPARAELINIHHLMVELKKHKPNF

SEQ ID NO: 6149 - DNA, 2985 bp, Homo sapiens
tcgtaaggttcataggtaagagaacagcgaaggttccggggctagtttgtgtttcagacttccatatttccatttgcagttgggtgaagtggttagagctgaaaggggacagctggagtcaaacaacttaactcaaatatctgggaacgatttcgcgctgaggaagaccctttgggacttgtagctccactccggggaacggactcgccgggactgacagttgccggaagtgaggctgcggggaatggccgccgctgcgaccatggcggctgcggcccgggaactggtgttgcgggctgggacctcagatatggaggaggaagagggcccgctggcgggtggtcctgggctccaggaaccactgcaacttggggagttggatatcacttctgatgaattcatcctggatgaagtggatgttcacattcaggcaaatctggaggatgagttagtaaaggaagctcttaaaacgggtgtagatctccgtcactattcaaagcaagttgagctggagctacagcagattgaacagaaatccattcgggattatattcaagagagtgagaatatagcatctctacacaaccagatcacagcctgtgatgctgtcctggagcgaatggagcagatgttgggagcttttcagagtgacctcagctccatcagctctgagatccggacactgcaggaacagtcaggagccatgaacattcgacttcgaaatcgccaggcagttcgggggaaacttggggagcttgttgatggtctggtggtgccttctgctctggtcacggcaattctggaggctccagtgacagagcccaggttcttggagcagctacaggagctggatgccaaggcagccgcagtcagagagcaggaagctagaggcacagcagcctgcgcagatgtcagaggcgtgctcgatcggctccgggtcaaggcagtgacgaagatccgagagtttatcctccagaagatttattccttcaggaaacccatgaccaactatcagatcccccagacggccctgctgaagtacaggttcttctatcagtttctgctgggcaatgaacgagcaacagcaaaggagatcagggatgaatatgtggagacgctgagcaagatttacctgtcttactaccgctcttacctggggcggctcatgaaggtgcagtatgaggaagtcgctgagaaagatgatctaatgggtgtggaagatacagcaaagaaaggattcttctcaaagccatcgctccgcagcaggaacaccattttcaccctaggaacccgcggctctgtcatctcccccactgaacttgaggcccccatcctggtgcctcacacagcgcagcgcggagagcagaggtatccatttgaggccctcttccgcagccagcactacgccctcctagacaattcctgccgcgaataccttttcatctgtgaattttttgttgtgtctggcccagctgcacacgacctgttccatgctgtcatgggccgtacactcagcatgaccctgaaacacctggattcttatctagctgactgctacgatgccattgctgtttttctctgtatccacattgttctccggttccgtaacattgcagcaaagagggatgttcctgccctggacaggtactgggaacaggtgcttgccttgctatggccacggtttgaactgatcctggagatgaatgttcagagcgtccgaagcactgacccccagcgcctaggggggttggatactcggccccactatatcacacgccgctatgcagagttctcctccgctcttgtcagtatcaaccagacaattcctaatgaacggaccatgcaattgctgggacagctgcaggtggaggtggagaattttgtcctccgagtggcagctgagttctcctcaaggaaggagcagcttgtgtttctgatcaacaactatgacatgatgctgggtgtgctgatggagcgggctgcagatgacagcaaagaggttgagagcttccagcagctgctcaatgctcggacacaggaattcattgaagagttgctgtctcccccttttgggggtttagtggcatttgtgaaggaggctgaggctttgattgagcgtggacaggctgagcgacttcgaggggaagaagcccgggtaactcagctgatccgtggctttggtagttcctggaaatcatcagtggaatctctgagtcaggatgtaatgcggagtttcaccaacttcagaaatggcaccagtatcattcagggagcgctgacccagctgatccagctctatcatcgcttccaccgggtgctgtcccagccgcagctccgagccctccctgcccgggctgagctcatcaacattcaccaccttatggtggagctcaagaagcataagcccaacttctgatgtgccagaaaccgccctgagatctgccggtcatctccatggacttctgcaccccattccatacccttcttcacctggggtaccccttccagttttccccttgcttcccaggcccttgacatggcttacctgccttcactcccagcaccttgcccaacaggataagctggatccccttggccttctgaatatcccagtgtcttcaggtttcccaagaccacttccctgtgggcttccaaaatggcctttatcatttctccagtctgtcaccctcctttcctgctcccatacacccaaggcttgtttcttcccctgtaaaaaccactgcctcaatctctggttcactcaactagtcaccatgtcctgaggcatgaagcctcctcagctcttggaattgctggcaaggggtgactgcctctgagtcattgtgtttttcaaagtgatttcttttctgtagctttttgacctaagatctcagcaatttgaacactaacctctcccctcctggctcaagaattactccgaagtcagtctgcagaaaataaatatttagtatgacatgacactta

SEQ ID NO: 6150 - protein, 723 aa, Homo sapiens; identical to SEQ ID NO: 750

SEQ ID NO: 6151 - DNA, 2793 bp, Homo sapiens
tcgtaaggttcataggtaagagaacagcgaaggttccggggctagtttgtgtttcagacttccatatttccatttgcagttgggtgaagtggttagagctgaaaggggacagctggagtcaaacaacttaactcaaatatctgggaacgatttcgcgctgaggaagaccctttgggacttgtagctccactccggggaacggactcgccgggactgacagttgccggaagtgaggctgcggggaatggccgccgctgcgaccatggcggctgcggcccgggaactggtgttgcgggctgggacctcagatatggaggaggaagagggcccgctggcgggtggtcctgggctccaggaaccactgcaacttggggagttggatatcacttctgatgaattcatcctggatgaagtggatgttcacattcaggcaaatctggaggatgagttagtaaaggaagctcttaaaacgggtgtagatctccgtcactattcaaagcaagttgagctggagctacagcagattgaacagaaatccattcgggattatattcaagagagtgagaatatagcatctctacacaaccagatcacagcctgtgatgctgtcctggagcgaatggagcagatgttgggagcttttcagagtgacctcagctccatcagctctgagatccggacactgcaggaacagtcaggagccatgaacattcgacttcgaaatcgccaggcagttcgggggaaacttggggagcttgttgatggtctggtggtgccttctgctctggtcacggcaattctggaggctccagtgacagagcccaggttcttggagcagctacaggagctggatgccaaggcagccgcagtcagagagcaggaagctagaggcacagcagcctgcgcagatgtcagaggcgtgctcgatcggctccgggtcaaggcagtgacgaagatccgagagtttatcctccagaagatttattccttcaggaaacccatgaccaactatcagatcccccagacggccctgctgaagtacaggttcttctatcagtttctgctgggcaatgaacgagcaacagcaaaggagatcagggatgaatatgtggagacgctgagcaagatttacctgtcttactaccgctcttacctggggcggctcatgaaggtgcagtatccatttgaggccctcttccgcagccagcactacgccctcctagacaattcctgccgcgaataccttttcatctgtgaattttttgttgtgtctggcccagctgcacacgacctgttccatgctgtcatgggccgtacactcagcatgaccctgaaacacctggattcttatctagctgactgctacgatgccattgctgtttttctctgtatccacattgttctccggttccgtaacattgcagcaaagagggatgttcctgccctggacaggtactgggaacaggtgcttgccttgctatggccacggtttgaactgatcctggagatgaatgttcagagcgtccgaagcactgacccccagcgcctaggggggttggatactcggccccactatatcacacgccgctatgcagagttctcctccgctcttgtcagtatcaaccagacaattcctaatgaacggaccatgcaattgctgggacagctgcaggtggaggtggagaattttgtcctccgagtggcagctgagttctcctcaaggaaggagcagcttgtgtttctgatcaacaactatgacatgatgctgggtgtgctgatggagcgggctgcagatgacagcaaagaggttgagagcttccagcagctgctcaatgctcggacacaggaattcattgaagagttgctgtctcccccttttgggggtttagtggcatttgtgaaggaggctgaggctttgattgagcgtggacaggctgagcgacttcgaggggaagaagcccgggtaactcagctgatccgtggctttggtagttcctggaaatcatcagtggaatctctgagtcaggatgtaatgcggagtttcaccaacttcagaaatggcaccagtatcattcagggagcgctgacccagctgatccagctctatcatcgcttccaccgggtgctgtcccagccgcagctccgagccctccctgcccgggctgagctcatcaacattcaccaccttatggtggagctcaagaagcataagcccaacttctgatgtgccagaaaccgccctgagatctgccggtcatctccatggacttctgcaccccattccatacccttcttcacctggggtaccccttccagttttccccttgcttcccaggcccttgacatggcttacctgccttcactcccagcaccttgcccaacaggataagctggatccccttggccttctgaatatcccagtgtcttcaggtttcccaagaccacttccctgtgggcttccaaaatggcctttatcatttctccagtctgtcaccctcctttcctgctcccatacacccaaggcttgtttcttcccctgtaaaaaccactgcctcaatctctggttcactcaactagtcaccatgtcctgaggcatgaagcctcctcagctcttggaattgctggcaaggggtgactgcctctgagtcattgtgtttttcaaagtgatttcttttctgtagctttttgacctaagatctcagcaatttgaacactaacctctcccctcctggctcaagaattactccgaagtcagtctgcagaaaataaatatttagtatgacatgacactta

SEQ ID NO: 6152 - protein, 659 aa, Homo sapiens
MAAAATMAAAARELVLRAGTSDMEEEEGPLAGGPGLQEPLQLGELDITSDEFILDEVDVHIQANLEDELVKEALKTGVDLRHYSKQVELELQQIEQKSIRDYIQESENIASLHNQITACDAVLERMEQMLGAFQSDLSSISSEIRTLQEQSGAMNIRLRNRQAVRGKLGELVDGLVVPSALVTAILEAPVTEPRFLEQLQELDAKAAAVREQEARGTAACADVRGVLDRLRVKAVTKIREFILQKIYSFRKPMTNYQIPQTALLKYRFFYQFLLGNERATAKEIRDEYVETLSKIYLSYYRSYLGRLMKVQYPFEALFRSQHYALLDNSCREYLFICEFFVVSGPAAHDLFHAVMGRTLSMTLKHLDSYLADCYDAIAVFLCIHIVLRFRNIAAKRDVPALDRYWEQVLALLWPRFELILEMNVQSVRSTDPQRLGGLDTRPHYITRRYAEFSSALVSINQTIPNERTMQLLGQLQVEVENFVLRVAAEFSSRKEQLVFLINNYDMMLGVLMERAADDSKEVESFQQLLNARTQEFIEELLSPPFGGLVAFVKEAEALIERGQAERLRGEEARVTQLIRGFGSSWKSSVESLSQDVMRSFTNFRNGTSIIQGALTQLIQLYHRFHRVLSQPQLRALPARAELINIHHLMVELKKHKPNF

SEQ ID NO: 6153 - DNA, 2602 bp, Homo sapiens
agcttccaggaggaagaggcggtgcgatctaggagaagtgcttccggaaactgtttcagcgcgacctggctggatttatgagagtatggcttgggtaccacaacttccggtgcgcctttctttacagttcgtaaggttcataggcgggtggtcctgggctccaggaaccactgcaacttggggagttggatatcacttctgatgaattcatcctggatgaagtggatgttcacattcaggcaaatctggaggatgagttagtaaaggaagctcttaaaacgggtgtagatctccgtcactattcaaagcaagttgagctggagctacagcagattgaacagaaatccattcgggattatattcaagagagtgagaatatagcatctctacacaaccagatcacagcctgtgatgctgtcctggagcgaatggagcagatgttgggagcttttcagagtgacctcagctccatcagctctgagatccggacactgcaggaacagtcaggagccatgaacattcgacttcgaaatcgccaggcagttcgggggaaacttggggagcttgttgatggtctggtggtgccttctgctctggtcacggcaattctggaggctccagtgacagagcccaggttcttggagcagctacaggagctggatgccaaggcagccgcagtcagagagcaggaagctagaggcacagcagcctgcgcagatgtcagaggcgtgctcgatcggctccgggtcaaggcagtgacgaagatccgagagtttatcctccagaagatttattccttcaggaaacccatgaccaactatcagatcccccagacggccctgctgaagtacaggttcttctatcagtttctgctgggcaatgaacgagcaacagcaaaggagatcagggatgaatatgtggagacgctgagcaagatttacctgtcttactaccgctcttacctggggcggctcatgaaggtgcagtatccatttgaggccctcttccgcagccagcactacgccctcctagacaattcctgccgcgaataccttttcatctgtgaattttttgttgtgtctggcccagctgcacacgacctgttccatgctgtcatgggccgtacactcagcatgaccctgaaacacctggattcttatctagctgactgctacgatgccattgctgtttttctctgtatccacattgttctccggttccgtaacattgcagcaaagagggatgttcctgccctggacaggtactgggaacaggtgcttgccttgctatggccacggtttgaactgatcctggagatgaatgttcagagcgtccgaagcactgacccccagcgcctaggggggttggatactcggccccactatatcacacgccgctatgcagagttctcctccgctcttgtcagtatcaaccagacaattcctaatgaacggaccatgcaattgctgggacagctgcaggtggaggtggagaattttgtcctccgagtggcagctgagttctcctcaaggaaggagcagcttgtgtttctgatcaacaactatgacatgatgctgggtgtgctgatggagcgggctgcagatgacagcaaagaggttgagagcttccagcagctgctcaatgctcggacacaggaattcattgaagagttgctgtctcccccttttgggggtttagtggcatttgtgaaggaggctgaggctttgattgagcgtggacaggctgagcgacttcgaggggaagaagcccgggtaactcagctgatccgtggctttggtagttcctggaaatcatcagtggaatctctgagtcaggatgtaatgcggagtttcaccaacttcagaaatggcaccagtatcattcagggagcgctgacccagctgatccagctctatcatcgcttccaccgggtgctgtcccagccgcagctccgagccctccctgcccgggctgagctcatcaacattcaccaccttatggtggagctcaagaagcataagcccaacttctgatgtgccagaaaccgccctgagatctgccggtcatctccatggacttctgcaccccattccatacccttcttcacctggggtaccccttccagttttccccttgcttcccaggcccttgacatggcttacctgccttcactcccagcaccttgcccaacaggataagctggatccccttggccttctgaatatcccagtgtcttcaggtttcccaagaccacttccctgtgggcttccaaaatggcctttatcatttctccagtctgtcaccctcctttcctgctcccatacacccaaggcttgtttcttcccctgtaaaaaccactgcctcaatctctggttcactcaactagtcaccatgtcctgaggcatgaagcctcctcagctcttggaattgctggcaaggggtgactgcctctgagtcattgtgtttttcaaagtgatttcttttctgtagctttttgacctaagatctcagcaatttgaacactaacctctcccctcctggctcaagaattactccgaagtcagtctgcagaaaataaatatttagtatgacatgacactta

SEQ ID NO: 6154 - protein, 534 aa, Homo sapiens
MEQMLGAFQSDLSSISSEIRTLQEQSGAMNIRLRNRQAVRGKLGELVDGLVVPSALVTAILEAPVTEPRFLEQLQELDAKAAAVREQEARGTAACADVRGVLDRLRVKAVTKIREFILQKIYSFRKPMTNYQIPQTALLKYRFFYQFLLGNERATAKEIRDEYVETLSKIYLSYYRSYLGRLMKVQYPFEALFRSQHYALLDNSCREYLFICEFFVVSGPAAHDLFHAVMGRTLSMTLKHLDSYLADCYDAIAVFLCIHIVLRFRNIAAKRDVPALDRYWEQVLALLWPRFELILEMNVQSVRSTDPQRLGGLDTRPHYITRRYAEFSSALVSINQTIPNERTMQLLGQLQVEVENFVLRVAAEFSSRKEQLVFLINNYDMMLGVLMERAADDSKEVESFQQLLNARTQEFIEELLSPPFGGLVAFVKEAEALIERGQAERLRGEEARVTQLIRGFGSSWKSSVESLSQDVMRSFTNFRNGTSIIQGALTQLIQLYHRFHRVLSQPQLRALPARAELINIHHLMVELKKHKPNF

SEQ ID NO: 6155 - DNA, 627 bp, Homo sapiens
atttgcagttgggtgaagtggttagagctgaaaggggacagctggagtcaaacaacttaactcaaatatctgggaacgatttcgcgctgaggaagaccctttgggacttgtagctccactccggggaacggactcgccgggactgacagttgccggaagtgaggctgcggggaatggccgccgctgcgaccatggcggctgcggcccgggaactggtgttgcgggctgggacctcagatatggaggaggaagagggcccgctggcgggtggtcctgggctccaggaaccactgcaacttggggagttggatatcacttctgatgaattcatcctggatgaagtggatgacacccaaggcttgtttcttcccctgtaaaaaccactgcctcaatctctggttcactcaactagtcaccatgtcctgaggcatgaagcctcctcagctcttggaattgctggcaaggggtgactgcctctgagtcattgtgtttttcaaagtgatttcttttctgtagctttttgacctaagatctcagcaatttgaacactaacctctcccctcctggctcaagaattactccgaagtcagtctgcagaaaataaatatttagtatgacatgacactt

SEQ ID NO: 6156 - protein, 67 aa, Homo sapiens
MAAAATMAAAARELVLRAGTSDMEEEEGPLAGGPGLQEPLQLGELDITSDEFILDEVDDTQGLFLPL

SEQ ID NO: 6157 - DNA, 475 bp, Homo sapiens
catgtcatactaaatatttattttctgcagactgacttcggagtaattcttgagccaggaggggagaggttagtgttcaaattgctgagatcttaggtcaaaaagctacagaaaagaaatcactttgaaaaacacaatgactcagaggcagtcaccccttgccagcaattccaagagctgaggaggcttcatgcctcaggacatggtgactagttgagtgaaccagagattgaggcagtggtttttacaggggaagaaacaagccttgggtgtatgggagcaggaaaggagggtgacagactggagaaatgataaaggccattttggaagcccacagggaagtggtcttgggaaacctgaagacactgggatattcagaaggccaaggggatccagcttatcctgttgggcaaggtgctgggagtgaaggcaggaactaccaaagccacggatcagctgagttacccgggctaat

SEQ ID NO: 6158 - protein, 54 aa, Homo sapiens
MIKAILEAHREVVLGNLKTLGYSEGQGDPAYPVGQGAGSEGRNYQSHGSAELPG

SEQ ID NO: 6159 - DNA, 853 bp, Homo sapiens
gaaacacctggattcttatctagctgactgctacgatgccattgctgtttttctctgtatccacattgttctccggttccgtaacattgcagcaaagagggatgttcctgccctggacaggtcactgaattctggtccttgatgcccaacaggccacgaactctcttggtcttgcatgactctgccctgaccttagactcctactgacctggtatcatcaacctttattcccattcatttgctccggaggcagtagtgctgctttttgactcacctttctccaaccactgccccccaacccccacaactagctattgaccattaaactgaatgatgccccactccctcccatccccctccaacattccttgctggctgacctctgattctgattaagcccacaggtactgggaacaggtgcttgccttgctatggccacggtttgaactgatcctggagatgaatgttcagagcgtccgaagcactgacccccagcgcctaggggggttggatactcggccccactatatcacacgccgctatgcagagttctcctccgctcttgtcagtatcaaccagacaattcctaatgaacggaccatgcaattgctgggacagctgcaggtggaggtggagaattttgtcctccgagtggcagctgagttctcctcaaggaaggagcagcttgtgtttctgatcaacaactatgacatgatgctgggtgtgctgatggagcgggctgcagatgacagcaaagaggttgagagcttccagcagctgctcaatgctcggacacaggaattcattgaagagttgctgtctcccccttttgggggtttagtggcatttgtga

SEQ ID NO: 6160 - protein, 130 aa, Homo sapiens
MNVQSVRSTDPQRLGGLDTRPHYITRRYAEFSSALVSINQTIPNERTMQLLGQLQVEVENFVLRVAAEFSSRKEQLVFLINNYDMMLGVLMERAADDSKEVESFQQLLNARTQEFIEELLSPPFGGLVAF

SEQ ID NO: 6161 - DNA, 551 bp, Homo sapiens
ctgtgggtaggagggactgaaggtagagtcacatcacatggaggtgggttggctaaggaagttgggaggttgtgttggttgggccaggaggtgggtgtgattttccttcccactctctcctagatcacacgccgctatgcagagttctcctccgctcttgtcagtatcaaccagacaattcctaatgaacggaccatgcaattgctgggacagctgcaggtggaggtggagaattttgtcctccgagtggcagctgagttctcctcaaggaaggagcagcttgtgtttctgatcaacaactatgacatgatgctgggtgtgctgatggtaataggtgctccttctccttgccttcctacccagaaaattcggtttcccccactgctgttagctctgtgagggcagagatgatgcctgtcttgttcagtgttttactcttggagtctggcacagtgtccagcttagtacaataagtgtggaatgaaggggacatcctgaagtgaaggactgctttccccaaactagacatttccctttgtcttcccttagga

SEQ ID NO: 6162 - protein, 67 aa, Homo sapiens [sequence omitted]

SEQ ID NO: 6163 - DNA, 1055 bp, Homo sapiens
aagagctgggaaccattgacttaagggcatgcagaggggagagactggatgaggggaatgacagtcagaggcaggtgttgaggtggatgcaggagtagcaacagcaggtgggtgtaggccctttttgtacccctatgttcccccaccttttcagtgcccattcagcttgctcttagacagcccggacctagatagatgcgaagggtctgcctagctcttattactcaggtttactgattttccagccatatccatgggaagtcagtgttggggtccatcccttctgtttttcttctttactcctcctctcccagtatccatttgaggccctcttccgcagccagcactacgccctcctagacaattcctgccgcgaataccttttcatctgtgaattttttgttgtgtctggcccagctgcacacgacctgttccatgctgtcatgggccgtacactcagcatgaccctgaaacacctggattcttatctagctgactgctacgatgccattgctgtttttctctgtatccacattgttctccggttccgtaacattgcagcaaagagggatgttcctgccctggacaggtcactgaattctggtccttgatgcccaacaggccacgaactctcttggtcttgcatgactctgccctgaccttagactcctactgacctggtatcatcaacctttattcccattcatttgctccggaggcagtagtgctgctttttgactcacctttctccaaccactgccccccaacccccacaactagctattgaccattaaactgaatgatgccccactccctcccatccccctccaacattccttgctggctgacctctgattctgattaagcccacaggtactgggaacaggtgcttgccttgctatggccacggtttgaactgatcctggagatgaatgttcagagcgtccgaagcactgacccccagcgcctaggggggttggatactcggccccactatgtgagggagggcaagggtaacaaagggttcttgaaaggcagggctctaagcatcattg

SEQ ID NO: 6164 - protein, 55 aa, Homo sapiens
MGRTLSMTLKHLDSYLADCYDAIAVFLCIHIVLRFRNIAAKRDVPALDRSLNSGP

SEQ ID NO: 6165 - DNA, 589 bp, Homo sapiens
ctctcttccacaggaggcctacacgccgccgcttgtgctgcagccatgtttactgtgtctgatttcttcccccgtactttttcaactagtctctagtgatccctgaaaagttccagcatattttgcgagtactcaacaccaacatcgatgggcggcggaaaatagcctttgccatcactgccattaagggtgtgggccgaagatatgctcatgtggtgttgaggaaagcagacattgacctcaccaagagggcgggagaactcactgaggatgaggtggaacgtgtgatcaccattatgcagaatccacgccagtacaagatcccagactggttcttgaacagacagaaggatgtaaaggatggaaaatacagccaggtcctagccaatggtctggacaacaagctccgtgaagacctggagcgactgaagaagattcgggcccatagagggctgcgtcacttctggggccttcgtgtccgaggccagcacaccaagaccactggccgccgtggccgcaccgtgggtgtgtccaagaagaaataagtctgtaggccttgtctgttaataaatagtttatatacctatgg

SEQ ID NO: 6166 - protein, 82 aa, Homo sapiens
MQNPRQYKIPDWFLNRQKDVKDGKYSQVLANGLDNKLREDLERLKKIRAHRGLRHFWGLRVRGQHTKTTGRRGRTVGVSKKK

SEQ ID NO: 6167 - DNA, 548 bp, Homo sapiens
ctctcttccacaggaggcctacacgccgccgcttgtgctgcagccatgtctctagtgatccctgaaaagttccagcatattttgcgagtactcaacaccaacatcgatgggcggcggaaaatagcctttgccatcactgccattaagggtgtgggccgaagatatgctcatgtggtgttgaggaaagcagacattgacctcaccaagagggcgggagaactcactgaggatgaggtggaacgtgtgatcaccattatgcagaatccacgccagtacaagatcccagactggttcttgaacagacagaaggatgtaaaggatggaaaatacagccaggtcctagccaatggtctggacaacaagctccgtgaagacctggagcgactgaagaagattcgggcccatagagggctgcgtcacttctggggccttcgtgtccgaggccagcacaccaagaccactggccgccgtggccgcaccgtgggtgtgtccaagaagaaataagtctgtaggccttgtctgttaataaatagtttatatacctatgg

SEQ ID NO: 6168 - protein, 152 aa, Homo sapiens [sequence omitted]

SEQ ID NO: 6169 - DNA, 651 bp, Homo sapiens
ctcttccacaggaggcctacacgccgccgcttgtgctgcagccatgtctctagtgatccctgaaaagttccagcatattttgcgagtactcaacaccaacatcgatgggcggcggaaaatagcctttgccatcactgccattaagggtgtgggccgaagatatgctcatgtggtgttgaggaaagcagacattgacctcaccaagagggcgggagaactcactgaggatgaggtggaacgtgtgatcaccattatgcagaatccacgccagtacaagatcccagactggttcttgaacagacagaaggatgtaaaggatggaaaatacagccaggtgtgtactgaaatgagggcaggattagaggaagggtggagggtcctaacagaattgggcataggaggtcaggggataaaacatcccttgccccctcctctgaatccaggtcctagccaatggtctggacaacaagctccgtgaagacctggagcgactgaagaagattcgggcccatagagggctgcgtcacttctggggccttcgtgtccgaggccagcacaccaagaccactggccgccgtggccgcaccgtgggtgtgtccaagaagaaataagtctgtaggccttgtctgttaataaatagtttatatacct

SEQ ID NO: 6170 - protein, 144 aa, Homo sapiens
MSLVIPEKFQHILRVLNTNIDGRRKIAFAITAIKGVGRRYAHVVLRKADIDLTKRAGELTEDEVERVITIMQNPRQYKIPDWFLNRQKDVKDGKYSQVCTEMRAGLEEGWRVLTELGIGGQGIKHPLPPPLNPGPSQWSGQQAP

SEQ ID NO: 6171 - DNA, 779 bp, Homo sapiens
ctcttccacaggaggcctacacgccgccgcttgtgctgcagccatgtctctagtgatccctgaaaagttccagcatattttgcgagtactcaacaccaacatcgatgggcggcggaaaatagcctttgccatcactgccattaagggtgtgggccgaagatatgctcatgtggtgttgaggaaagcagacattgacctcaccaagagggcgggagaactcactgaggatgaggtggaacgtgtgatcaccattatgcagaatccacgccagtacaagatcccagactggttcttgaacagacagaaggatgtaaaggatggaaaatacagccaggtgtgtactgaaatgagggcaggattagaggaagggtggagggtcctaacagaattgggcataggaggtcaggggataaaacatcccttgccccctcctctgaatccaggtcctagccaatggtctggacaacaagctccgtgaagacctggagcgactgaagaagattcgggcccatagagggctgcgtcacttctgggggtgagtggggggtctcatctccctgcctacctcgactcagcattcctcctactcgctcttctttttccccaaccttttgtttctgctgtgcatgacctgtgactcttctctttttacctgcagccttcgtgtccgaggccagcacaccaagaccactggccgccgtggccgcaccgtgggtgtgtccaagaagaaataagtctgtaggccttgtctgttaataaatagtttatatacctatggc

SEQ ID NO: 6172 - protein, 144 aa, Homo sapiens; identical to SEQ ID NO: 6170

SEQ ID NO: 6173 - DNA, 644 bp, Homo sapiens
gccgccgcttgtgctgcagccatgtctctagtgatccctgaaaagttccagcatattttgcgagtactcaacaccaacatcgatgggcggcggaaaatagcctttgccatcactgccattaagggtgtgggccgaagatatgctcatgtggtgttgaggaaagcagacattgacctcaccaagagggcgggagaactcactgaggatgaggtggaacgtgtgatcaccattatgcagaatccacgccagtacaagatcccagactggttcttgaacagacagaaggatgtaaaggatggaaaatacagccaggtcctagccaatggtctggacaacaagctccgtgaagacctggagcgactgaagaagattcgggcccatagagggctgcgtcacttctgggggtgagtggggggtctcatctccctgcctacctcgactcagcattcctcctactcgctcttctttttccccaaccttttgtttctgctgtgcatgacctgtgactcttctctttttacctgcagccttcgtgtccgaggccagcacaccaagaccactggccgccgtggccgcaccgtgggtgtgtccaagaagaaataagtctgtaggccttgtctgttaataaatagtttatataccta

SEQ ID NO: 6174 - protein, 128 aa, Homo sapiens
MSLVIPEKFQHILRVLNTNIDGRRKIAFAITAIKGVGRRYAHVVLRKADIDLTKRAGELTEDEVERVITIMQNPRQYKIPDWFLNRQKDVKDGKYSQVLANGLDNKLREDLERLKKIRAHRGLRHFWG

SEQ ID NO: 6175 - DNA, 1023 bp, Homo sapiens
gcttgtgctgcagccatggtaagactggaatccgtgccgtgatccagcggcatcgcagctcgggcaaggaaagccggctgtcagggttctggaaacgtcctgccctgagggcctgcgactttctgtatggagccttggatcgcgtccctggaaagggacaccaaagatttccaattccggagagcgggcccgaggaagggtcactgctcgggcgcacgaaagctgtctaaggcttgggcgtatatggggaactctggcttttgccacgcacttttgggaatgggcaggagacctgcttcctctctccagaggttgcattttcccaagcttgaacgcttcatgtgcctactctgcaggactgaggagtttgctctgtggtgtgaaaacctaaggaatggggggcgggtgtcttgccacttgtgtgacaggcttaacctttttgtatgaagttcgtttgccttatcggccttactgtttgatagtttactgtgtctgatttcttcccccgtactttttcaactagtctctagtgatccctgaaaagttccagcatattttgcgagtactcaacaccaacatcgatgggcggcggaaaatagcctttgccatcactgccattaagggtgtgggccgaagatatgctcatgtggtgttgaggaaagcagacattgacctcaccaagagggcgggagaactcactgaggatgaggtggaacgtgtgatcaccattatgcagaatccacgccagtacaagatcccagactggttcttgaacagacagaaggatgtaaaggatggaaaatacagccaggtcctagccaatggtctggacaacaagctccgtgaagacctggagcgactgaagaagattcgggcccatagagggctgcgtcacttctggggccttcgtgtccgaggccagcacaccaagaccactggccgccgtggccgcaccgtgggtgtgtccaagaagaaataagtctgtaggccttgtctgttaataaatagtttatatacctatgg

SEQ ID NO: 6176 - protein, 82 aa, Homo sapiens; identical to SEQ ID NO: 6166

SEQ ID NO: 6177 - DNA, 459 bp, Homo sapiens
gctataaaggaatttaaaaatcagattcaacactaattccgaaacccctcacttcattcagggtgtgggccgaagatatgctcatgtggtgttgaggaaagcagacattgacctcaccaagagggcgggagaactcactgaggatgaggtggaacgtgtgatcaccattatgcagaatccacgccagtacaagatcccagactggttcttgaacagacagaaggatgtaaaggatggaaaatacagccaggtcctagccaatggtctggacaacaagctccgtgaagacctggagcgactgaagaagattcgggcccatagagggctgcgtcacttctggggccttcgtgtccgaggccagcacaccaagaccactggccgccgtggccgcaccgtgggtgtgtccaagaagaaataagtctgtaggccttgtctgttaataaatagtttatataccta

SEQ ID NO: 6178 - protein, 82 aa, Homo sapiens; identical to SEQ ID NO: 6166

SEQ ID NO: 6179 - DNA, 1735 bp, Homo sapiens
ggatgggagcgcgcaacgcggaagcgggcggcagaccggccgccggggcgaggcgggggaggggccgtgagtgccgcagtcggccagccatggagcggagcttgctggcggcgaggccgcggcgacaaggtagccacccccgcagcatgcctcgaccgcggtccgcagctgcaccgcctctccccgccccccagggtgcgctggtcccggtcgcgcgctcagacctccgcatcccgggcgtggtcggttaagtccccggccgtgacccaggcccggggagctagtctccgcccttcgctcttacggatcccctcggagtacgccgcaccatgcagctcaggctcttccggcgcctccttctcgccgctttgctgctggtgatcgtctggaccctcttcgggccttcggggttgggggaggagctgctgagcctctcactagcctccctgctcccagcccccgcctcaccggggccgcccctggccctgccccgcctcttgatccccaaccaggaagcttgcagtggtcccggggcccctcccttcctgctcatcctggtgtgcacggctccggagaacctgaaccagagaaacgccattcgggcttcgtggggcgggctgcgcgaggcccgggggctcagggtacagacgctattcttgctgggagagccgaacgcacagcaccccgtgtggggttcccaggggagtgacctggcctcggagtcagcagcccagggggatatcttgcaggccgccttccaggactcctaccgcaacctcaccctaaagaccctcagcgggctgaactgggctgagaaacactgccccatggcccgatacgtcctcaagacggacgatgatgtgtatgtcaacgtccctgaactggtatcagagctggtcttgcgagggggccgttgggggcaatgggagagaagcacggaaccccagagagaggctgagcaggaaggaggccaggttttgcacagcgaggaagtgcctcttctgtacttgggccgggtgcactggcgcgtgaacccctctcggacaccggggggcaggcaccgcgtatcagaggagcagtggcctcacacctggggcccctttccaccctatgcctcaggcacggggtatgtgctgtcagcgtctgctgtgcagctcattctcaaggtggccagccgggcaccccttctcccattagaggatgtctttgtgggggtaagtgcccgacgaggaggcctcgccccaacacagtgtgtcaagctggctggtgccacccactacccgctagaccggtgctgctatgggaaattcctgctgacgtcccacaggctggacccctggaagatgcaggaagcctggaagctggtgggtggctctgacggggaaaggactgcgcccttttgctcctggttccagggagtcctgggcatcctgcggtgtcgagcaatagcctggcttcagagctgagagtgcctggggccacaggaaaggcaggaacaggaccttctctctcccaggcccaacgcaggggccctcactggctgcagctgatctgtttccttataccagatcctcagtctcactaaagacagcgatatgggagacacccaggggcctggcccgccagcccaaaagatggtcatcgggaagagaaaaagaaaaaaatgctgcagttgttctctcaagctagggcagaagaggggtgtcaagctcctcaataaacttgtctccacttc

SEQ ID NO: 6180 - protein, 378 aa, Homo sapiens; identical to SEQ ID NO: 754

SEQ ID NO: 6181 - DNA, 1622 bp, Homo sapiens
ctcaccctaaagaccctcagcgggctgaactgggctgagaaacactgccccatggcccgatacgtcctcaagacggacgatgatgtgtatgtcaacgtccctgaactggtatcagagctggtcttgcgagggggccgttgggggcaatgggagagaagcacggaaccccagagagaggctgagcaggaaggaggccaggttttgcacagcgaggaagtgcctcttctgtacttgggccgggtgcactggcgcgtgaacccctctcggacaccggggggcaggcaccgcgtatcagaggagcagtggcctcacacctggggcccctttccaccctatgcctcaggcacggggtatgtgctgtcagcgtctgctgtgcagctcattctcaaggtggccagccgggcaccccttctcccattagaggatgtctttgtgggggtaagtgcccgacgaggaggcctcgccccaacacagtgtgtcaagctggctggtgccacccactacccgctagaccggtgctgctatgggaaattcctgctgacgtcccacaggctggacccctggaagatgcaggaagcctggaagctggtgggtggctctgacggggaaaggactgcgcccttttgctcctggttccagggagtcctgggcatcctgcggtgtcgagcaatagcctggcttcagagctgagagtgcctggggccacaggaaaggcaggaacaggaccttctctctcccaggcccaacgcaggggccctcactggctgcagctgatctgtttccttataccagatcctcagtctcactaaagacagcgatatgggagacacccaggggcctggcccgccagcccaaaagatggtcatcgggaagagaaaaagaaaaaaatgctgcagttgttctctcaagctagggcagaagaggggtgtcaagctcctcaataaacttgtctccacttcttcgagtgcagtgtggtcttcaccaggacccccagaacaccacaaacctggagagcccagaggctgccagaccctgctgcatgggaaggacatctccagggacatgggagagaggacagcctctctgaggaggaaggcccctaaaaggcaaagctaaggccacagcagccacaagaacctcagcgcagagccctgcccacagcaggtgcccagtgaatacctgatgacaaaaggaatcagaggaaaatacaaatcagacagaaaagctgtggaaaatgcagatactccctcaggaacagcagaaatccaaagcagacaccacctccacccctcacatcagccagacctggagagaacgatcatcttgaatgacaatgatgaacacagcgctccctattttgctaagcgctgtgctaaactatatgccttaactcatcttaatgtctacaacagcttatatgagggctttaaaccaaggcttggtaaactactgcccatgggccaaacctggcccatcatctagttctgtatagcccacaagccaagaatggtttttacatttttaagtggttgaaaaaaaatcaaaagaatattttgagactgtgaaaaccgtatgaaattcaaattccaatatccaacaaataaagttttattggaacgggg

SEQ ID NO: 6182 - protein, 212 aa, Homo sapiens
MARYVLKTDDDVYVNVPELVSELVLRGGRWGQWERSTEPQREAEQEGGQVLHSEEVPLLYLGRVHWRVNPSRTPGGRHRVSEEQWPHTWGPFPPYASGTGYVLSASAVQLILKVASRAPLLPLEDVFVGVSARRGGLAPTQCVKLAGATHYPLDRCCYGKFLLTSHRLDPWKMQEAWKLVGGSDGERTAPFCSWFQGVLGILRCRAIAWLQS

SEQ ID NO: 6183 - DNA, 826 bp, Homo sapiens
gaactgggctgagaaacactgccccatggcccgatacgtcctcaagacggacgatgatgtgtatgtcaacgtccctgaactggtatcagagctggtcttgcgagggggccgttgggggcaatgggagagaagcacggaaccccagagagaggctgagcaggaaggaggccaggttttgcacagcgaggaagtgcctcttctgtacttgggccgggtgcactggcgcgtgaacccctctcggacaccggggggcaggcaccgcgtatcagaggagcagtggcctcacacctggggcccctttccaccctatgcctcaggcacggggtatgtgctgtcagcgtctgctgtgcagctcattctcaaggtggccagccgggcaccccttctcccattagaggatgtctttgtgggggtaagtgcccgacgaggaggcctcgccccaacacagtgtgtcaagctggctggtgccacccactacccgctagaccggtgctgctatgggaaattcctgggcatcctgcggtgtcgagcaatagcctggcttcagagctgagagtgcctggggccacaggaaaggcaggaacaggaccttctctctcccaggcccaacgcaggggccctcactggctgcagctgatctgtttccttataccagatcctcagtctcactaaagacagcgatatgggagacacccaggggcctggcccgccagcccaaaagatggtcatcgggaagagaaaaagaaaaaaatgctgcagttgttctctcaagctagggcagaagaggggtgtcaagctcctcaataaacttgtctccacttcttcg

SEQ ID NO: 6184 - protein, 175 aa, Homo sapiens
MARYVLKTDDDVYVNVPELVSELVLRGGRWGQWERSTEPQREAEQEGGQVLHSEEVPLLYLGRVHWRVNPSRTPGGRHRVSEEQWPHTWGPFPPYASGTGYVLSASAVQLILKVASRAPLLPLEDVFVGVSARRGGLAPTQCVKLAGATHYPLDRCCYGKFLGILRCRAIAWLQS

SEQ ID NO: 6185 - DNA, 818 bp, Homo sapiens
cggaccctgccccatggagcagggcacctggccttctcccagaggggactgctggtggcgggaatgggtgacgttgtcaacatctgggcagggcagggggccggtgagcccaacttcgatggcctggagagtaatccatacagaagccggaagcagcgccaggagtgggaggtgaaggccctgctagagaaggtacctgcagagcttatttgtctggacccacgagccctggccgaggtggatgtcatctccctggagcagggaaagaaggagcagatagagaggctgggctatgacccgcaggctaaggctcccttccagccaaagccaaagcagaagggccgcagctccacggcaagcctggtgaagaggaagaggaaggtcatggatgaggaacacagggacaaggtccggcagagccttcagcagcagcatcataaggaggcgaaggccaagcccacgggggcccggccatctgccctggacagatttgtgcgctgagccagactccagggttgcctgggaacagtctctccccaagatcacctgtagggaaatgagtgttccctggaacaaggaggtgggggcagtgtggccccttccccaactgggggtggacagctgtctcctggggtgggttggtattaaagaggaaagcgattttttggataatgtgtctggatcatcttgtggacctgttcccctcccccttgccaagcatgaggccattctaggatcggaggggtcagtgtcctgcctctacccccaccccataccttgtggctgctgtggccttagctttgccttttaggggcctt

SEQ ID NO: 6186 - protein, 145 aa, Homo sapiens
MGDVVNIWAGQGAGEPNFDGLESNPYRSRKQRQEWEVKALLEKVPAELICLDPRALAEVDVISLEQGKKEQIERLGYDPQAKAPFQPKPKQKGRSSTASLVKRKRKVMDEEHRDKVRQSLQQQHHKEAKAKPTGARPSALDRFVR

SEQ ID NO: 6187 - DNA, 571 bp, Homo sapiens
gaggaagagaccgttccgaccacagccggagcctctccagggcctcctcgtaacaagaagaatcgggagctccgtcctcagagaccaaaaaatgcttacatcttaaagaagtctcggatctctaagaagcctcaggtcccgaagaaaccccgagaatggaagaacccggaagccttcagcagcagcatcataaggaggcgaaggccaagcccacgggggcccggccatctgccctggacagatttgtgcgctgagccagactccagggttgcctgggaacagtctctccccaagatcacctgtagggaaatgagtgttccctggaacaaggaggtgggggcagtgtggccccttccccaactgggggtggacagctgtctcctggggtgggttggtattaaagaggaaagcgattttttggataatgtgtctggatcatcttgtggacctgttcccctcccccttgccaagcatgaggccattctaggatcggaggggtcagtgtcctgcctctacccccaccccataccttgtggctgctgtggccttagctttgccttttaggggcctt

SEQ ID NO: 6188 - protein, 32 aa, Homo sapiens
MEEPGSLQQQHHKEAKAKPTGARPSALDRFVR

SEQ ID NO: 6189 - DNA, 507 bp, Homo sapiens
agaaaccgcggcgatactgggaggaagagaccgttccgaccacagccggagcctctccagggcctcctcgtaacaagaagaatcgggagctccgtcctcagagaccaaaaaatgcttacatcttaaagaagtctcggatctctaagaagcgggggcccggccatctgccctggacagatttgtgcgctgagccagactccagggttgcctgggaacagtctctccccaagatcacctgtagggaaatgagtgttccctggaacaaggaggtgggggcagtgtggccccttccccaactgggggtggacagctgtctcctggggtgggttggtattaaagaggaaagcgattttttggataatgtgtctggatcatcttgtggacctgttcccctcccccttgccaagcatgaggccattctaggatcggaggggtcagtgtcctgcctctacccccaccccataccttgtggctgctgtggccttagctttgccttttaggggcctt

SEQ ID NO: 6190 - protein, 84 aa, Homo sapiens [sequence omitted]

SEQ ID NO: 6191 - DNA, 670 bp, Homo sapiens
cggaccctgccccatggagcagggcacctggccttctcccagaggggactgctggtggcgggaatgggtgacgttgtcaacatctgggcagggcagggggccggtgagcccaacttcgatggcctggagagtaatccatacagaagccggaagcagcgccaggagtgggaggtgaaggccctgctagagaaggtacctgcagagcttatttgtctggacccacgagccctggccgaggtggatgtcatctccctggagcagggaaagaaggagcagatagagaggctgggctatgacccgcaggctaaggctcccttccagccaaagccaaagcagaagggccgcagctccacggcaagcctggtgaagaggaagaggaaggtcatggatgaggaacacagggacaaggtccggcagagccttcagcagcagcatcataaggaggcgaaggccaagcccacgggggcccggccatctgccctggacagatttgtgcgctgagccagactccagggttgcctgggaacagtctctccccaagatcacctgtagggaaatgagtgttccctggaacaaggaggtgggggcagtgtggccccttccccaactgggggtggacagctgtctcctggggtgggttggtattaaagaggaaagcgattttttggat

SEQ ID NO: 6192 - protein, 145 aa, Homo sapiens; identical to SEQ ID NO: 6186

SEQ ID NO: 6193 - DNA, 2332 bp, Homo sapiens
gttctgctaaaaagactagactaggacatttttaggcaagatggggaaactaatccagaaaaagaaaccgcaccgctacttagcccctggctccggacctgcctttcttttttaaatcactcttgcataagctgccgctcgcgataaggtgccaaaaactgttccgcccctctaaggagagcgtgccctcactcaagatggcacctagagagcttcatacctggtacgctgctgattggatgaaggacagagggcttccgggagttttcaagccgactgtgtggcagctgagaggagttttgcacgtggatcgccgttcgggtgggcgagatggagacagcccccaagccgggcaaggatgtcccgcccaagaaagacaaacttcagaccaagagaaagaaaccgcggcgatactgggaggaagagaccgttccgaccacagccggagcctctccagggcctcctcgtaacaagaagaatcgggagctccgtcctcagagaccaaaaaatgcttacatcttaaagaagtctcggatctctaagaagcctcaggtcccgaagaaaccccgagaatggaagaacccggagtcccagcgcggcttgtccgggacccaagatccattcccaggccccgcccccgtccctgtggaagtggtccagaagttctgtcgcattgacaaatcccgaaagctaccacattctaaagccaaaactcgaagccgacttgaggtggctgaagctgaggaagaggaaacaagtatcaaagctgctcgttctgagctgctgcttgctgaagaacctgggtttctggaaggggaggatggggaagacacagcaaagatatgccaggctgacattgtggaggctgtggacattgcaagtgcagccaagcactttgacttgaatctgcggcagtttggaccctacagactaaactactctcgaactggaagacacctggcttttggagggcgccgaggtcatgtggctgcccttgattgggtaacaaagaagcttatgtgcgagatcaacgtcatggaggcggtgcgggacatccggtttctccattctgaggcactgcttgctgttgctcagaaccgctggctccacatctatgacaatcagggcattgagctccactgtatccgccgctgtgaccgagtaacacggcttgagttcctgcccttccacttcctcctggctacagcttcagaaacagggtttctaacctacctggatgtgtcagtggggaagattgtggcagctctgaatgctcgagctgggcggctcgatgttatgagtcagaacccttacaatgccgtcatccatctcggacacagcaatggtactgtgtctttatggagtccagctatgaaggagccactggcaaagattctctgtcatcgtggtggggtccgggctgtggcagtagattctacaggcacgtacatggccacctctggcctagaccaccagctgaagatctttgacttgcgagggacgtaccagcctctgagcactcggaccctgccccatggagcagggcacctggccttctcccagaggggactgctggtggcgggaatgggtgacgttgtcaacatctgggcagggcagggcaaggccagcccaccctcccttgaacagccctacctcacccaccggctctcaggccctgtgcatggccttcagttctgcccctttgaagatgtgctgggggtggggcacactgggggcatcaccagcatgctggtccctggggccggtgagcccaacttcgatggcctggagagtaatccatacagaagccggaagcagcgccaggagtgggaggtgaaggccctgctagagaaggtacctgcagagcttatttgtctggacccacgagccctggccgaggtggatgtcatctccctggagcagggaaagaaggagcagatagagaggctgggctatgacccgcaggctaaggctcccttccagccaaagccaaagcagaagggccgcagctccacggcaagcctggtgaagaggaagaggaaggtcatggatgaggaacacagggacaaggtccggcagagccttcagcagcagcatcataaggaggcgaaggccaagcccacgggggcccggccatctgccctggacagatttgtgcgctgagccagactccagggttgcctgggaacagtctctccccaagatcacctgtagggaaatgagtgttccctggaacaaggaggtgggggcagtgtggccccttccccaactgggggtggacagctgtctcctggggtgggttggtattaaagaggaaagcgattttttggat

SEQ ID NO: 6194 - protein, 610 aa, Homo sapiens
METAPKPGKDVPPKKDKLQTKRKKPRRYWEEETVPTTAGASPGPPRNKKNRELRPQRPKNAYILKKSRISKKPQVPKKPREWKNPESQRGLSGTQDPFPGPAPVPVEVVQKFCRIDKSRKLPHSKAKTRSRLEVAEAEEEETSIKAARSELLLAEEPGFLEGEDGEDTAKICQADIVEAVDIASAAKHFDLNLRQFGPYRLNYSRTGRHLAFGGRRGHVAALDWVTKKLMCEINVMEAVRDIRFLHSEALLAVAQNRWLHIYDNQGIELHCIRRCDRVTRLEFLPFHFLLATASETGFLTYLDVSVGKIVAALNARAGRLDVMSQNPYNAVIHLGHSNGTVSLWSPAMKEPLAKILCHRGGVRAVAVDSTGTYMATSGLDHQLKIFDLRGTYQPLSTRTLPHGAGHLAFSQRGLLVAGMGDVVNIWAGQGKASPPSLEQPYLTHRLSGPVHGLQFCPFEDVLGVGHTGGITSMLVPGAGEPNFDGLESNPYRSRKQRQEWEVKALLEKVPAELICLDPRALAEVDVISLEQGKKEQIERLGYDPQAKAPFQPKPKQKGRSSTASLVKRKRKVMDEEHRDKVRQSLQQQHHKEAKAKPTGARPSALDRFVR

SEQ ID NO: 6195 - DNA, 2464 bp, Homo sapiens
catgcacagggcctgagagccggtgggtgaggtagggctgttcaagggagggtgggctggccttgccctgccctgcccagatgttgacaacgtcacccattcccgccaccagcagtcccctctgggagaaggccaggtgccctgctccatggggcagggtccgagtgctcagaggctggtacgtccctcgcaagtcaaagatcttcagctggtggtctaggccagaggtggccatgtacctggtgagagaagagggatcaattaatatgtcagtaaatgggtttaccaagcaagctgtggccaagtccaggcatcaagtctggctggggagaaaaagattaatagtaataaccactgccatcaccctgaacactccacaggcatcctctcagttaagctgcacacaactcatactatttttatttccctttaagaggtgaggaaactgaagctcagggaaaggaaagctaggtcagtgaatggtcaggcctgtctctttagcatctgcctctaacctgctaacaccacacagccctctcaagacacgggcgtcaaaaggaacgcccacacgacaggctgcacccaaatgtgatgtccccctgtacacacatgcagcacacagcccagcaaggggaaggagcatgtgcagtggtcagaaaggcttcatgggaaaggtgggatttgagccattctagataattctcaaaaaattacaggaagtagatacacagcaggttcaaatgcattaacaccagagtgttgagactgagagggaagcagaggtttgttaggattggtgggaaacatggtcaggaaaatcaggagcagacaatttgtgaggtttctttaaagtcagactgaggacccacagctcatgatcccaacattgctctctggcagtgacaaatcacaaagtgaaggctccaaggacttgagaagacctactcagggaagtggtgaagtaatgcactggaggcccttgccctgcccctctgtgtgctttccctggaaggaaggagggaaggttggtgaccaaatcctctccaggaatcatgtactgcataagttgtttactttcagaagttggagttccttttctttttttgagacagggtctctctgttgcccaagctggagtgcagtggcatgaccctggctcactgcagcctctgcctccctggttcaagtgattctcgtgcctcagcctcccaagtagctgggattacaggcatgcgccaccaccgctaatttttagtagagccagggtttcgccatgttgaccacgctggtcttgaactcctggcctcaaatgacctgcccaccttggcctcccagacatcctggagactttgaataagctggtggccaagctggatgtggtggctcacagtaattactctgtaatcccagcactttgggaggccgaggtgggtggatcacctgaggtcaggagtttgagaccagccaagccaacatggcaaaaccccatctctactaaaaatacaaaaattagcgcatgcagtggcatgcacttgtactcccagctacttggaggctgaggcagaacaatcacttgagcctaggaggcggaggttgtaatgaaccgagatcgcgccactgcactccagcctgggtgatagatcaagactccgtctcgaaaaatagtaataaaataaataaatgcatcacctggccaatcattctcaaaaaccatagccatggccgggtgcagtggctcacgcctgtaatcccaacacttgcactttgggaggccgaagcaggtggatcacgatgtcaggagttcaagatcagcctggccaagatggtgaaaccccatctctactaaacattaaaaaattaactgggcgtggttcgtgggcgcctgtaatcccagctactcaggaggctgaggcaggagaatcgcttgaaccccggggggcagaggttgtggtgagctgagattgtgccactgcactccagcctgggtgacagatcaagactctgtctcaaaaaaaaaaaaaaaatagccacaagtttttatacctaaaggataacgggagcaccacaccagggcaggctcaacgattcatccttttgtctccagaacctcagcgcagagccctgcccacagcaggtgcccagtgaatacctgatgacaaaaggaatcagaggaaaatacaaatcagacagaaaagctgtggaaaatgcagatactccctcaggaacagcagaaatccaaagcagacaccacctccacccctcacatcagccagacctggagagaacgatcatcttgaatgacaatgatgaacacagcgctccctattttgctaagcgctgtgctaaactatatgccttaactcatcttaatgtctacaacagcttatatgagggctttaaaccaaggcttggtaaactactgcccatgggccaaacctggcccatcatctagttctgtatagcc

SEQ ID NO: 6196 - protein, 119 aa, Homo sapiens
MLTTSPIPATSSPLWEKARCPAPWGRVRVLRGWYVPRKSKIFSWWSRPEVAMYLVREEGSINMSVNGFTKQAVAKSRHQVWLGRKRLIVITTAITLNTPQASSQLSCTQLILFLFPFKR

SEQ ID NO: 6197 - DNA, 893 bp, Homo sapiens
atcttgagtgagggcacgctctccttagaggggcggaacagtttttggcaccttatcgcgagcggcagcttatgcaagagtgatttaaaaaagaaaggcaggtccggagccaggggctaagtagcggtgcggtttctttttctggattagtttccccatcttgcctaaaaatgtcctagtctagtctttttagcagaactccactccctaaacatgtcagaactacacttcccatcaagggtcagaaagaaacttccggcacagtcttttcccagcattccttgtttacttccgggtttattactactgaaggaagaacgtgagtaggccagatcagaaaagggagctcaggtaccttccagagagtgagacccagcgcccttgtctcgcacccagtaggctttcatccccgccatggcggagctgatccagaagaagctacagggagaagtggagaaatatcaacagctacagaaggacttaagtaaatccatgtcggggaggcagaaacttgaagcacaactaacagaaaataatatcgtgaaagaggaactggccctgctggatgggtccaacgtggtctttaaacttctgggtccggtgctagtcaaacaggagctgggggaggctcgggccacagtagggaagaggctggactatatcacagctgaaattaagcgatacgaatcccagcttcgggatcttgagcggcagtcagagcaacagagggagacccttgctcagctgcagcaggagttccagcgggcccaggcagcaaaggcaggggctcctggcaaggcctgaccccatggtggggggaggggaggggaggggagggaatgaggcagctctaggatctatactgtagctaataaaatgtaaaaacacctggc

SEQ ID NO: 6198 - protein, 129 aa, Homo sapiens; identical to SEQ ID NO: 758

SEQ ID NO: 6199 - DNA, 1380 bp, Homo sapiens
atcttgagtgagggcacgctctccttagaggggcggaacagtttttggcaccttatcgcgagcggcagcttatgcaagagtgatttaaaaaagaaaggcaggtccggagccaggggctaagtagcggtgcggtttctttttctggattagtttccccatcttgcctaaaaatgtcctagtctagtctttttagcagaactccactccctaaacatgtcagaactacacttcccatcaagggtcagaaagaaacttccggcacagtcttttcccagcattccttgtttacttccgggtttattactactgaaggaagaacgtgagtaggccagatcagaaaagggagctcaggtaccttccagagagtgagacccagcgcccttgtctcgcacccagtaggctttcatccccgccatggcggagctgatccagaagaagctacagggagaagtggagaaatatcaacagctacagaaggacttaagtaaatccatgtcggggaggcagaaacttgaagcacaactaacagaaaataatatcgtgaaagaggaactggccctgctggatgggtccaacgtggtctttaaacttctgggtccggtgctagtcaaacaggagctgggggaggctcgggccacagtagggaagaggctggactatatcacagctgaaattaagcgatacgaatcccagcttcgggatcttgagcggcagtcagagcaacagagggagacccttgctcagctgcagcaggagttccagcgggcccaggcagcaaaggcaggggctcctggcaaggcctgaccccatggtggggggaggggaggggaggggagggaatgaggcagctctaggatctatactgtagctaataaaatgtaaaaacacctggctctgtttcctgaccaggcacttctgtcatatccccacagccccttccaccttaacacacaccacctgtattaccccctcaggttcaaactcttgcacttggaatctctttgtggcacagtgttctttcttgaaagtgaaatcctaaatgtcttcaaacctacttcttgcctgtatatacaacccttaactctccctcatcttggttggcatgattcttttggaagggcatttgcaacataccatattgctaggaatgtcggtttaattgaaaaagaatacacagttctctaacctgaggccccaggatgaaatgtggttaccctccttgccaacagccctggcatctctattagtacttttcagcctctgtcttcctagaatttgcttgaatgtagctttaaactgacttaaaatcccagcatgtaatgctttatggtattataagtcctcccaagtttatatgttgtccataaagttgttctgcca

SEQ ID NO: 6200 - protein, 129 aa, Homo sapiens; identical to SEQ ID NO: 758

SEQ ID NO: 6201 - DNA, 864 bp, Homo sapiens
ggtttattactactgaaggaagaacgtgagtaggccagatcagaaaagggagctcaggtaccttccagagagtgagacccagcgcccttgtctcgcacccagtaggctttcatccccgccatggcggagctgatccagaagaagctacagggagaagtggagaaatatcaacagctacagaaggacttaagtaaatccatgtcggggaggcagaaacttgaagcacaactaacagaaaataatatcgtgaaagaggaactggccctgctggatgggtccaacgtggtctttaaacttctgggtccggtgctagtcaaacaggagctgggggaggctcgggccacagtagggaagaggctggactatatcacagctgaaatgtgagtttttattccaccaccgtgtgctgcaccctgtgatgcaagtgaaccattggagtagaggtgttgaaccattgcagaacagctctccatagtggcccctagtcctccagttcctccaaccctttccttcccttttaaccccccttcttctccctcccctggatctcaagttttccacctatctctttcttgcgtttagcactctccatagtgagtcctactaatttctccctttctgcttgtctcccttgtctctccttagtaagcgatacgaatcccagcttcgggatcttgagcggcagtcagagcaacagagggagacccttgctcagctgcagcaggagttccagcgggcccaggcagcaaaggcaggggctcctggcaaggcctgaccccatggtggggggaggggaggggaggggagggaatgaggcagctctaggatctatactgtagctaataaaatgtaaaaacacctggc

SEQ ID NO: 6202 - protein, 87 aa, Homo sapiens
MAELIQKKLQGEVEKYQQLQKDLSKSMSGRQKLEAQLTENNIVKEELALLDGSNVVFKLLGPVLVKQELGEARATVGKRLDYITAEM

SEQ ID NO: 6203 - DNA, 1351 bp, Homo sapiens
ggtttattactactgaaggaagaacgtgagtaggccagatcagaaaagggagctcaggtaccttccagagagtgagacccagcgcccttgtctcgcacccagtaggctttcatccccgccatggcggagctgatccagaagaagctacagggagaagtggagaaatatcaacagctacagaaggacttaagtaaatccatgtcggggaggcagaaacttgaagcacaactaacagaaaataatatcgtgaaagaggaactggccctgctggatgggtccaacgtggtctttaaacttctgggtccggtgctagtcaaacaggagctgggggaggctcgggccacagtagggaagaggctggactatatcacagctgaaatgtgagtttttattccaccaccgtgtgctgcaccctgtgatgcaagtgaaccattggagtagaggtgttgaaccattgcagaacagctctccatagtggcccctagtcctccagttcctccaaccctttccttcccttttaaccccccttcttctccctcccctggatctcaagttttccacctatctctttcttgcgtttagcactctccatagtgagtcctactaatttctccctttctgcttgtctcccttgtctctccttagtaagcgatacgaatcccagcttcgggatcttgagcggcagtcagagcaacagagggagacccttgctcagctgcagcaggagttccagcgggcccaggcagcaaaggcaggggctcctggcaaggcctgaccccatggtggggggaggggaggggaggggagggaatgaggcagctctaggatctatactgtagctaataaaatgtaaaaacacctggctctgtttcctgaccaggcacttctgtcatatccccacagccccttccaccttaacacacaccacctgtattaccccctcaggttcaaactcttgcacttggaatctctttgtggcacagtgttctttcttgaaagtgaaatcctaaatgtcttcaaacctacttcttgcctgtatatacaacccttaactctccctcatcttggttggcatgattcttttggaagggcatttgcaacataccatattgctaggaatgtcggtttaattgaaaaagaatacacagttctctaacctgaggccccaggatgaaatgtggttaccctccttgccaacagccctggcatctctattagtacttttcagcctctgtcttcctagaatttgcttgaatgtagctttaaactgacttaaaatcccagcatgtaatgctttatggtattataagtcctcccaagtttatatgttgtccataaagttgttctgcca

SEQ ID NO: 6204 - protein, 87 aa, Homo sapiens; identical to SEQ ID NO: 6202

SEQ ID NO: 6205 - DNA, 1055 bp, Homo sapiens
aggttaggatttcggttgagaggcttggggtcttgcgtttcgcccaccatctcctggggacagggtggagtcgatatccgggacgggggggaggttgcggtgcccctcagggctacctctcaagagtgctatcatttccgcaggccagatcagaaaagggagctcaggtaccttccagagagtgagacccagcgcccttgtctcgcacccagtaggctttcatccccgccatggcggagctgatccagaagaagctacagggagaagtggagaaatatcaacagctacagaaggacttaagtaaatccatgtcggggaggcagaaacttgaagcacaactaacagaaaataatatcgtgaaagaggtgagggactgggatttgtggggcgaggagggacctgtactagccatggttctgatcacatatgtcccatccctccatcaggaactggccctgctggatgggtccaacgtggtctttaaacttctgggtccggtgctagtcaaacaggagctgggggaggctcgggccacagtagggaagaggctggactatatcacagctgaaatgtgagtttttattccaccaccgtgtgctgcaccctgtgatgcaagtgaaccattggagtagaggtgttgaaccattgcagaacagctctccatagtggcccctagtcctccagttcctccaaccctttccttcccttttaaccccccttcttctccctcccctggatctcaagttttccacctatctctttcttgcgtttagcactctccatagtgagtcctactaatttctccctttctgcttgtctcccttgtctctccttagtaagcgatacgaatcccagcttcgggatcttgagcggcagtcagagcaacagagggagacccttgctcagctgcagcaggagttccagcgggcccaggcagcaaaggcaggggctcctggcaaggcctgaccccatggtggggggaggggaggggaggggagggaatgaggcagctctaggatctatactgtagctaataaaatgtaaaaacacctggc

SEQ ID NO: 6206 - protein, 114 aa, Homo sapiens
MAELIQKKLQGEVEKYQQLQKDLSKSMSGRQKLEAQLTENNIVKEVRDWDLWGEEGPVLAMVLITYVPSLHQELALLDGSNVVFKLLGPVLVKQELGEARATVGKRLDYITAEM

SEQ ID NO: 6207 - DNA, 1542 bp, Homo sapiens
aggttaggatttcggttgagaggcttggggtcttgcgtttcgcccaccatctcctggggacagggtggagtcgatatccgggacgggggggaggttgcggtgcccctcagggctacctctcaagagtgctatcatttccgcaggccagatcagaaaagggagctcaggtaccttccagagagtgagacccagcgcccttgtctcgcacccagtaggctttcatccccgccatggcggagctgatccagaagaagctacagggagaagtggagaaatatcaacagctacagaaggacttaagtaaatccatgtcggggaggcagaaacttgaagcacaactaacagaaaataatatcgtgaaagaggtgagggactgggatttgtggggcgaggagggacctgtactagccatggttctgatcacatatgtcccatccctccatcaggaactggccctgctggatgggtccaacgtggtctttaaacttctgggtccggtgctagtcaaacaggagctgggggaggctcgggccacagtagggaagaggctggactatatcacagctgaaatgtgagtttttattccaccaccgtgtgctgcaccctgtgatgcaagtgaaccattggagtagaggtgttgaaccattgcagaacagctctccatagtggcccctagtcctccagttcctccaaccctttccttcccttttaaccccccttcttctccctcccctggatctcaagttttccacctatctctttcttgcgtttagcactctccatagtgagtcctactaatttctccctttctgcttgtctcccttgtctctccttagtaagcgatacgaatcccagcttcgggatcttgagcggcagtcagagcaacagagggagacccttgctcagctgcagcaggagttccagcgggcccaggcagcaaaggcaggggctcctggcaaggcctgaccccatggtggggggaggggaggggaggggagggaatgaggcagctctaggatctatactgtagctaataaaatgtaaaaacacctggctctgtttcctgaccaggcacttctgtcatatccccacagccccttccaccttaacacacaccacctgtattaccccctcaggttcaaactcttgcacttggaatctctttgtggcacagtgttctttcttgaaagtgaaatcctaaatgtcttcaaacctacttcttgcctgtatatacaacccttaactctccctcatcttggttggcatgattcttttggaagggcatttgcaacataccatattgctaggaatgtcggtttaattgaaaaagaatacacagttctctaacctgaggccccaggatgaaatgtggttaccctccttgccaacagccctggcatctctattagtacttttcagcctctgtcttcctagaatttgcttgaatgtagctttaaactgacttaaaatcccagcatgtaatgctttatggtattataagtcctcccaagtttatatgttgtccataaagttgttctgcca

SEQ ID NO: 6208 - protein, 114 aa, Homo sapiens; identical to SEQ ID NO: 6206

SEQ ID NO: 6209 - DNA, 700 bp, Homo sapiens
atttcggttgagaggcttggggtcttgcgtttcgcccaccatctcctggggacagggtggagtcgatatccgggacgggggggaggttgcggtgcccctcagggctacctctcaagagtgctatcatttccgcaggccagatcagaaaagggagctcaggtaccttccagagagtgagacccagcgcccttgtctcgcacccagtaggctttcatccccgccatggcggagctgatccagaagaagctacagggagaagtggagaaatatcaacagctacagaaggacttaagtaaatccatgtcggggaggcagaaacttgaagcacaactaacagaaaataatatcgtgaaagaggaactggccctgctggatgggtccaacgtggtctttaaacttctgggtccggtgctagtcaaacaggagctgggggaggctcgggccacagtagggaagaggctggactatatcacagctgaaattaagcgatacgaatcccagcttcgggatcttgagcggcagtcagagcaacagagggagacccttgctcagctgcagcaggagttccagcgggcccaggcagcaaaggcaggggctcctggcaaggcctgaccccatggtggggggaggggaggggaggggagggaatgaggcagctctaggatctatactgtagctaataaaatgtaaaaacacctgg

SEQ ID NO: 6210 - protein, 129 aa, Homo sapiens; identical to SEQ ID NO: 758

SEQ ID NO: 6211 - DNA, 1188 bp, Homo sapiens
atttcggttgagaggcttggggtcttgcgtttcgcccaccatctcctggggacagggtggagtcgatatccgggacgggggggaggttgcggtgcccctcagggctacctctcaagagtgctatcatttccgcaggccagatcagaaaagggagctcaggtaccttccagagagtgagacccagcgcccttgtctcgcacccagtaggctttcatccccgccatggcggagctgatccagaagaagctacagggagaagtggagaaatatcaacagctacagaaggacttaagtaaatccatgtcggggaggcagaaacttgaagcacaactaacagaaaataatatcgtgaaagaggaactggccctgctggatgggtccaacgtggtctttaaacttctgggtccggtgctagtcaaacaggagctgggggaggctcgggccacagtagggaagaggctggactatatcacagctgaaattaagcgatacgaatcccagcttcgggatcttgagcggcagtcagagcaacagagggagacccttgctcagctgcagcaggagttccagcgggcccaggcagcaaaggcaggggctcctggcaaggcctgaccccatggtggggggaggggaggggaggggagggaatgaggcagctctaggatctatactgtagctaataaaatgtaaaaacacctggctctgtttcctgaccaggcacttctgtcatatccccacagccccttccaccttaacacacaccacctgtattaccccctcaggttcaaactcttgcacttggaatctctttgtggcacagtgttctttcttgaaagtgaaatcctaaatgtcttcaaacctacttcttgcctgtatatacaacccttaactctccctcatcttggttggcatgattcttttggaagggcatttgcaacataccatattgctaggaatgtcggtttaattgaaaaagaatacacagttctctaacctgaggccccaggatgaaatgtggttaccctccttgccaacagccctggcatctctattagtacttttcagcctctgtcttcctagaatttgcttgaatgtagctttaaactgacttaaaatcccagcatgtaatgctttatggtattataagtcctcccaagtttatatgttgtccataaagttgttctgcca

SEQ ID NO: 6212 - protein, 129 aa, Homo sapiens; identical to SEQ ID NO: 758

SEQ ID NO: 6213 - DNA, 774 bp, Homo sapiens
gccagatcagaaaagggagctcaggtaccttccagagagtgagacccagcgcccttgtctcgcacccagtaggctttcatccccgccatggcggagctgatccagaagaagctacagggagaagtggagaaatatcaacagctacagaaggacttaagtaaatccatgtcggggaggcagaaacttgaagcacaactaacagaaattctgggtccggtgctagtcaaacaggagctgggggaggctcgggccacagtagggaagaggctggactatatcacagctgaaatgtgagtttttattccaccaccgtgtgctgcaccctgtgatgcaagtgaaccattggagtagaggtgttgaaccattgcagaacagctctccatagtggcccctagtcctccagttcctccaaccctttccttcccttttaaccccccttcttctccctcccctggatctcaagttttccacctatctctttcttgcgtttagcactctccatagtgagtcctactaatttctccctttctgcttgtctcccttgtctctccttagtaagcgatacgaatcccagcttcgggatcttgagcggcagtcagagcaacagagggagacccttgctcagctgcagcaggagttccagcgggcccaggcagcaaaggcaggggctcctggcaaggcctgaccccatggtggggggaggggaggggaggggagggaatgaggcagctctaggatctatactgtagctaataaaatgtaaaaacacctggc

SEQ ID NO: 6214 - protein, 68 aa, Homo sapiens
MAELIQKKLQGEVEKYQQLQKDLSKSMSGRQKLEAQLTEILGPVLVKQELGEARATVGKRLDYITAEM

SEQ ID NO: 6215 - DNA, 1261 bp, Homo sapiens
gccagatcagaaaagggagctcaggtaccttccagagagtgagacccagcgcccttgtctcgcacccagtaggctttcatccccgccatggcggagctgatccagaagaagctacagggagaagtggagaaatatcaacagctacagaaggacttaagtaaatccatgtcggggaggcagaaacttgaagcacaactaacagaaattctgggtccggtgctagtcaaacaggagctgggggaggctcgggccacagtagggaagaggctggactatatcacagctgaaatgtgagtttttattccaccaccgtgtgctgcaccctgtgatgcaagtgaaccattggagtagaggtgttgaaccattgcagaacagctctccatagtggcccctagtcctccagttcctccaaccctttccttcccttttaaccccccttcttctccctcccctggatctcaagttttccacctatctctttcttgcgtttagcactctccatagtgagtcctactaatttctccctttctgcttgtctcccttgtctctccttagtaagcgatacgaatcccagcttcgggatcttgagcggcagtcagagcaacagagggagacccttgctcagctgcagcaggagttccagcgggcccaggcagcaaaggcaggggctcctggcaaggcctgaccccatggtggggggaggggaggggaggggagggaatgaggcagctctaggatctatactgtagctaataaaatgtaaaaacacctggctctgtttcctgaccaggcacttctgtcatatccccacagccccttccaccttaacacacaccacctgtattaccccctcaggttcaaactcttgcacttggaatctctttgtggcacagtgttctttcttgaaagtgaaatcctaaatgtcttcaaacctacttcttgcctgtatatacaacccttaactctccctcatcttggttggcatgattcttttggaagggcatttgcaacataccatattgctaggaatgtcggtttaattgaaaaagaatacacagttctctaacctgaggccccaggatgaaatgtggttaccctccttgccaacagccctggcatctctattagtacttttcagcctctgtcttcctagaatttgcttgaatgtagctttaaactgacttaaaatcccagcatgtaatgctttatggtattataagtcctcccaagtttatatgttgtccataaagttgttctgcca

SEQ ID NO: 6216 - protein, 68 aa, Homo sapiens; identical to SEQ ID NO: 6214

SEQ ID NO: 6217 - DNA, 223 bp, Homo sapiens
aggctttcatccccgccatggcggagctgatccagaagaagctacagggagaagtggagaaatatcaacagagccctggcatctctattagtacttttcagcctctgtcttcctagaatttgcttgaatgtagctttaaactgacttaaaatcccagcatgtaatgctttatggtattataagtcctcccaagtttatatgttgtccataaagttgttctgcc

SEQ ID NO: 6218 - protein, 32 aa, Homo sapiens
MAELIQKKLQGEVEKYQQSPGISISTFQPLSS

SEQ ID NO: 6219 - DNA, 228 bp, Homo sapiens
cgtgaaagagtaagcgatacgaatcccagcttcgggatcttgagcggcagtcagagcaacagagggagacccttgctcagctgcagcaggagttccagcgggcccaggcagcaaaggcaggggctcctggcaaggcctgaccccatggtggggggaggggaggggaggggagggaatgaggcagctctaggatctatactgtagctaataaaatgtaaaaacacctgg

SEQ ID NO: 6220 - protein, 44 aa, Homo sapiens
KSKRYESQLRDLERQSEQQRETLAQLQQEFQRAQAAKAGAPGKA

SEQ ID NO: 6221 - DNA, 716 bp, Homo sapiens
cgtgaaagagtaagcgatacgaatcccagcttcgggatcttgagcggcagtcagagcaacagagggagacccttgctcagctgcagcaggagttccagcgggcccaggcagcaaaggcaggggctcctggcaaggcctgaccccatggtggggggaggggaggggaggggagggaatgaggcagctctaggatctatactgtagctaataaaatgtaaaaacacctggctctgtttcctgaccaggcacttctgtcatatccccacagccccttccaccttaacacacaccacctgtattaccccctcaggttcaaactcttgcacttggaatctctttgtggcacagtgttctttcttgaaagtgaaatcctaaatgtcttcaaacctacttcttgcctgtatatacaacccttaactctccctcatcttggttggcatgattcttttggaagggcatttgcaacataccatattgctaggaatgtcggtttaattgaaaaagaatacacagttctctaacctgaggccccaggatgaaatgtggttaccctccttgccaacagccctggcatctctattagtacttttcagcctctgtcttcctagaatttgcttgaatgtagctttaaactgacttaaaatcccagcatgtaatgctttatggtattataagtcctcccaagtttatatgttgtccataaagttgttctgcca

SEQ ID NO: 6222 - protein, 31 aa, Homo sapiens
MWLPSLPTALASLLVLFSLCLPRICLNVALN

SEQ ID NO: 6223 - DNA, 4817 bp, Homo sapiens
aacgcttcccgcgggagttttagccgtgttattgttggggaagggaatgtcaaattctgctcctgccttcccccaggggctggagactggaatctttattccagttcattgcgggtcgacgtggtctccagaatccccgagtgtagaggcggaggacagtggagctggggactcgggcgcctgggtcctggtccctgagcgtccagcgctcccctagtccgcggccctggctcctgtcctcacttccttccccttttggctcctgctctcggagcgggcggacgcgggggggagcggaaagggcgggagggcccaggagcccggcgggggggttcaagggggtacggaaaagccggggaggggactcggtccggggccggagaccgacggcaacagcggctcaggacccacgctgcccccacccctcccgagcaggcgcccccatggcccgaccccgctgattccttcactcggccatgctcccgcggcccctgcggctgcttttggacacgagcccccccgggggagtcgtactgagcagcttccgaagccgggaccccgaagagggtgggggcccaggtggcctggtcgtgggcggggggcaggaggaagaggaggaggaagaagaagaggcccctgtgtccgtctgggatgaggaggaggatggtgccgtgtttaccgtcacaagccgccaatatcgacctcttgatcccttggtccctatgcctcccccacgttcctcccgacggctccgagctggcactctggaggccctggtcagacacctactggatacccggacatcagggactgatgtgagcttcatgtcagccttcctggctacccaccgggccttcacctccacgcctgccttgctagggcttatggctgacaggctggaagcccttgaatctcatcctaccgacgaactagagaggacaacagaggtagccatctctgtactgtcaacctggctggcctctcaccctgaggattttggctctgaggccaagggtcagcttgaccggcttgagagcttcttacttcagacagggtatgcagcagggaagggtgttggggggggcagcgctgacctcatccgcaatctccggtcccgggtggacccccaggcccccgaccttcctaagcccctggccctccccggcgatccccctgctgaccccacggatgtcctggtgttcctcgctgaccacttggccgaacagctgaccctgctagatgcggtgagaccctgacctctggcccctatgccccctgaccccttactaacctctccttgactccagatcctttccttgcttccaccccttcctgatccagctcctagcctcctccacctaccattttgattctccccttttccctttggtcgttacccttcaaaccctgtgcccctctggttccttggccacctgagatcctcagatccctgatattggaaggctgacctcacttgactatgaactttaacctctgacctctaccctgcaggaactttttctcaatttgatcccctctcagtgcctgggaggcctgtggggtcacagagaccggccaggacattctcacctctgcccatctgtccgagctactgtcacacagtttaacaaggtggcaggggcagtggttagttctgtcctgggggctacttccactggagagggacctggggaggtgaccatacggccactccgtcccccacagagggcccggctcctggagaagtggatccgcgtggcagaggagtgccggctgctccgaaacttctcttcagtttatgccgtggtgtcagccctgcagtccagccccatccacaggcttcgggcagcctggggggaagcaaccagggacagcctcagagtcttttccagcctctgccagattttctccgaggaggataattattcccagagtcgggagctgctcgtgcaggaggtgaagctgcagtctcctctggagccacactccaagaaggccccgaggtctggctcccggggtgggggtgtggtcccataccttggcaccttcctgaaggaccttgtgatgctggatgcagcctccaaggatgagttggagaatggatacatcaattttgacaagcggaggaaggagtttgcagtcctttctgagttgcgacggctccagaatgaatgtcgtggctataacctccaacctgaccatgatatccagaggtggctacaggggctccggccactgacagaggctcagagccatcgtgtatcctgtgaggtggagccacctggttccagtgaccctcctgccccacgggtgcttcggccaacattggtcatctcgcagtggacagaggttttgggctctgttggggtccctaccccgcttgtgtcctgtgaccggcccagtactgggggagatgaggcgcctacaactcctgctcctctgctgactcggctggcccagcacatgaagtggccatctgtctcgtcactagactctgccttggaaagcagtccatccctgcacagtccagctgaccccagccacctctccccaccagcctcctcccctaggccttctcgaggtcaccgccgctcagcctcctgtggctccccgctgagtgggggtgcagaagaggcctccggggggactggatatgggggagagggatctgggccaggggcctctgattgccgtatcatccgagtccagatggagttgggggaagatggcagtgtctataagagcattttggtgacaagccaggacaaggctccaagtgtcatcagtcgtgtccttaagaaaaacaatcgtgactctgcagtggcttcagagtatgagctggtacagctgctaccaggggagcgagagctgactatcccagcctcggctaatgtattctacgccatggatggagcttcacacgatttcctcctgcggcagcggcgaaggtcctctactgctacacctggcgtcaccagtggcccgtctgcctcaggaactcctccgagtgagggaggagggggctcctttcccaggatcaaggccacagggaggaagattgcacgggcactgttctgaggaggaagccccgttggcttacagaagtcatggtgttcataccagatgtgggtagccatcctgaatggtggcaattatatcacattgagacagaaattcagaaagggagccagccaccctggggcagtgaagtgccactggtttaccagacagctgagaaatccagccctgtgggaactggtgtcttataaccaagttggatacctgtgtatagcttcccaccttccatgagtgcagcacacaggtagtgctggaaaaacgcatcagtttctgattcttggccatatcctaacatgcaagggccaagcaaaggcttcaaggctctgagccccagggcagaggggaatggcaaaatgtaggtcctcgcaggagctcttcttcccactctgggggtttctatcactgtgacaacactaagataataaaccaaaacactacctgaattctactcccctgtccttgcagtacatatgaactggctgctatgagtgggggtggggaattggctgaaggtagatgccatggaacaggaaggggcacaatgttttctgtccccatgaacagagcaaaaagtgaggtattggtgaaaaaagtttcctcagaacagtttctctccagtaacctctctaccactggtcccttgctgcaaatgtgtataaaacaattttaggacaaggaaatggcagaacaactttatggacaacatataaacttgggaggacttataataccataaagcattacatgctgggattttaagtcagtttaaagctacattcaagcaaattctaggaagacagaggctgaaaagtactaatagagatgccagggctgttggcaaggagggtaaccacatttcatcctggggcctcaggttagagaactgtgtattctttttcaattaaaccgacattcctagcaatatggtatgttgcaaatgcccttccaaaagaatcatgccaaccaagatgagggagagttaagggttgtatatacaggcaagaagtaggtttgaagacatttaggatttcactttcaagaaagaacactgtgccacaaagagattccaagtgcaagagtttgaacctgagggggtaatacaggtggtgtgtgttaaggtggaaggggctgtggggatatgacagaagtgcctggtcaggaaacagagccaggtgtttttacattttattagctacagtatagatcctagagctgcctcattccctcccctcccctcccctccccccaccatggggtcaggccttgccaggagcccctgcctttgctgcctgggcccgctggaactcctgctgcagctgagcaagggtctccctctgttgctctgactgccgctcaagatcccgaagctgggattcgtatcgcttactaaggagagacaagggagacaagcagaaagggagaaattagtaggactcactatggagagtgctaaacgcaagaaagagataggtggaaaacttgagatccaggggagggagaagaaggggggttaaaagggaaggaaagggttggaggaactggaggactaggggccactatggagagctgttctgcaatggttcaacacctctactccaatggttcacttgcatcacagggtgcagcacacggtggtggaataaaaactcacatttcagctgtgatatagtccagcctcttccctactgtggcccgagcctcccccagctcctgtttgactagcaccggacccagaagtt

SEQ ID NO: 6224 - protein, 337 aa, Homo sapiens
MLDAASKDELENGYINFDKRRKEFAVLSELRRLQNECRGYNLQPDHDIQRWLQGLRPLTEAQSHRVSCEVEPPGSSDPPAPRVLRPTLVISQWTEVLGSVGVPTPLVSCDRPSTGGDEAPTTPAPLLTRLAQHMKWPSVSSLDSALESSPSLHSPADPSHLSPPASSPRPSRGHRRSASCGSPLSGGAEEASGGTGYGGEGSGPGASDCRIIRVQMELGEDGSVYKSILVTSQDKAPSVISRVLKKNNRDSAVASEYELVQLLPGERELTIPASANVFYAMDGASHDFLLRQRRRSSTATPGVTSGPSASGTPPSEGGGGSFPRIKATGRKIARALF

SEQ ID NO: 6225 - DNA, 3257 bp, Homo sapiens
aacgcttcccgcgggagttttagccgtgttattgttggggaagggaatgtcaaattctgctcctgccttcccccaggggctggagactggaatctttattccagttcattgcgggtcgacgtggtctccagaatccccgagtgtagaggcggaggacagtggagctggggactcgggcgcctgggtcctggtccctgagcgtccagcgctcccctagtccgcggccctggctcctgtcctcacttccttccccttttggctcctgctctcggagcgggcggacgcgggggggagcggaaagggcgggagggcccaggagcccggcgggggggttcaagggggtacggaaaagccggggaggggactcggtccggggccggagaccgacggcaacagcggctcaggacccacgctgcccccacccctcccgagcaggcgcccccatggcccgaccccgctgattccttcactcggccatgctcccgcggcccctgcggctgcttttggacacgagcccccccgggggagtcgtactgagcagcttccgaagccgggaccccgaagagggtgggggcccaggtggcctggtcgtgggcggggggcaggaggaagaggaggaggaagaagaagaggcccctgtgtccgtctgggatgaggaggaggatggtgccgtgtttaccgtcacaagccgccaatatcgacctcttgatcccttggtccctatgcctcccccacgttcctcccgacggctccgagctggcactctggaggccctggtcagacacctactggatacccggacatcagggactgatgtgagcttcatgtcagccttcctggctacccaccgggccttcacctccacgcctgccttgctagggcttatggctgacaggctggaagcccttgaatctcatcctaccgacgaactagagaggacaacagaggtagccatctctgtactgtcaacctggctggcctctcaccctgaggattttggctctgaggccaagggtcagcttgaccggcttgagagcttcttacttcagacagggtatgcagcagggaagggtgttggggggggcagcgctgacctcatccgcaatctccggtcccgggtggacccccaggcccccgaccttcctaagcccctggccctccccggcgatccccctgctgaccccacggatgtcctggtgttcctcgctgaccacttggccgaacagctgaccctgctagatgcggaactttttctcaatttgatcccctctcagtgcctgggaggcctgtggggtcacagagaccggccaggacattctcacctctgcccatctgtccgagctactgtcacacagtttaacaaggtggcaggggcagtggttagttctgtcctgggggctacttccactggagagggacctggggaggtgaccatacggccactccgtcccccacagagggcccggctcctggagaagtggatccgcgtggcagaggagtgccggctgctccgaaacttctcttcagtttatgccgtggtgtcagccctgcagtccagccccatccacaggcttcgggcagcctggggggaagcaaccagggacagcctcagagtcttttccagcctctgccagattttctccgaggaggataattattcccagagtcgggagctgctcgtgcaggaggtgaagctgcagtctcctctggagccacactccaagaaggccccgaggtctggctcccggggtgggggtgtggtcccataccttggcaccttcctgaaggaccttgtgatgctggatgcagcctccaaggatgagttggagaatggatacatcaattttgacaagcggaggaaggagtttgcagtcctttctgagttgcgacggctccagaatgaatgtcgtggctataacctccaacctgaccatgatatccagaggtggctacaggggctccggccactgacagaggctcagagccatcgtgtatcctgtgaggtggagccacctggttccagtgaccctcctgccccacgggtgcttcggccaacattggtcatctcgcagtggacagaggttttgggctctgttggggtccctaccccgcttgtgtcctgtgaccggcccagtactgggggagatgaggcgcctacaactcctgctcctctgctgactcggctggcccagcacatgaagtggccatctgtctcgtcactagactctgccttggaaagcagtccatccctgcacagtccagctgaccccagccacctctccccaccagcctcctcccctaggccttctcgaggtcaccgccgctcagcctcctgtggctccccgctgagtgggggtgcagaagaggcctccggggggactggatatgggggagagggatctgggccaggggcctctgattgccgtatcatccgagtccagatggagttgggggaagatggcagtgtctataagagcattttggtgacaagccaggacaaggctccaagtgtcatcagtcgtgtccttaagaaaaacaatcgtgactctgcagtggcttcagagtatgagctggtacagctgctaccaggggagcgagagctgactatcccagcctcggctaatgtattctacgccatggatggagcttcacacgatttcctcctgcggcagcggcgaaggtcctctactgctacacctggcgtcaccagtggcccgtctgcctcaggaactcctccgagtgagggaggagggggctcctttcccaggatcaaggccacagggaggaagattgcacgggcactgttctgaggaggaagccccgttggcttacagaagtcatggtgttcataccagatgtgggtagccatcctgaatggtggcaattatatcacattgagacagaaattcagaaagggagccagccaccctggggcagtgaagtgccactggtttaccagacagctgagaaatccagccctgtgggaactggtgtcttataaccaagttggatacctgtgtatagcttcccaccttccatgagtgcagcacacaggtagtgctggaaaaacgcatcagtttctgattcttggccatatcctaacatgcaagggccaagcaaaggcttcaaggctctgagccccagggcagaggggaatggcaaaatgtaggtcctcgcaggagctcttcttcccactctgggggtttctatcactgtgacaacactaagataataaaccaaaacactacctgaattct

SEQ ID NO: 6226 - protein, 777 aa, Homo sapiens; identical to SEQ ID NO: 760

SEQ ID NO: 6227 - DNA, 3525 bp, Homo sapiens
aacgcttcccgcgggagttttagccgtgttattgttggggaagggaatgtcaaattctgctcctgccttcccccaggggctggagactggaatctttattccagttcattgcgggtcgacgtggtctccagaatccccgagtgtagaggcggaggacagtggagctggggactcgggcgcctgggtcctggtccctgagcgtccagcgctcccctagtccgcggccctggctcctgtcctcacttccttccccttttggctcctgctctcggagcgggcggacgcgggggggagcggaaagggcgggagggcccaggagcccggcgggggggttcaagggggtacggaaaagccggggaggggactcggtccggggccggagaccgacggcaacagcggctcaggacccacgctgcccccacccctcccgagcaggcgcccccatggcccgaccccgctgattccttcactcggccatgctcccgcggcccctgcggctgcttttggacacgagcccccccgggggagtcgtactgagcagcttccgaagccgggaccccgaagagggtgggggcccaggtggcctggtcgtgggcggggggcaggaggaagaggaggaggaagaagaagaggcccctgtgtccgtctgggatgaggaggaggatggtgccgtgtttaccgtcacaagccgccaatatcgacctcttgatcccttggtccctatgcctcccccacgttcctcccgacggctccgagctggcactctggaggccctggtcagacacctactggatacccggacatcagggactgatgtgagcttcatgtcagccttcctggctacccaccgggccttcacctccacgcctgccttgctagggcttatggctgacaggctggaagcccttgaatctcatcctaccgacgaactagagaggacaacagaggtagccatctctgtactgtcaacctggctggcctctcaccctgaggattttggctctgaggccaagggtcagcttgaccggcttgagagcttcttacttcagacagggtatgcagcagggaagggtgttggggggggcagcgctgacctcatccgcaatctccggtcccgggtggacccccaggcccccgaccttcctaagcccctggccctccccggcgatccccctgctgaccccacggatgtcctggtgttcctcgctgaccacttggccgaacagctgaccctgctagatgcggtgagaccctgacctctggcccctatgccccctgaccccttactaacctctccttgactccagatcctttccttgcttccaccccttcctgatccagctcctagcctcctccacctaccattttgattctccccttttccctttggtcgttacccttcaaaccctgtgcccctctggttccttggccacctgagatcctcagatccctgatattggaaggctgacctcacttgactatgaactttaacctctgacctctaccctgcaggaactttttctcaatttgatcccctctcagtgcctgggaggcctgtggggtcacagagaccggccaggacattctcacctctgcccatctgtccgagctactgtcacacagtttaacaaggtggcaggggcagtggttagttctgtcctgggggctacttccactggagagggacctggggaggtgaccatacggccactccgtcccccacagagggcccggctcctggagaagtggatccgcgtggcagaggagtgccggctgctccgaaacttctcttcagtttatgccgtggtgtcagccctgcagtccagccccatccacaggcttcgggcagcctggggggaagcaaccagggacagcctcagagtcttttccagcctctgccagattttctccgaggaggataattattcccagagtcgggagctgctcgtgcaggaggtgaagctgcagtctcctctggagccacactccaagaaggccccgaggtctggctcccggggtgggggtgtggtcccataccttggcaccttcctgaaggaccttgtgatgctggatgcagcctccaaggatgagttggagaatggatacatcaattttgacaagcggaggaaggagtttgcagtcctttctgagttgcgacggctccagaatgaatgtcgtggctataacctccaacctgaccatgatatccagaggtggctacaggggctccggccactgacagaggctcagagccatcgtgtatcctgtgaggtggagccacctggttccagtgaccctcctgccccacgggtgcttcggccaacattggtcatctcgcagtggacagaggttttgggctctgttggggtccctaccccgcttgtgtcctgtgaccggcccagtactgggggagatgaggcgcctacaactcctgctcctctgctgactcggctggcccagcacatgaagtggccatctgtctcgtcactagactctgccttggaaagcagtccatccctgcacagtccagctgaccccagccacctctccccaccagcctcctcccctaggccttctcgaggtcaccgccgctcagcctcctgtggctccccgctgagtgggggtgcagaagaggcctccggggggactggatatgggggagagggatctgggccaggggcctctgattgccgtatcatccgagtccagatggagttgggggaagatggcagtgtctataagagcattttggtgacaagccaggacaaggctccaagtgtcatcagtcgtgtccttaagaaaaacaatcgtgactctgcagtggcttcagagtatgagctggtacagctgctaccaggggagcgagagctgactatcccagcctcggctaatgtattctacgccatggatggagcttcacacgatttcctcctgcggcagcggcgaaggtcctctactgctacacctggcgtcaccagtggcccgtctgcctcaggaactcctccgagtgagggaggagggggctcctttcccaggatcaaggccacagggaggaagattgcacgggcactgttctgaggaggaagccccgttggcttacagaagtcatggtgttcataccagatgtgggtagccatcctgaatggtggcaattatatcacattgagacagaaattcagaaagggagccagccaccctggggcagtgaagtgccactggtttaccagacagctgagaaatccagccctgtgggaactggtgtcttataaccaagttggatacctgtgtatagcttcccaccttccatgagtgcagcacacaggtagtgctggaaaaacgcatcagtttctgattcttggccatatcctaacatgcaagggccaagcaaaggcttcaaggctctgagccccagggcagaggggaatggcaaaatgtaggtcctcgcaggagctcttcttcccactctgggggtttctatcactgtgacaacactaagataataaaccaaaacactacctgaattct

SEQ ID NO: 6228 - protein, 337 aa, Homo sapiens; identical to SEQ ID NO: 6224

SEQ ID NO: 6229 - DNA, 3060 bp, Homo sapiens
aacgcttcccgcgggagttttagccgtgttattgttggggaagggaatgtcaaattctgctcctgccttcccccaggggctggagactggaatctttattccagttcattgcgggtcgacgtggtctccagaatccccgagtgtagaggcggaggacagtggagctggggactcgggcgcctgggtcctggtccctgagcgtccagcgctcccctagtccgcggccctggctcctgtcctcacttccttccccttttggctcctgctctcggagcgggcggacgcgggggggagcggaaagggcgggagggcccaggagcccggcgggggggttcaagggggtacggaaaagccggggaggggactcggtccggggccggagaccgacggcaacagcggctcaggacccacgctgcccccacccctcccgagcaggcccctgtgtccgtctgggatgaggaggaggatggtgccgtgtttaccgtcacaagccgccaatatcgacctcttgatcccttggtccctatgcctcccccacgttcctcccgacggctccgagctggcactctggaggccctggtcagacacctactggatacccggacatcagggactgatgtgagcttcatgtcagccttcctggctacccaccgggccttcacctccacgcctgccttgctagggcttatggctgacaggctggaagcccttgaatctcatcctaccgacgaactagagaggacaacagaggtagccatctctgtactgtcaacctggctggcctctcaccctgaggattttggctctgaggccaagggtcagcttgaccggcttgagagcttcttacttcagacagggtatgcagcagggaagggtgttggggggggcagcgctgacctcatccgcaatctccggtcccgggtggacccccaggcccccgaccttcctaagcccctggccctccccggcgatccccctgctgaccccacggatgtcctggtgttcctcgctgaccacttggccgaacagctgaccctgctagatgcggaactttttctcaatttgatcccctctcagtgcctgggaggcctgtggggtcacagagaccggccaggacattctcacctctgcccatctgtccgagctactgtcacacagtttaacaaggtggcaggggcagtggttagttctgtcctgggggctacttccactggagagggacctggggaggtgaccatacggccactccgtcccccacagagggcccggctcctggagaagtggatccgcgtggcagaggagtgccggctgctccgaaacttctcttcagtttatgccgtggtgtcagccctgcagtccagccccatccacaggcttcgggcagcctggggggaagcaaccagggacagcctcagagtcttttccagcctctgccagattttctccgaggaggataattattcccagagtcgggagctgctcgtgcaggaggtgaagctgcagtctcctctggagccacactccaagaaggccccgaggtctggctcccggggtgggggtgtggtcccataccttggcaccttcctgaaggaccttgtgatgctggatgcagcctccaaggatgagttggagaatggatacatcaattttgacaagcggaggaaggagtttgcagtcctttctgagttgcgacggctccagaatgaatgtcgtggctataacctccaacctgaccatgatatccagaggtggctacaggggctccggccactgacagaggctcagagccatcgtgtatcctgtgaggtggagccacctggttccagtgaccctcctgccccacgggtgcttcggccaacattggtcatctcgcagtggacagaggttttgggctctgttggggtccctaccccgcttgtgtcctgtgaccggcccagtactgggggagatgaggcgcctacaactcctgctcctctgctgactcggctggcccagcacatgaagtggccatctgtctcgtcactagactctgccttggaaagcagtccatccctgcacagtccagctgaccccagccacctctccccaccagcctcctcccctaggccttctcgaggtcaccgccgctcagcctcctgtggctccccgctgagtgggggtgcagaagaggcctccggggggactggatatgggggagagggatctgggccaggggcctctgattgccgtatcatccgagtccagatggagttgggggaagatggcagtgtctataagagcattttggtgacaagccaggacaaggctccaagtgtcatcagtcgtgtccttaagaaaaacaatcgtgactctgcagtggcttcagagtatgagctggtacagctgctaccaggggagcgagagctgactatcccagcctcggctaatgtattctacgccatggatggagcttcacacgatttcctcctgcggcagcggcgaaggtcctctactgctacacctggcgtcaccagtggcccgtctgcctcaggaactcctccgagtgagggaggagggggctcctttcccaggatcaaggccacagggaggaagattgcacgggcactgttctgaggaggaagccccgttggcttacagaagtcatggtgttcataccagatgtgggtagccatcctgaatggtggcaattatatcacattgagacagaaattcagaaagggagccagccaccctggggcagtgaagtgccactggtttaccagacagctgagaaatccagccctgtgggaactggtgtcttataaccaagttggatacctgtgtatagcttcccaccttccatgagtgcagcacacaggtagtgctggaaaaacgcatcagtttctgattcttggccatatcctaacatgcaagggccaagcaaaggcttcaaggctctgagccccagggcagaggggaatggcaaaatgtaggtcctcgcaggagctcttcttcccactctgggggtttctatcactgtgacaacactaagataataaaccaaaacactacctgaattct

SEQ ID NO: 6230 - protein, 695 aa, Homo sapiens
MPPPRSSRRLRAGTLEALVRHLLDTRTSGTDVSFMSAFLATHRAFTSTPALLGLMADRLEALESHPTDELERTTEVAISVLSTWLASHPEDFGSEAKGQLDRLESFLLQTGYAAGKGVGGGSADLIRNLRSRVDPQAPDLPKPLALPGDPPADPTDVLVFLADHLAEQLTLLDAELFLNLIPSQCLGGLWGHRDRPGHSHLCPSVRATVTQFNKVAGAVVSSVLGATSTGEGPGEVTIRPLRPPQRARLLEKWIRVAEECRLLRNFSSVYAVVSALQSSPIHRLRAAWGEATRDSLRVFSSLCQIFSEEDNYSQSRELLVQEVKLQSPLEPHSKKAPRSGSRGGGVVPYLGTFLKDLVMLDAASKDELENGYINFDKRRKEFAVLSELRRLQNECRGYNLQPDHDIQRWLQGLRPLTEAQSHRVSCEVEPPGSSDPPAPRVLRPTLVISQWTEVLGSVGVPTPLVSCDRPSTGGDEAPTTPAPLLTRLAQHMKWPSVSSLDSALESSPSLHSPADPSHLSPPASSPRPSRGHRRSASCGSPLSGGAEEASGGTGYGGEGSGPGASDCRIIRVQMELGEDGSVYKSILVTSQDKAPSVISRVLKKNNRDSAVASEYELVQLLPGERELTIPASANVFYAMDGASHDFLLRQRRRSSTATPGVTSGPSASGTPPSEGGGGSFPRIKATGRKIARALF

SEQ ID NO: 6231 - DNA, 837 bp, Homo sapiens
aatgtgggtggtggctgtcatattggacagcggagcctgagaggacttttaggaggattaaggaagacagtgtatctccttaagaagatgcaggagatacagcactcagcagtgtctggagggcagaaaatattagcctcatccttctcccatcatctgtgcccatgatagtttatatgtctctaaactgaccatgtacacctcaactgccttttaatatcctgaattcctttcctccaatgaaccaaacgcctcccgcccacctccaggtcccagtcctctgttccctttgcctggtccacccttgccctccctgggtcgcagacgaggtcggcctcgtcattccccgcagaccgccgcgcgtccctcttgtgcggttcaccacagttgtatttaagtgatcgtgtgagtcgtcgttaaatgcctgtctccccgcggatcatgggctcctcgaggacagggactggcctgtctgtccactgctgtaaccccgcgccggcatagggacctaaggcccactggagggcgctcatcaagtagctgctggatgttgacgaaggaagcggcggcgcagctcagggatctccgagtcaggacggtcggccagacccacggggtaacgggtctaatcgtgtaggaataaagctgtattccagtgcttccaaacggttctctcattccaacccctttccaagctcaatgaatattccaatcacctctggtcccttccagtgaccctgaaccgctcagagaacgccccgtcgacaccgttcggggcgggcgccactactggcgcatgagatgcgctcaagcagagggtactccaccagcgaggat

SEQ ID NO: 6232 - protein, 53 aa, Homo sapiens
MNQTPPAHLQVPVLCSLCLVHPCPPWVADEVGLVIPRRPPRVPLVRFTTVVFK

SEQ ID NO: 6233 - DNA, 357 bp, Homo sapiens
gccaaatccattcttcttgccctggctcacttgtcccccccaccgcgccgcgcgtccctcttgtgcggttcaccacagttgtatttaagtgatcgtgtgagtcgtcgttaaatgcctgtctccccgcggatcatgggctcctcgaggacagggactggcctgtctgtccactgctgtaaccccgcgccggcatagggacctaaggcccactggagggcgctcatcaagtagctgctggatgttgacgaaggaagcggcggcgcagctcagggatctccgagtcaggacggtcggccagacccacggggtaacgggtctaatcgtgtaggaataaagctgtattccagtgcttccaaa

SEQ ID NO: 6234 - protein, 36 aa, Homo sapiens
AKSILLALAHLSPPPRRASLLCGSPQLYLSDRVSRR

SEQ ID NO: 6235 - DNA, 498 bp, Homo sapiens
cggcgaaacacgatattgtactaacatcttaattttgttataaaatctcacaaaccccctgacatagtctcagagatctgtagggccgaggttacatttggagaacccgtactctagggccaaatccattcttcttgccctggctcacttgtcccccccaccgccccgcgctggagccactgcctagttcttcagccctagatgtgcggttcaccacagttgtatttaagtgatcgtgtgagtcgtcgttaaatgcctgtctccccgcggatcatgggctcctcgaggacagggactggcctgtctgtccactgctgtaaccccgcgccggcatagggacctaaggcccactggagggcgctcatcaagtagctgctggatgttgacgaaggaagcggcggcgcagctcagggatctccgagtcaggacggtcggccagacccacggggtaacgggtctaatcgtgtaggaataaagctgtattccagtgcttccaaa

SEQ ID NO: 6236 - protein, 49 aa, Homo sapiens [sequence omitted]

SEQ ID NO: 6237 - DNA, 451 bp, Homo sapiens
ttacaggcgtgagccaccgcgcccggcggcgaaacacgatattgtactaacatcttaattttgttataaaatctcacaaaccccctgacatagtctcagagatctgtagggccgaggttacatttggagaacccgtactctagggccaaatccattcttcttgccctggctcacttgtcccccccaccgccccgcgctggagccactgcctgtctccccgcggatcatgggctcctcgaggacagggactggcctgtctgtccactgctgtaaccccgcgccggcatagggacctaaggcccactggagggcgctcatcaagtagctgctggatgttgacgaaggaagcggcggcgcagctcagggatctccgagtcaggacggtcggccagacccacggggtaacgggtctaatcgtgtaggaataaagctgtattccagtgcttccaaa

SEQ ID NO: 6238 - protein, 59 aa, Homo sapiens
SQRSVGPRLHLENPYSRAKSILLALAHLSPPPPRAGATACLPADHGLLEDRDWPVCPLL

SEQ ID NO: 6239 - DNA, 1052 bp, Homo sapiens
ggcgcgatctcggctcactgcaagctccgcctctcgggttcacgccattctcctgcctcagcctcccaagtagctcggactacaggcgtcctccaccatgcctggctaatattttgtattttttagtagagacggggtttcaccgtgttagccaggatggtctcgatctcctaacctggtgatccgcccgcctcggcctcccaaagtattgggattacccgcgtgagccaccgcgcccggctgcaaataatctttctttttttctgagacagagtctcgctctgttgcccaggctggagtgcagtggcacgatctcggctcacggcacgctccgcctcccgggttcacgccattctcctgcctcagcttcccgagtagctgggactacaggggcccgccaccacgcccggctaactttttgtgtttttagtagagacggggtttcaccgtgttagccaggatggtctcgatctcctgaccttgtgatctgcccgcctcggcctcccaaagtgctgggattacaggcgtgagccaccgcgcccggcggcgaaacacgatattgtactaacatcttaattttgttataaaatctcacaaaccccctgacatagtctcagagatctgtagggccgaggttacatttggagaacccgtactctagggccaaatccattcttcttgccctggctcacttgtcccccccaccgccccgcgctggagccactgcctagttcttcagccctagatggtgctcgccagacctcctctcaatgctcatcacacacagggctattcctttcctccaatgaaccaaacgcctcccgcccacctccaggtcccagtcctctgttccctttgcctggtccacccttgccctccctgggtcgcagacgaggtcggcctcgtcattccccgcagaccgccgcgcgtccctcttgtgcggttcaccacagttgtatttaagtgatcgtgtgagtcgtcgttaaatgcctgtctccccacggggtaacgggtctaatcgtgtaggaataaagctgtattccagtgcttcc

SEQ ID NO: 6240 - protein, 73 aa, Homo sapiens
MVLARPPLNAHHTQGYSFPPMNQTPPAHLQVPVLCSLCLVHPCPPWVADEVGLVIPRRPPRVPLVRFTTVVFK

SEQ ID NO: 6241 - DNA, 663 bp, Homo sapiens
aatgtgggtggtggctgtcatattggacagcggagcctgagaggacttttaggaggattaaggaagacagtgtatctccttaagaagatgcaggagatacagcactcagcagtgtctggagggcagaaaatattagcctcatccttctcccatcatctgtgcccatgatagtttatatgtctctaaactgaccatgtacacctcaactgccttttaatatcctgaattcctttcctccaatgaaccaaacgcctcccgcccacctccaggtcccagtcctctgttccctttgcctggtccacccttgccctccctgggtcgcagacgaggtcggcctcgtcattccccgcagaccgccgcgcgtccctcttgtgcggttcaccacagttgtatttaagtgatcgtgtgagtcgtcgttaaatgcctgtctccccgcggatcatgggctcctcgaggacagggactggcctgtctgtccactgctgtaaccccgcgccggcatagggacctaaggcccactggagggcgctcatcaagtagctgctggatgttgacgaaggaagcggcggcgcagctcagggatctccgagtcaggacggtcggccagacccacggggtaacgggtctaatcgtgtaggaataaagctgtattccagtgcttcc

SEQ ID NO: 6242 - protein, 53 aa, Homo sapiens; identical to SEQ ID NO: 6232

SEQ ID NO: 6243 - DNA, 2884 bp, Homo sapiens
aggagggcgcggtaaggctggggtgtcctggtgagaactggagaggatctacccgggtccctgcctggccagtggggaaacaccggtcccccaggcaccttcacctaaccagagcggggatttccaccgcccctcatgccgccctttggaggaaagtgaaagtgaaaggaggaagaggaggcttcatggctgaggaggtcgcagcgccatgaagtccctgtctctgctcctcgctgtggctttgggcctggcgaccgccgtctcagcaggacccgcggtgatcgagtgttggttcgtggaggatgcgagcggaaagggcctggccaagagacccggtgcactgctgttgcgccagggaccgggggaaccgccgccccggccggacctcgaccctgagctctatctcagtgtacacgaccccgcgggcgccctccaggctgccttcaggcggtatccccggggcgcccccgcaccacactgcgagatgagccgcttcgtgcctctccccgcctctgcgaaatgggccagcggcctgacccccgcgcagaactgcccgcgggccctggatggggcttggctgatggtcagcatatccacagcatggggcacgctatgcctgtcgaattcaccatcccagcctgcctgcctcggggcgcagcgctgaggtcaccctggaggtagcaggtctttcagggccctcccttgaggacagcgtaggccttttcctgtctgcctttcttctgcttgggctcttcaaggcactgggctgggctgctgtctacctgtccacctgcaaggattcaaagaagaaagcagagtgagggcactcactgccatcctgtggaagccaccatcatctctggcccaagcttctgtagtagctccctaaaataataccctatcatctgctcctaatccctccaatctctctccactgagtggctggaatgcttttttttttttctttcacttatataagggataatttttcttttttttttttttttgagacggagtctcactcttccgcccaggctgcagtgcagtggcatgatcttggcttactgcaacctccgcctcctgggttcaagcaattctgtggcttcagcctccggagtagctgggattacaggcacatgccaccacacccagtgaatttttgtatttttagtagagacggggtttcaccatgttggccaggctggtcttgaattcctgacctcaggtgatctgcccacctcagcctcccaaagtgctgggattacaggcgtgagccaccacaccaggcccgagaaatgcttttttaaaaaacacacatcttatggcattcaccttcttggagctctaggacagtggttctcaaaatttttttctctcaggacctcttaaaaatcatcaaggaccccaaaaagcttttgggtatgtgggttatagctatcaatatttatggtactagaacttaaaagtgagaaaaatttaaaacacgagaatacataggcacacattctattcatcgtgggaaccatggtgtcaatacatatcatgtagcttctgaaaaactccactgtacacttatagaatgaagaaggcaaaaaacttttttttttttttttttgagacggagtctcgctctgtcgcccaggctggagtgcagtggcgcgatctcggctcactgcaagctccgcctctcgggttcacgccattctcctgcctcagcctcccaagtagctcggactacaggcgtcctccaccatgcctggctaatattttgtattttttagtagagacggggtttcaccgtgttagccaggatggtctcgatctcctaacctggtgatccgcccgcctcggcctcccaaagtattgggattacccgcgtgagccaccgcgcccggctgcaaataatctttctttttttctgagacagagtctcgctctgttgcccaggctggagtgcagtggcacgatctcggctcacggcacgctccgcctcccgggttcacgccattctcctgcctcagcttcccgagtagctgggactacaggggcccgccaccacgcccggctaactttttgtgtttttagtagagacggggtttcaccgtgttagccaggatggtctcgatctcctgaccttgtgatctgcccgcctcggcctcccaaagtgctgggattacaggcgtgagccaccgcgcccggcggcgaaacacgatattgtactaacatcttaattttgttataaaatctcacaaaccccctgacatagtctcagagatctgtagggccgaggttacatttggagaacccgtactctagggccaaatccattcttcttgccctggctcacttgtcccccccaccgccccgcgctggagccactgcctagttcttcagccctagatggtgctcgccagacctcctctcaatgctcatcacacacagggctattcctttcctccaatgaaccaaacgcctcccgcccacctccaggtcccagtcctctgttccctttgcctggtccacccttgccctccctgggtcgcagacgaggtcggcctcgtcattccccgcagaccgccgcgcgtccctcttgtgcggttcaccacagttgtatttaagtgatcgtgtgagtcgtcgttaaatgcctgtctccccgcggatcatgggctcctcgaggacagggactggcctgtctgtccactgctgtaaccccgcgccggcatagggacctaaggcccactggagggcgctcatcaagtagctgctggatgttgacgaaggaagcggcggcgcagctcagggatctccgagtcaggacggtcggccagacccacggggtaacgggtctaatcgtgtaggaataaagctgtattccagtgcttcc

SEQ ID NO: 6244 - protein, 151 aa, Homo sapiens [sequence omitted]

SEQ ID NO: 6245 - DNA, 3756 bp, Homo sapiens
ggggacgcggcacagatagggggaagccggagtaatggttttcgggcaagtggatgttggagagcacacacaggagttggggggcgggggagggcctggggttggggagggctcgaactcggggctgctgggtagtccaggagggcgcggtaaggctggggtgtcctggtgagaactggagaggatctacccgggtccctgcctggccagtggggaaacaccggtcccccaggcaccttcacctaaccagagcggggatttccaccgcccctcatgccgccctttggaggaaagtgaaagtgaaaggaggaagaggaggcttcatggctgaggaggtcgcagcgccatgaagtccctgtctctgctcctcgctgtggctttgggcctggcgaccgccgtctcagcaggacccgcggtgatcgagtgttggttcgtggaggatgcgagcggaaagggcctggccaagagacccggtgcactgctgttgcgccagggaccgggggaaccgccgccccggccggacctcgaccctgagctctatctcagtgtacacgaccccgcgggcgccctccaggctgccttcaggcggtatccccggggcgcccccgcaccacactgcgagatgagccgcttcgtgcctctccccgcctctgcgaaatgggccagcggcctgacccccgcgcagaactgcccgcgggccctggatggggcttggctgatggtcagcatatccagcccagtcctcagcctctccagcctcttgcgaccacagccagagcctcagcaggagcctgttctcatcaccatggcaacagtggtactgactgtcctcacccacacccctgcccctcgagtgagactgggacaagatgctctgctggacttgagctttgcctacatgccccccacctccgaggccgcctcatctctggctccgggtccccctccctttgggctagagtggcgacgccagcacctgggtaagggacatctgctcctggctgcaactcctgggctgaatggccagatgccagcagcccaagaaggggccgtggcatttgctgcttgggatgatgatgagccatggggcccatggaccggaaatgggaccttctggctgcctacagttcaaccctttcaggagggcacctatctggccaccatacacctgccatacctgcaaggacaggtcaccctggagcttgctgtgtacaaaccccccaaagtgtccctgatgccagcaacccttgcacgggccgccccaggggaggcacccccggaattgctctgccttgtgtcccacttctacccttctgggggcctggaggtggagtgggaactccggggtggcccagggggccgctctcagaaggccgaggggcagaggtggctctcggccctgcgccaccattccgatggctctgtcagcctctctgggcacttgcagccgcccccagtcaccactgagcagcatggggcacgctatgcctgtcgaattcaccatcccagcctgcctgcctcggggcgcagcgctgaggtcaccctggaggtagcaggtctttcagggccctcccttgaggacagcgtaggccttttcctgtctgcctttcttctgcttgggctcttcaaggcactgggctgggctgctgtctacctgtccacctgcaaggattcaaagaagaaagcagagtgagggcactcactgccatcctgtggaagccaccatcatctctggcccaagcttctgtagtagctccctaaaataataccctatcatctgctcctaatccctccaatctctctccactgagtggctggaatgcttttttttttttctttcacttatataagggataatttttcttttttttttttttttgagacggagtctcactcttccgcccaggctgcagtgcagtggcatgatcttggcttactgcaacctccgcctcctgggttcaagcaattctgtggcttcagcctccggagtagctgggattacaggcacatgccaccacacccagtgaatttttgtatttttagtagagacggggtttcaccatgttggccaggctggtcttgaattcctgacctcaggtgatctgcccacctcagcctcccaaagtgctgggattacaggcgtgagccaccacaccaggcccgagaaatgcttttttaaaaaacacacatcttatggcattcaccttcttggagctctaggacagtggttctcaaaatttttttctctcaggacctcttaaaaatcatcaaggaccccaaaaagcttttgggtatgtgggttatagctatcaatatttatggtactagaacttaaaagtgagaaaaatttaaaacacgagaatacataggcacacattctattcatcgtgggaaccatggtgtcaatacatatcatgtagcttctgaaaaactccactgtacacttatagaatgaagaaggcaaaaaacttttttttttttttttttgagacggagtctcgctctgtcgcccaggctggagtgcagtggcgcgatctcggctcactgcaagctccgcctctcgggttcacgccattctcctgcctcagcctcccaagtagctcggactacaggcgtcctccaccatgcctggctaatattttgtattttttagtagagacggggtttcaccgtgttagccaggatggtctcgatctcctaacctggtgatccgcccgcctcggcctcccaaagtattgggattacccgcgtgagccaccgcgcccggctgcaaataatctttctttttttctgagacagagtctcgctctgttgcccaggctggagtgcagtggcacgatctcggctcacggcacgctccgcctcccgggttcacgccattctcctgcctcagcttcccgagtagctgggactacaggggcccgccaccacgcccggctaactttttgtgtttttagtagagacggggtttcaccgtgttagccaggatggtctcgatctcctgaccttgtgatctgcccgcctcggcctcccaaagtgctgggattacaggcgtgagccaccgcgcccggcggcgaaacacgatattgtactaacatcttaattttgttataaaatctcacaaaccccctgacatagtctcagagatctgtagggccgaggttacatttggagaacccgtactctagggccaaatccattcttcttgccctggctcacttgtcccccccaccgccccgcgctggagccactgcctagttcttcagccctagatggtgctcgccagacctcctctcaatgctcatcacacacagggctattcctttcctccaatgaaccaaacgcctcccgcccacctccaggtcccagtcctctgttccctttgcctggtccacccttgccctccctgggtcgcagacgaggtcggcctcgtcattccccgcagaccgccgcgcgtccctcttgtgcggttcaccacagttgtatttaagtgatcgtgtgagtcgtcgttaaatgcctgtctccccgcggatcatgggctcctcgaggacagggactggcctgtctgtccactgctgtaaccccgcgccggcatagggacctaaggcccactggagggcgctcatcaagtagctgctggatgttgacgaaggaagcggcggcgcagctcagggatctccgagtcaggacggtcggccagacccacggggtaacgggtctaatcgtgtaggaataaagctgtattccagtgcttcc

SEQ ID NO: 6246 - protein, 448 aa, Homo sapiens; identical to SEQ ID NO: 762

SEQ ID NO: 6247 - DNA, 1805 bp, Homo sapiens
ggggacgcggcacagatagggggaagccggagtaatggttttcgggcaagtggatgttggagagcacacacaggagttggggggcgggggagggcctggggttggggagggctcgaactcggggctgctgggtagtccaggagggcgcggtaaggctggggtgtcctggtgagaactggagaggatctacccgggtccctgcctggccagtggggaaacaccggtcccccaggcaccttcacctaaccagagcggggatttccaccgcccctcatgccgccctttggaggaaagtgaaagtgaaaggaggaagaggaggcttcatggctgaggaggtcgcagcgccatgaagtccctgtctctgctcctcgctgtggctttgggcctggcgaccgccgtctcagcaggacccgcggtgatcgagtgttggttcgtggaggatgcgagcggaaagggcctggccaagagacccggtgcactgctgttgcgccagggaccgggggaaccgccgccccggccggacctcgaccctgagctctatctcagtgtacacgaccccgcgggcgccctccaggctgccttcaggcggtatccccggggcgcccccgcaccacactgcgagatgagccgcttcgtgcctctccccgcctctgcgaaatgggccagcggcctgacccccgcgcagaactgcccgcgggccctggatggggcttggctgatggtcagcatatccagcccagtcctcagcctctccagcctcttgcgaccacagccagagcctcagcaggagcctgttctcatcaccatggcaacagtggtactgactgtcctcacccacacccctgcccctcgagtgagactgggacaagatgctctgctggacttgagctttgcctacatgccccccacctccgaggccgcctcatctctggctccgggtccccctccctttgggctagagtggcgacgccagcacctgggtaagggacatctgctcctggctgcaactcctgggctgaatggccagatgccagcagcccaagaaggggccgtggcatttgctgcttgggatgatgatgagccatggggcccatggaccggaaatgggaccttctggctgcctacagttcaaccctttcaggagggcacctatctggccaccatacacctgccatacctgcaaggacaggtcaccctggagcttgctgtgtacaaaccccccaaagtgtccctgatgccagcaacccttgcacgggccgccccaggggaggcacccccggaattgctctgccttgtgtcccacttctacccttctgggggcctggaggtggagtgggaactccggggtggcccagggggccgctctcagaaggccgaggggcagaggtggctctcggccctgcgccaccattccgatggctctgtcagcctctctgggcacttgcagccgcccccagtcaccactgagcagcatggggcacgctatgcctgtcgaattcaccatcccagcctgcctgcctcggggcgcagcgctgaggtcaccctggaggtagcaggtctttcagggccctcccttgaggacagcgtaggccttttcctgtctgcctttcttctgcttgggctcttcaaggcactgggctgggctgctgtctacctgtccacctgcaaggattcaaagaagaaagcagagtgagggcactcactgccatcctgtggaagccaccatcatctctggcccaagcttctgtagtagctccctaaaataataccctatcatctgctcctaatccctccaatctctctcc

SEQ ID NO: 6248 - protein, 448 aa, Homo sapiens; identical to SEQ ID NO: 762

SEQ ID NO: 6249 - DNA, 1836 bp, Homo sapiens
ggggacgcggcacagatagggggaagccggagtaatggttttcgggcaagtggatgttggagagcacacacaggagttggggggcgggggagggcctggggttggggagggctcgaactcggggctgctgggtagtccaggagggcgcggtaaggctggggtgtcctggtgagaactggagaggatctacccgggtccctgcctggccagtggggaaacaccggtcccccaggcaccttcacctaaccagagcggggatttccaccgcccctcatgccgccctttggaggaaagtgaaagtgaaaggaggaagaggaggcttcatggctgaggaggtcgcagcgccatgaagtccctgtctctgctcctcgctgtggctttgggcctggcgaccgccgtctcagcaggacccgcggtgatcgagtgttggttcgtggaggatgcgagcggaaagggcctggccaagagacccggtgcactgctgttgcgccagggaccgggggaaccgccgccccggccggacctcgaccctgagctctatctcagtgtacacgaccccgcgggcgccctccaggctgccttcaggcggtatccccggggcgcccccgcaccacactgcgagatgagccgcttcgtgcctctccccgcctctgcgaaatgggccagcggcctgacccccgcgcagaactgcccgcgggccctggatggggcttggctgatggtcagcatatccagcccagtcctcagcctctccagcctcttgcgaccacagccagagcctcagcaggagcctgttctcatcaccatggcaacagtggtactgactgtcctcacccacacccctgcccctcgagtgagactgggacaagatgctctgctggacttgagctttgcctacatgccccccacctccgaggccgcctcatctctggctccgggtccccctccctttgggctagagtggcgacgccagcacctgggtaagggacatctgctcctggctgcaactcctgggctgaatggccagatgccagcagcccaagaaggggccgtggcatttgctgcttgggatgatgatgagccatggggcccatggaccggaaatgggaccttctggctgcctacagttcaaccctttcaggagggcacctatctggccaccatacacctgccatacctgcaaggacaggtcaccctggagcttgctgtgtacaaaccccccaaagtgtccctgatgccagcaacccttgcacgggccgccccaggggaggcacccccggaattgctctgccttgtgtcccacttctacccttctgggggcctggaggtggagtgggaactccggggtggcccagggggccgctctcagaaggccgaggggcagaggtggctctcggccctgcgccaccattccgatggctctgtcagcctctctgggcacttgcagccgcccccagtcaccactgagcagcatggggcacgctatgcctgtcgaattcaccatcccagcctgcctgcctcggggcgcagcgctgaggtcaccctggaggtagcaggtctttcagggccctcccttgaggacagcgtaggccttttcctgtctgcctttcttctgcttgggctcttcaaggcactgggctgggctgctgtctacctgtccacctgcaaggattcaaagaagaaaattagccagatgtgacggcacctgtaatcccagctactcgggagactggggcaggagaatcgcttgaacctgggaggcagaggttgcagtgagctgagatcacaccattgcactccagcctgggtgacaaaaggaaaacttcgtctcaacaa

SEQ ID NO: 6250 - protein, 450 aa, Homo sapiens
MKSLSLLLAVALGLATAVSAGPAVIECWFVEDASGKGLAKRPGALLLRQGPGEPPPRPDLDPELYLSVHDPAGALQAAFRRYPRGAPAPHCEMSRFVPLPASAKWASGLTPAQNCPRALDGAWLMVSISSPVLSLSSLLRPQPEPQQEPVLITMATVVLTVLTHTPAPRVRLGQDALLDLSFAYMPPTSEAASSLAPGPPPFGLEWRRQHLGKGHLLLAATPGLNGQMPAAQEGAVAFAAWDDDEPWGPWTGNGTFWLPTVQPFQEGTYLATIHLPYLQGQVTLELAVYKPPKVSLMPATLARAAPGEAPPELLCLVSHFYPSGGLEVEWELRGGPGGRSQKAEGQRWLSALRHHSDGSVSLSGHLQPPPVTTEQHGARYACRIHHPSLPASGRSAEVTLEVAGLSGPSLEDSVGLFLSAFLLLGLFKALGWAAVYLSTCKDSKKKISQM

SEQ ID NO: 6251 - DNA, 2178 bp, Homo sapiens
ggggacgcggcacagatagggggaagccggagtaatggttttcgggcaagtggatgttggagagcacacacaggagttggggggcgggggagggcctggggttggggagggctcgaactcggggctgctgggtagtccaggagggcgcggtaaggctggggtgtcctggtgagaactggagaggatctacccgggtccctgcctggccagtggggaaacaccggtcccccaggcaccttcacctaaccagagcggggatttccaccgcccctcatgccgccctttggaggaaagtgaaagtgaaaggaggaagaggaggcttcatggctgaggaggtcgcagcgccatgaagtccctgtctctgctcctcgctgtggctttgggcctggcgaccgccgtctcagcaggacccgcggtgatcgagtgttggttcgtggaggatgcgagcggaaagggcctggccaagagacccggtgcactgctgttgcgccagggaccgggggaaccgccgccccggccggacctcgaccctgagctctatctcagtgtacacgaccccgcgggcgccctccaggctgccttcaggcggtatccccggggcgcccccgcaccacactgcgagatgagccgcttcgtgcctctccccgcctctgcgaaatgggccagcggcctgacccccgcgcagaactgcccgcgggccctggatggggcttggctgatggtcagcatatccagcccagtcctcagcctctccagcctcttgcgaccacagccagagcctcagcaggagcctgttctcatcaccatggcaacagtggtactgactgtcctcacccacacccctgcccctcgagtgagactgggacaagatgctctgctggacttgagctttgcctacatgccccccacctccgaggccgcctcatctctggctccgggtccccctccctttgggctagagtggcgacgccagcacctgggtaagggacatctgctcctggctgcaactcctgggctgaatggccagatgccagcagcccaagaaggggccgtggcatttgctgcttgggatgatgatgagccatggggcccatggaccggaaatgggaccttctggctgcctacagttcaaccctttcaggagggcacctatctggccaccatacacctgccatacctgcaaggacaggtcaccctggagcttgctgtgtacaaaccccccaaagtgtccctgatgccagcaacccttgcacgggccgccccaggggaggcacccccggaattgctctgccttgtgtcccacttctacccttctgggggcctggaggtggagtgggaactccggggtggcccagggggccgctctcagaaggccgaggggcagaggtggctctcggccctgcgccaccattccgatggctctgtcagcctctctgggcacttgcagccgcccccagtcaccactgagcagcatggggcacgctatgcctgtcgaattcaccatcccagcctgcctgcctcggggcgcagcgctgaggtcaccctggaggtagcaggtctttcagggccctcccttgaggacagcgtaggccttttcctgtctgcctttcttctgcttgggctcttcaaggcactgggctgggctgctgtctacctgtccacctgcaaggattcaaagaaggtacagtgctccacctctctgtatctttcccttgtcactttatctcctcatcctatctcaaaacccatggagggaggctgctggtgtggtaggcagaacctaggcttggaattcacactgatctgggttaaaacctggcactatatcctaactgtaggactctttgagcatgctacttaatctatatgtttccttgggtgtagggattttaaaaagttacttaggcagtgctgtccaatagaaagataatgcaagccacatatgtaaatttaaatactctagtactcacattaaaaaaataagcagaaacaggtaaaattaacttaataatataccttatttaatctaataattctggtcccttatctgaaatgcttgggtcagaagtgtttttggatgttggattttttcagactttggaatatttgcatatatttaatatctttgggatcagacccaaatctaaacacagaaatcatttatgtttcctatacacc

SEQ ID NO: 6252 - protein, 504 aa, Homo sapiens
MKSLSLLLAVALGLATAVSAGPAVIECWFVEDASGKGLAKRPGALLLRQGPGEPPPRPDLDPELYLSVHDPAGALQAAFRRYPRGAPAPHCEMSRFVPLPASAKWASGLTPAQNCPRALDGAWLMVSISSPVLSLSSLLRPQPEPQQEPVLITMATVVLTVLTHTPAPRVRLGQDALLDLSFAYMPPTSEAASSLAPGPPPFGLEWRRQHLGKGHLLLAATPGLNGQMPAAQEGAVAFAAWDDDEPWGPWTGNGTFWLPTVQPFQEGTYLATIHLPYLQGQVTLELAVYKPPKVSLMPATLARAAPGEAPPELLCLVSHFYPSGGLEVEWELRGGPGGRSQKAEGQRWLSALRHHSDGSVSLSGHLQPPPVTTEQHGARYACRIHHPSLPASGRSAEVTLEVAGLSGPSLEDSVGLFLSAFLLLGLFKALGWAAVYLSTCKDSKKVQCSTSLYLSLVTLSPHPISKPMEGGCWCGRQNLGLEFTLIWVKTWHYILTVGLFEHAT

SEQ ID NO: 6253 - DNA, 2745 bp, Homo sapiens
ggggacgcggcacagatagggggaagccggagtaatggttttcgggcaagtggatgttggagagcacacacaggagttggggggcgggggagggcctggggttggggagggctcgaactcggggctgctgggtagtccaggagggcgcggtaaggctggggtgtcctggtgagaactggagaggatctacccgggtccctgcctggccagtggggaaacaccggtcccccaggcaccttcacctaaccagagcggggatttccaccgcccctcatgccgccctttggaggaaagtgaaagtgaaaggaggaagaggaggcttcatggctgaggaggtcgcagcgccatgaagtccctgtctctgctcctcgctgtggctttgggcctggcgaccgccgtctcagcaggacccgcggtgatcgagtgttggttcgtggaggatgcgagcggaaagggcctggccaagagacccggtgcactgctgttgcgccagggaccgggggaaccgccgccccggccggacctcgaccctgagctctatctcagtgtacacgaccccgcgggcgccctccaggctgccttcaggcggtatccccggggcgcccccgcaccacactgcgagatgagccgcttcgtgcctctccccgcctctgcgaaatgggccagcggcctgacccccgcgcagaactgcccgcgggccctggatggggcttggctgatggtcagcatatccagcccagtcctcagcctctccagcctcttgcgaccacagccagagcctcagcaggagcctgttctcatcaccatggcaacagtggtactgactgtcctcacccacacccctgcccctcgagtgagactgggacaagatgctctgctggacttgagctttgcctacatgccccccacctccgaggccgcctcatctctggctccgggtccccctccctttgggctagagtggcgacgccagcacctgggtaagggacatctgctcctggctgcaactcctgggctgaatggccagatgccagcagcccaagaaggggccgtggcatttgctgcttgggatgatgatgagccatggggcccatggaccggaaatgggaccttctggctgcctacagttcaaccctttcaggagggcacctatctggccaccatacacctgccatacctgcaaggacaggtcaccctggagcttgctgtgtacagtgagttgggggacagaggtctccaggggtagagggtgggcactggattgtggggaccgtaatagggggagggatgatggataagagggtgcctgggcaagtaagtagagatagaaagaggttcctgggagttagaggggtaatgggaggctagaagtttcctggaaatttgaggggctttgacatgggtatttctgtgacgcaccaatggagagacagtgggttccctatttcaggagaagaaacctaaccttctttagttctgaggaagccagcaggcaaactgagggtctcttagggaggacagtatggactgatttccctatgctcatttcgtcctctttccccagaaccccccaaagtgtccctgatgccagcaacccttgcacgggccgccccaggggaggcacccccggaattgctctgccttgtgtcccacttctacccttctgggggcctggaggtggagtgggaactccggggtggcccagggggccgctctcagaaggccgaggggcagaggtggctctcggccctgcgccaccattccgatggctctgtcagcctctctgggcacttgcagccgcccccagtcaccactgagcagcatggggcacgctatgcctgtcgaattcaccatcccagcctgcctgcctcggggcgcagcgctgaggtcaccctggaggtagcaggtaagagctgggagctctgcggaatctgagccagcacccaggaagacaggagctcactctcaccccttctgcctgccaggtctttcagggccctcccttgaggacagcgtaggccttttcctgtctgcctttcttctgcttgggctcttcaaggcactgggctgggctggtaagtgtcagccctaccctgaccatgacctgaggttggtggactttccccacctactcccaagagcctgacacccatccctctgccctccacctctaccactccagcatcccatcccttctcaatctttccccacagctgtctacctgtccacctgcaaggattcaaagaaggtacagtgctccacctctctgtatctttcccttgtcactttatctcctcatcctatctcaaaacccatggagggaggctgctggtgtggtaggcagaacctaggcttggaattcacactgatctgggttaaaacctggcactatatcctaactgtaggactctttgagcatgctacttaatctatatgtttccttgggtgtagggattttaaaaagttacttaggcagtgctgtccaatagaaagataatgcaagccacatatgtaaatttaaatactctagtactcacattaaaaaaataagcagaaacaggtaaaattaacttaataatataccttatttaatctaataattctggtcccttatctgaaatgcttgggtcagaagtgtttttggatgttggattttttcagactttggaatatttgcatatatttaatatctttgggatcagacccaaatctaaacacagaaatcatttatgtttcctatacacc

SEQ ID NO: 6254 - protein, 299 aa, Homo sapiens; identical to SEQ ID NO: 764

SEQ ID NO: 6255 - DNA, 1995 bp, Homo sapiens
ggggacgcggcacagatagggggaagccggagtaatggttttcgggcaagtggatgttggagagcacacacaggagttggggggcgggggagggcctggggttggggagggctcgaactcggggctgctgggtagtccaggagggcgcggtaaggctggggtgtcctggtgagaactggagaggatctacccgggtccctgcctggccagtggggaaacaccggtcccccaggcaccttcacctaaccagagcggggatttccaccgcccctcatgccgccctttggaggaaagtgaaagtgaaaggaggaagaggaggcttcatggctgaggaggtcgcagcgccatgaagtccctgtctctgctcctcgctgtggctttgggcctggcgaccgccgtctcagcaggacccgcggtgatcgagtgttggttcgtggaggatgcgagcggaaagggcctggccaagagacccggtgcactgctgttgcgccagggaccgggggaaccgccgccccggccggacctcgaccctgagctctatctcagtgtacacgaccccgcgggcgccctccaggctgccttcaggcggtatccccggggcgcccccgcaccacactgcgagatgagccgcttcgtgcctctccccgcctctgcgaaatgggccagcggcctgacccccgcgcagaactgcccgcgggccctggatggggcttggctgatggtcagcatatccagcccagtcctcagcctctccagcctcttgcgaccacagccagagcctcagcaggagcctgttctcatcaccatggcaacagtggtactgactgtcctcacccacacccctgcccctcgagtgagactgggacaagatgctctgctggacttgagctttgcctacatgccccccacctccgaggccgcctcatctctggctccgggtccccctccctttgggctagagtggcgacgccagcacctgggtaagggacatctgctcctggctgcaactcctgggctgaatggccagatgccagcagcccaagaaggggccgtggcatttgctgcttgggatgatgatgagccatggggcccatggaccggaaatgggaccttctggctgcctacagttcaaccctttcaggagggcacctatctggccaccatacacctgccatacctgcaaggacaggtcaccctggagcttgctgtgtacaaaccccccaaagtgtccctgatgccagcaacccttgcacgggccgccccaggggaggcacccccggaattgctctgccttgtgtcccacttctacccttctgggggcctggaggtggagtgggaactccggggtggcccagggggccgctctcagaaggccgaggggcagaggtggctctcggccctgcgccaccattccgatggctctgtcagcctctctgggcacttgcagccgcccccagtcaccactgagcagcatggggcacgctatgcctgtcgaattcaccatcccagcctgcctgcctcggggcgcagcgctgaggtcaccctggaggtagcaggtctttcagggccctcccttgaggacagcgtaggccttttcctgtctgcctttcttctgcttgggctcttcaaggcactgggctgggctgctgtctacctgtccacctgcaaggattcaaagaaggtacagtgctccacctctctgtatctttcccttgtcactttatctcctcatcctatctcaaaacccatggagggaggctgctggtgtggtaggcagaacctaggcttggaattcacactgatctgggttaaaacctggcactatatcctaactgtaggactctttgagcatgctacttaatctatatgtttccttgggtgtagggattttaaaaagttacttaggcagtgctgtccaatagaaagataatgcaagccacatatgtaaatttaaatactctagtactcacattaaaaaaataagcagaaacaggt

SEQ ID NO: 6256 - protein, 504 aa, Homo sapiens; identical to SEQ ID NO: 6252

SEQ ID NO: 6257 - DNA, 2562 bp, Homo sapiens
ggggacgcggcacagatagggggaagccggagtaatggttttcgggcaagtggatgttggagagcacacacaggagttggggggcgggggagggcctggggttggggagggctcgaactcggggctgctgggtagtccaggagggcgcggtaaggctggggtgtcctggtgagaactggagaggatctacccgggtccctgcctggccagtggggaaacaccggtcccccaggcaccttcacctaaccagagcggggatttccaccgcccctcatgccgccctttggaggaaagtgaaagtgaaaggaggaagaggaggcttcatggctgaggaggtcgcagcgccatgaagtccctgtctctgctcctcgctgtggctttgggcctggcgaccgccgtctcagcaggacccgcggtgatcgagtgttggttcgtggaggatgcgagcggaaagggcctggccaagagacccggtgcactgctgttgcgccagggaccgggggaaccgccgccccggccggacctcgaccctgagctctatctcagtgtacacgaccccgcgggcgccctccaggctgccttcaggcggtatccccggggcgcccccgcaccacactgcgagatgagccgcttcgtgcctctccccgcctctgcgaaatgggccagcggcctgacccccgcgcagaactgcccgcgggccctggatggggcttggctgatggtcagcatatccagcccagtcctcagcctctccagcctcttgcgaccacagccagagcctcagcaggagcctgttctcatcaccatggcaacagtggtactgactgtcctcacccacacccctgcccctcgagtgagactgggacaagatgctctgctggacttgagctttgcctacatgccccccacctccgaggccgcctcatctctggctccgggtccccctccctttgggctagagtggcgacgccagcacctgggtaagggacatctgctcctggctgcaactcctgggctgaatggccagatgccagcagcccaagaaggggccgtggcatttgctgcttgggatgatgatgagccatggggcccatggaccggaaatgggaccttctggctgcctacagttcaaccctttcaggagggcacctatctggccaccatacacctgccatacctgcaaggacaggtcaccctggagcttgctgtgtacagtgagttgggggacagaggtctccaggggtagagggtgggcactggattgtggggaccgtaatagggggagggatgatggataagagggtgcctgggcaagtaagtagagatagaaagaggttcctgggagttagaggggtaatgggaggctagaagtttcctggaaatttgaggggctttgacatgggtatttctgtgacgcaccaatggagagacagtgggttccctatttcaggagaagaaacctaaccttctttagttctgaggaagccagcaggcaaactgagggtctcttagggaggacagtatggactgatttccctatgctcatttcgtcctctttccccagaaccccccaaagtgtccctgatgccagcaacccttgcacgggccgccccaggggaggcacccccggaattgctctgccttgtgtcccacttctacccttctgggggcctggaggtggagtgggaactccggggtggcccagggggccgctctcagaaggccgaggggcagaggtggctctcggccctgcgccaccattccgatggctctgtcagcctctctgggcacttgcagccgcccccagtcaccactgagcagcatggggcacgctatgcctgtcgaattcaccatcccagcctgcctgcctcggggcgcagcgctgaggtcaccctggaggtagcaggtaagagctgggagctctgcggaatctgagccagcacccaggaagacaggagctcactctcaccccttctgcctgccaggtctttcagggccctcccttgaggacagcgtaggccttttcctgtctgcctttcttctgcttgggctcttcaaggcactgggctgggctggtaagtgtcagccctaccctgaccatgacctgaggttggtggactttccccacctactcccaagagcctgacacccatccctctgccctccacctctaccactccagcatcccatcccttctcaatctttccccacagctgtctacctgtccacctgcaaggattcaaagaaggtacagtgctccacctctctgtatctttcccttgtcactttatctcctcatcctatctcaaaacccatggagggaggctgctggtgtggtaggcagaacctaggcttggaattcacactgatctgggttaaaacctggcactatatcctaactgtaggactctttgagcatgctacttaatctatatgtttccttgggtgtagggattttaaaaagttacttaggcagtgctgtccaatagaaagataatgcaagccacatatgtaaatttaaatactctagtactcacattaaaaaaataagcagaaacaggt

SEQ ID NO: 6258 - protein, 299 aa, Homo sapiens; identical to SEQ ID NO: 764

SEQ ID NO: 6259 - DNA, 8482 bp, Homo sapiens
ggggcggtggcgcagagaggggtgcggagcgggcggaagaggcgtctgtgtcgcagcttggtctcagaggagcatcgctgggaacaacgactatcgtctattccacaagatgagtaacagccaccctcttcgcccctttactgcagtgggggaaattgatcatgtgcacattttgtctgaacatattggtgccttgttgattggggaagaatatggcgacgtcacattcgtggtggaaaagaaacgttttcctgcccacagggtaattttagcagccaggtgccaatattttcgagcattattatatggtggaatgcgagagtctcagcctgaagcagaaattcctctccaagacaccactgcagaagcattcacaatgctactcaaatatatctacactgggcgggcaacgctgacagatgagaaggaggaggtgctgctggactttttgagcctggctcataaatatggatttccagagctagaggattctacctctgagtatctctgcaccatacttaacattcagaatgtctgcatgacttttgatgttgccagtctctactcacttcccaagttaacttgtatgtgctgcatgtttatggataggaatgctcaggaagtcctctcaagtgaaggtttcctctccctttctaagacagcacttttaaacatcgtgttaagagactcatttgcagctcccgaaaaagatattttcctagccttattaaactggtgtaagcacaattcaaaggagaatcatgctgaaatcatgcaggctgtgcgtttacctctcatgagcctcacagagcttctgaatgttgtgaggccttcaggactgctgtctcctgatgccatcctggatgccattaaagtgcgatctgagagccgggatatggacctcaattatagaggcatgctcataccagaagaaaacattgcaactatgaagtatggagcccaagttgtaaagggggagctgaaatcagccttattagatggtgatactcaaaattatgatttggatcatggattttcaaggcacccaattgatgatgactgccgttccggcatcgagattaagctaggtcagccatccattatcaatcacatacggatactcttgtgggaccgagatagccggtcttactcatacttcattgaagtgtcaatggatgaacttgattgggtcagagtgatagatcattcacaatatctgtgtcgttcttggcagaaattatattttccagcccgtgtctgcaggtatattcgaattgttgggactcacaacacagtgaacaagatttttcacattgtggcttttgaatgtatgtttacaaacaaaaccttcactcttgagaaggggctgatagttcccatggagaatgttgcaacaattgctgattgtgccagtgtgattgaaggagtcagtcggagccgaaatgccttgctgaatggggacactaagaattatgactgggattctggctacacatgtcaccagctaggaagtggtgcgattgtggttcagttggcacaaccgtacatgattgggtcaatacggttactactttgggattgtgatgatcgaagctatagctactacgttgaggtttctaccaaccagcaacagtggaccatggttgctgacagaactaaagtctcctgcaagtcctggcagtcagtaacttttgaaaggcagcctgcctccttcatccgtatcgttgggacacacaacacagcaaatgaggtgttccactgtgtccactttgagtgtccagagcagcagagcagccagaaggaggaaaatagtgaggaatcggggacaggggacaccagcctggccggtcagcagctcgactcccatgcgctgcgggcgcctagtggcagctcactaccctccagcccaggctccaactcacgctcccccaaccggcagcaccaataaaggaggcagcgggcctggtgtgacttggtgggctcgggcaacggcaggaaacggtctcctccctgagcaggggtctctgttgactgcccccacctctgcccctttccagggaggagccgacctagctgcaaaagcagacaccgaacaggttttctcccaaggacagaaaggggctgctttgttcttctcaatttatccaaatcaggcaggtctcaagggggagaaaatgggtcttcaatcttcatcaagtccaccattaacaccctacctctctaatctagcccaggcgcagggaacaggaggaagtcatagacaggcctgtgttggaatacaaaaatggcacgcaaacactcaggcggaggagaaagccattgggcctttgctacctggaggcaccctttaggaatgggcctccatagagtgttcattctgctggaatacattgccctggcaactaaatgattttttatttgttttagttattctccactcagtgaatcataggtgttccggatctatttgaaatgctcaaacagcaaatcactagttttaatcccttttgatgctataattttccttccttggttttgaacggttcagcttgcggggacagagacccatcgtgcatgtctcctaaatgagacacggatgcagctcatcctggcacttgggccacagaggaagtgccacaaatgcacacaagcaaatcaacctgtggacactggagttaatagtcactcgtgtggctgagttactcacctgtcattcctgacatggatccagcctttaagcttgggaggctgacaaggaaatagttactatgcccgctgctaattcactgttccgaagtccatgtagataaacatataccgagttctggcgtggccaaacctgccggggactgccgtggcttagctgcccctccagttgtgtttatcgaagcattggagaggcagccacctgcccatcagcgtcaggaacgcagaactgggactccgtgcttcccccacaccacagtactcaactggggactgaaaaatagcagttccaagaagcttttctcctaatcctcatcaaaaggacctcatttgacgatggtggcttgatgtggctccgtctcctacttagtgatttccattccagtgctgcctgccctgggtaactgcgcacaacattgcctgcccctccgctgtccccagagctccggcctctgtcgccatcagcatcagcctgggagtctccccaggacggcatggcacgtgagcagcactgcagtccttgggtcttcggcgccaacctgcaaccctgatcaaaggagggtgagggcgtgggagtttcctttcaggtgtgtcaaagacatatcagctgcgctctagaaagagccaacgggtcagccgcttcctcctagtttaacttgattttgagtgatttgtccatatggaaatagtagggtagcatcaaactgcgtgattaaattggaagactgtctttccgtgtgaacacaggatggcagacatcagagggctaccggggcagggtggacacgttcctgaggagaagccagggtctgcagctctccatcctccccggtagctccagctgcagggctgagctgcttcctatcccctcagctctgatctctgccacttccctgttgtgtgggagagtggaacactcctgggatgccaggcatttcataatgggaggaggctcctgtaaggaacggtgggcgcccgctcacagtggggggccctccagcatggttgctgactctgtcagcccccagccccgggttgccaattagccagagagctcctgcacacacagcacttccttccccagtgtgttttctacccagatggggacaaaggagccagacagtcatatcaagggcagagttcaaacattttgaaatgagccattcacatgcttctttttaaacatgggcatcacctgcccagaggcccttggcctgaagcagcatgctgctgaccttgggaagagagggtgggctggtgggggtgctggaggagctgcccggccctgcatctgcaaccctccagtcccctgcccacagagcacgcagagccctcctgtgctccgggaacgagatagcagcttggcagctcggcctcgcatctgaaaaggaatacgctgcaaagcctcggccctagacccacatctgcagctccctggcctgtggcggttctttccttcggggcatgcccttccagatctctgtccctcctgtcttctagcactttaaagatgccccttatcatcagataaagagaagtatggggacgatggggtggcactaacagtagatgtcattggtgaggactgatggcaaagtctcattccctcacagccgcgctgccagctcgcctccccctcgctttgctgggagcctgccctggactccaaaaggacacgggttcacctcctttcccaggctggaggggtactgcccttccctgaggggccttctgactggggcaggaactcttttcgtgtgtccagctgggcctggaggccaagtcaaggtgtgtcacaccacacaccagggcaaggacctcatctccagggaacagggacaagtgagtggctaccagaaagtccccgggcagcctggagttccccagagcctggctggtcctacagagcacttctcccctgggccaccaggaccaaagcgacctaaacacttgaagctaaaagcaagtgctgatgatgggatgggctggcacgtggctgggagggctcctgggcaccacagagccctcagcccagcagagagtggaggctcagtccgtggggagcgggggttgtgaaggagacatggccaagcccctggtcggggagataagctcccccatgcccaggccagccccaggggcaacaagccaacatggagagaggtggcaggtgaggctgacaggtgggtgcctgtggcctgggcccatgagggcaatggtcctcagtaaccaatggaaaggacacaagggcgccatggtcaccaccacccaggcaaagaaatgggaggtggccagcacccccacccttcacttttcattattattattattattattattattattttttttttttttttttttttttttttttttttttgagagtagaaaggcaacttcattggagcttttggggaaaaaagccttcaaagtcaccttctggcagctctggggagggtcatttggggtggactgagagtgtagggcaggtagggtgtgtgctgggcagcagctgtgtccatgcagccagcacccagcagggcagtctcacaggagccgttgtgagcactttggacttgaagcagctatgaaccaccccccgcccccaccgtctctccctctcacacacacacacacacacacacacacacacacacacacacacacacacccgttttaccattttctcagtgctttttctgctttcattcctttgattttagttagaagcacaagccatgatggatgtgggactcttctcaattgctctttaaattgtcactttttaaatcctattaaatgaagtgtcgattcctgacaaatacattaaaagtgttttattcctagaagagttgggaaaagaaattattttcagcaagagtaggatgtttgttaaactgattccttggcaaaaaagagaaaaaaagcttttgaattgtgcaaaaaattgcccagtattatgctgtcgccccagttgtcaaactgctgtgcagatggctccagcccagtcaacttcaccttctttttaatttagaagataacaaaattgtaatcacttatcctttccagagccaagggggaaaaggaaggtataatctacaataaaaagcgagcgttctgtgtactgaggccacttggtgataaagagatggagcgctcccctcacagacttcaattaagaacctccctttggacagggaagaaaggtgtcaaagaggaaaagaaaattaaatttgcttccttccaggagtttttcctcattagtgcttgcttgtcggtgttattattttaatcttaccttctatgtggtgaccagctcctccgagcgatgcccaggtcgggcacggcccgggcagggcaggtctgcagcgatgccgtggcagaggtgggcatactccatttgttttggcagctgcagccattgattctgcatatttttcctgacaacagccccggcaggagttcagttaggaatttaaagtgcagttcatggttctgtgccaccgtggcttttattattataatattaaattagaagttgtcctagtgcctggtgtttgctcagagtttccagaagagagggaagggcaaggtttaaatggcatgcaggacaactggaatgcccccatctctctcgctgacacggatccagtcatacctggggctggacgggatttggaggccctggtcatttgcagagtgaatggtgaagggcgcggaaaaggtttgcttggaggaaagaccggttgcagaggcgaggcggagggaggaggggcggaggcagcaggtctttgtttgtggtaggtctctggcttccatcagggaggaggaaagaggctgtgcccttcctggctcttggctgcaccactgaggacgctccgagggacagcgtgctcacccatcctttgcacagtgctggccccaagccccacggccttccagctaggattttctgctgggctcatgcagaggcaggggacaggtgcatggaagagccgccccacccgacacaccattgtttgaaaatcactgttctctttactcacttaaaaaagtgtacagggaacacctgttcctggcataatgctccaacctcgcggaaggggccaggtgcccttcatctggctctggctgcttccgacctgggcccacgtcatcgttcacgtcctctgtgaccaccactggtcacggtgctccctggcccagcctccaacccacccagcaccctggcatctcccaggccagtctgctgcacccagcgagcttccagtcagaagccaggctgaacggccctcctgccccatcagcttcgtgtcttcttttttttaaagaactgaaatagtccccaagaggcctcatggcctgaagactcacaatcatccacctgtaatttatgataaatgtctgggagcatttaccatttgcgtccgtgagtatttatagccctgaatgggcgggggggagggggggtggaggaggccctgcagccaggagctacacacctgtccccactagtgtcccctggttgacagagccccctcagcctccccaaggctgtcactgcggctgtgacagctgaggagtgccgcctttgaaagccagtggacagtcgctccactagggggagaggccctggccctggcgcagaggaggcgttgcgaggcgggacgggggctggaggggctgagcagccttcagggcagggactgggccctgggtcactggagacgttgatattagtccgtctgctgccaaattgctccccaccacatgagccccaggggtttatgtcccaggaaggcgagggtgcccatctgagcggaattgggaggggacggcaccagctcatctccctcagggcctttgcctcctggtgctgccctggtggctgctcctgcaccacagcccctgatggctgctgctagtcctgagttgctgggtttacccccagcccacacttcccacctgggcctgagggtgcggccagtgccctagtcctagccactacaggagtcattctgagacctgctggaggccatggggtcttcccaggcccctcaatcagctgcttccagggtcagcagggcagggtgctgccagtaaggtcctcagggagcacagcccggccgcccaggctgggggatactggggcagagcttccaggtctgtggggcctgatctctccccaaggctctccaggccttggtgcgccctccacagtgaccttcagagaggctgcaccccctcagaagaacagtgagaaatctctccatcacacgctccctggtccttatgtccctgaggccacccttccccaccccccagtgcctggagaagcgtgagactctggaggggcgccaggaggccaggggtcctcagggctaggcctggagctcggcccaagagctgcttttgcgaagcctgtcttgaatccggattcaccagagaacaagagcctcccagcctttggcgtttctgggcctgtaaagatgtgtgtacctcccaggccactctgatgcaagggcagggaccatgccaggcctgggttgggaatggctctgtgactccagaagctccgtctaaaactccaaagatgcccaaaaggctgtgctgctatgtggaatgtgtattatttgtgagcacgatgcggcttcttcctcattttgcagagcaacctaagcgggcagatgtacaaaccgtgtgttcgaaacccctgagtccatgtgtgtgaaaatgcaggttttctcttagaaataaagtggtgacttgtgctgta

SEQ ID NO: 6260 - protein, 612 aa, Homo sapiens
MSNSHPLRPFTAVGEIDHVHILSEHIGALLIGEEYGDVTFVVEKKRFPAHRVILAARCQYFRALLYGGMRESQPEAEIPLQDTTAEAFTMLLKYIYTGRATLTDEKEEVLLDFLSLAHKYGFPELEDSTSEYLCTILNIQNVCMTFDVASLYSLPKLTCMCCMFMDRNAQEVLSSEGFLSLSKTALLNIVLRDSFAAPEKDIFLALLNWCKHNSKENHAEIMQAVRLPLMSLTELLNVVRPSGLLSPDAILDAIKVRSESRDMDLNYRGMLIPEENIATMKYGAQVVKGELKSALLDGDTQNYDLDHGFSRHPIDDDCRSGIEIKLGQPSIINHIRILLWDRDSRSYSYFIEVSMDELDWVRVIDHSQYLCRSWQKLYFPARVCRYIRIVGTHNTVNKIFHIVAFECMFTNKTFTLEKGLIVPMENVATIADCASVIEGVSRSRNALLNGDTKNYDWDSGYTCHQLGSGAIVVQLAQPYMIGSIRLLLWDCDDRSYSYYVEVSTNQQQWTMVADRTKVSCKSWQSVTFERQPASFIRIVGTHNTANEVFHCVHFECPEQQSSQKEENSEESGTGDTSLAGQQLDSHALRAPSGSSLPSSPGSNSRSPNRQHQ

SEQ ID NO: 6261 - DNA, 5948 bp, Homo sapiens
gctcgtctcaatttggccctgctgtatttcaagtgctcggtagccacatgtggcaagtggccatcactgtggccattgcagctccaaagggacaggagagttgatggaaattagacactgcattctacagcctcatgagcccaagagagcaaaccttggtttgctgaaaatcagcagataaggcaattgaaagggaagaagaacaacgactatcgtctattccacaagatgagtaacagccaccctcttcgcccctttactgcagtgggggaaattgatcatgtgcacattttgtctgaacatattggtgccttgttgattggggaagaatatggcgacgtcacattcgtggtggaaaagaaacgttttcctgcccacagggtaattttagcagccaggtgccaatattttcgagcattattatatggtggaatgcgagagtctcagcctgaagcagaaattcctctccaagacaccactgcagaagcattcacaatgctactcaaatatatctacactgggcgggcaacgctgacagatgagaaggaggaggtgctgctggactttttgagcctggctcataaatatggatttccagagctagaggattctacctctgagtatctctgcaccatacttaacattcagaatgtctgcatgacttttgatgttgccagtctctactcacttcccaagttaacttgtatgtgctgcatgtttatggataggaatgctcaggaagtcctctcaagtgaaggtttcctctccctttctaagacagcacttttaaacatcgtgttaagagactcatttgcagctcccgaaaaagatattttcctagccttattaaactggtgtaagcacaattcaaaggagaatcatgctgaaatcatgcaggctgtgcgtttacctctcatgagcctcacagagcttctgaatgttgtgaggccttcaggactgctgtctcctgatgccatcctggatgccattaaagtgcgatctgagagccgggatatggacctcaattatagaggcatgctcataccagaagaaaacattgcaactatgaagtatggagcccaagttgtaaagggggagctgaaatcagccttattagatggtgatactcaaaattatgatttggatcatggattttcaaggcacccaattgatgatgactgccgttccggcatcgagattaagctaggtcagccatccattatcaatcacatacggatactcttgtgggaccgagatagccggtcttactcatacttcattgaagtgtcaatggatgaacttgattgggtcagagtgatagatcattcacaatatctgtgtcgttcttggcagaaattatattttccagcccgtgtctgcaggtatattcgaattgttgggactcacaacacagtgaacaagatttttcacattgtggcttttgaatgtatgtttacaaacaaaaccttcactcttgagaaggggctgatagttcccatggagaatgttgcaacaattgctgattgtgccagtgtgattgaaggagtcagtcggagccgaaatgccttgctgaatggggacactaagaattatgactgggattctggctacacatgtcaccagctaggaagtggtgcgattgtggttcagttggcacaaccgtacatgattgggtcaatacggttactactttgggattgtgatgatcgaagctatagctactacgttgaggtttctaccaaccagcaacagtggaccatggttgctgacagaactaaagtctcctgcaagtcctggcagtcagtaacttttgaaaggcagcctgcctccttcatccgtatcgttgggacacacaacacagcaaatgaggtgttccactgtgtccactttgagtgtccagagcagcagagcagccagaaggaggaaaatagtgaggaatcggggacaggggacaccagcctggccggtcagcagctcgactcccatgcgctgcgggcgcctagtggcagctcactaccctccagcccaggctccaactcacgctcccccaaccggcagcaccaataaaggaggcagcgggcctggtgtgacttggtgggctcgggcaacggcaggaaacggtctcctccctgagcaggggtctctgttgactgcccccacctctgcccctttccagggaggagccgacctagctgcaaaagcagacaccgaacaggttttctcccaaggacagaaaggggctgctttgttcttctcaatttatccaaatcaggcaggtctcaagggggagaaaatgggtcttcaatcttcatcaagtccaccattaacaccctacctctctaatctagcccaggcgcagggaacaggaggaagtcatagacaggcctgtgttggaatacaaaaatggcacgcaaacactcaggcggaggagaaagccattgggcctttgctacctggaggcaccctttaggaatgggcctccatagagtgttcattctgctggaatacattgccctggcaactaaatgattttttatttgttttagttattctccactcagtgaatcataggtgttccggatctatttgaaatgctcaaacagcaaatcactagttttaatcccttttgatgctataattttccttccttggttttgaacggttcagcttgcggggacagagacccatcgtgcatgtctcctaaatgagacacggatgcagctcatcctggcacttgggccacagaggaagtgccacaaatgcacacaagcaaatcaacctgtggacactggagttaatagtcactcgtgtggctgagttactcacctgtcattcctgacatggatccagcctttaagcttgggaggctgacaaggaaatagttactatgcccgctgctaattcactgttccgaagtccatgtagataaacatataccgagttctggcgtggccaaacctgccggggactgccgtggcttagctgcccctccagttgtgtttatcgaagcattggagaggcagccacctgcccatcagcgtcaggaacgcagaactgggactccgtgcttcccccacaccacagtactcaactggggactgaaaaatagcagttccaagaagcttttctcctaatcctcatcaaaaggacctcatttgacgatggtggcttgatgtggctccgtctcctacttagtgatttccattccagtgctgcctgccctgggtaactgcgcacaacattgcctgcccctccgctgtccccagagctccggcctctgtcgccatcagcatcagcctgggagtctccccaggacggcatggcacgtgagcagcactgcagtccttgggtcttcggcgccaacctgcaaccctgatcaaaggagggtgagggcgtgggagtttcctttcaggtgtgtcaaagacatatcagctgcgctctagaaagagccaacgggtcagccgcttcctcctagtttaacttgattttgagtgatttgtccatatggaaatagtagggtactccagctgcagggctgagctgcttcctatcccctcagctctgatctctgccacttccctgttgtgtgggagagtggaacactcctgggatgccaggcatttcataatgggaggaggctcctgtaaggaacggtgggcgcccgctcacagtggggggccctccagcatggttgctgactctgtcagcccccagccccgggttgccaattagccagagagctcctgcacacacagcacttccttccccagtgtgttttctacccagatggggacaaaggagccagacagtcatatcaagggcagagttcaaacattttgaaatgagccattcacatgcttctttttaaacatgggcatcacctgcccagaggcccttggcctgaagcagcatgctgctgaccttgggaagagagggtgggctggtgggggtgctggaggagctgcccggccctgcatctgcaaccctccagtcccctgcccacagagcacgcagagccctcctgtgctccgggaacgagatagcagcttggcagctcggcctcgcatctgaaaaggaatacgctgcaaagcctcggccctagacccacatctgcagctccctggcctgtggcggttctttccttcggggcatgcccttccagatctctgtccctcctgtcttctagcactttaaagatgccccttatcatcagataaagagaagtatggggacgatggggtggcactaacagtagatgtcattggtgaggactgatggcaaagtctcattccctcacagccgcgctgccagctcgcctccccctcgctttgctgggagcctgccctggactccaaaaggacacgggttcacctcctttcccaggctggaggggtactgcccttccctgaggggccttctgactggggcaggaactcttttcgtgtgtccagctgggcctggaggccaagtcaaggtgtgtcacaccacacaccagggcaaggacctcatctccagggaacagggacaagtgagtggctaccagaaagtccccgggcagcctggagttccccagagcctggctggtcctacagagcacttctcccctgggccaccaggaccaaagcgacctaaacacttgaagctaaaagcaagtgctgatgatgggatgggctggcacgtggctgggagggctcctgggcaccacagagccctcagcccagcagagagtggaggctcagtccgtggggagcgggggttgtgaaggagacatggccaagcccctggtcggggagataagctcccccatgcccaggccagccccaggggcaacaagccaacatggagagaggtggcaggtgaggctgacaggtgggtgcctgtggcctgggcccatgagggcaatggtcctcagtaaccaatggaaaggacacaagggcgccatggtcaccaccacccaggcaaagaaatgggaggtggccagcacccccacccttcacttttcattattattattattattattattattattttttttttttttttttttttttttttttttttttgagagtagaaaggcaacttcattggagcttttggggaaaaaagccttcaaagtcaccttctggcagctctggggagggtcatttggggtggactgagagtgtagggcaggtagggtgtgtgctgggcagcagctgtgtccatgcagccagcacccagcagggcagtctcacaggagccgttgtgagcactttggacttgaagcagctatgaaccaccccccgcccccaccgtctctccctctcacacacacacacacacacacacacacacacacacacacacacacacacccgttttaccattttctcagtgctttttctgctttcattcctttgattttagttagaagcacaagccatgatggatgtgggactcttctcaattgctctttaaattgtcactttttaaatcctattaaatgaagtgtcgattcctgacaaatacattaaaagtgttttattcctagaagagttgggaaaagaaattattttcagcaagagtaggatgtttgttaaactgattccttggcaaaaaagagaaaaaaagcttttgaattgtgcaaaaaattgcccagtattatgctgtcgccccagttgtcaaactgctgtgcagatggctccagcccagtcaacttcaccttctttttaatttagaagataacaaaattgtaatcacttatcctttccagagccaagggggaaaaggaaggtataatctacaataaaaagcgagcgttctgtgtactgaggccacttggtgataaagagatggagcgctcccctcacagacttcaattaagaacctccctttggacagggaagaaaggtgtcaaagaggaaaagaaaattaaatttgcttccttccaggagtttttcctcatt

SEQ ID NO: 6262 - protein, 612 aa, Homo sapiens; identical to SEQ ID NO: 6260

SEQ ID NO: 6263 - DNA, 2414 bp, Homo sapiens
agataaggaattgtataggaggaaacttcatagtaaacattgaacctctgtgcttgtctccttgttgaagttgggggttcatgtttattgttccaagggagcctcatcaaaaccacttttaaagcattgagaatccaaataaataccatggatcatacaggattggggataagtcttgaggtctccccgagaaggagaagttctttaatttggtaattttagggtaatggttggatgctctctggattaatggaaaccttcaggggtacttttaggcagagtataacccagtgaagagagcattattatatggtggaatgcgagagtctcagcctgaagcagaaattcctctccaagacaccactgcagaagcattcacaatgctactcaaatatatctacactgggcgggcaacgctgacagatgagaaggaggaggtgctgctggactttttgagcctggctcataaatatggatttccagagctagaggattctacctctgagtatctctgcaccatacttaacattcagaatgtctgcatgacttttgatgttgccagtctctactcacttcccaagttaacttgtatgtgctgcatgtttatggataggaatgctcaggaagtcctctcaagtgaaggtttcctctccctttctaagacagcacttttaaacatcgtgttaagagactcatttgcagctcccgaaaaagatattttcctagccttattaaactggtgtaagcacaattcaaaggagaatcatgctgaaatcatgcaggctgtgcgtttacctctcatgagcctcacagagcttctgaatgttgtgaggccttcaggactgctgtctcctgatgccatcctggatgccattaaagtgcgatctgagagccgggatatggacctcaattatagaggcatgctcataccagaagaaaacattgcaactatgaagtatggagcccaagttgtaaagggggagctgaaatcagccttattagatggtgatactcaaaattatgatttggatcatggattttcaaggcacccaattgatgatgactgccgttccggcatcgagattaagctaggtcagccatccattatcaatcacatacggatactcttgtgggaccgagatagccggtcttactcatacttcattgaagtgtcaatggatgaacttgattgggtcagagtgatagatcattcacaatatctgtgtcgttcttggcagaaattatattttccagcccgtgtctgcaggtatattcgaattgttgggactcacaacacagtgaacaagatttttcacattgtggcttttgaatgtatgtttacaaacaaaaccttcactcttgagaaggggctgatagttcccatggagaatgttgcaacaattgctgattgtgccagtgtgattgaaggagtcagtcggagccgaaatgccttgctgaatggggacactaagaattatgactgggattctggctacacatgtcaccagctaggaagtggtgcgattgtggttcagttggcacaaccgtacatgattgggtcaatacggttactactttgggattgtgatgatcgaagctatagctactacgttgaggtttctaccaaccagcaacagtggaccatggttgctgacagaactaaagtctcctgcaagtcctggcagtcagtaacttttgaaaggcagcctgcctccttcatccgtatcgttgggacacacaacacagcaaatgaggtgttccactgtgtccactttgagtgtccagagcagcagagcagccagaaggaggaaaatagtgaggaatcggggacaggggacaccagcctggccggtcagcagctcgactcccatgcgctgcgggcgcctagtggcagctcactaccctccagcccaggctccaactcacgctcccccaaccggcagcaccaataaaggaggcagcgggcctggtgtgacttggtgggctcgggcaacggcaggaaacggtctcctccctgagcaggggtctctgttgactgcccccacctctgcccctttccagggaggagccgacctagctgcaaaagcagacaccgaacaggttttctcccaaggacagaaaggggctgctttgttcttctcaatttatccaaatcaggcaggtctcaagggggagaaaatgggtcttcaatcttcatcaagtccaccattaacaccctacctctctaatctagcccaggcgcagggaacaggaggaagtcatagacaggcctgtgttggaatacaaaaatggcacgcaaacactcaggcggaggagaaagccattgggcctttgctacctggaggcaccctttaggaatgggcctccatagagtgttcattctgctggaatacattgccctggcaactaaatga

SEQ ID NO: 6264 - protein, 544 aa, Homo sapiens
MRESQPEAEIPLQDTTAEAFTMLLKYIYTGRATLTDEKEEVLLDFLSLAHKYGFPELEDSTSEYLCTILNIQNVCMTFDVASLYSLPKLTCMCCMFMDRNAQEVLSSEGFLSLSKTALLNIVLRDSFAAPEKDIFLALLNWCKHNSKENHAEIMQAVRLPLMSLTELLNVVRPSGLLSPDAILDAIKVRSESRDMDLNYRGMLIPEENIATMKYGAQVVKGELKSALLDGDTQNYDLDHGFSRHPIDDDCRSGIEIKLGQPSIINHIRILLWDRDSRSYSYFIEVSMDELDWVRVIDHSQYLCRSWQKLYFPARVCRYIRIVGTHNTVNKIFHIVAFECMFTNKTFTLEKGLIVPMENVATIADCASVIEGVSRSRNALLNGDTKNYDWDSGYTCHQLGSGAIVVQLAQPYMIGSIRLLLWDCDDRSYSYYVEVSTNQQQWTMVADRTKVSCKSWQSVTFERQPASFIRIVGTHNTANEVFHCVHFECPEQQSSQKEENSEESGTGDTSLAGQQLDSHALRAPSGSSLPSSPGSNSRSPNRQHQ

SEQ ID NO: 6265 - DNA, 731 bp, Homo sapiens
gatgacaggcctgtggcggtacctcaagaacgcctatgcccgtgatgagttcaccaacacctgtgcagctgacagtgagatcgagttggcctacgctgatgtcgccaaacgcctcagccgatcctgagcacagccattttgccccatccccgctgcagaaggactcaaccactcccctaagactccagcttcatagactcctctgtatcactgccttgaggcgcactttttataatcaagcctcatcttgctggtatcatgggaactccagcctgctatctttcatgaagtttcatctcctaaaaagcttacccagcctgagcttggggacctgtgcagaggaaactaagaaaaatgcactcatcaactccttctcccagtgaacgcccgagatctttctccagatgcttcagcctgtctggccttcttatcatatgtgcagcacatcatgtctcagcaacagtgtgatatagtatgaggcccacaacagttgcttatgttcataagcaataagagctaggatttcaacccaaagactgccatcaagtctcacagctttctttttgttgaaaaaaagggggcatggagtagaggaagaagcaagcagaagaaatggggagaagctagagaaagaagaaaaaaatgggattctttctactgaaatttctaaatgtggaactcattgtctgtactggctttgaggcagaaaaaaaaacctaagagtttaaata

SEQ ID NO: 6266 - protein, 115 aa, Homo sapiens
MPVMSSPTPVQLTVRSSWPTLMSPNASADPEHSHFAPSPLQKDSTTPLRLQLHRLLCITALRRTFYNQASSCWYHGNSSLLSFMKFHLLKSLPSLSLGTCAEETKKNALINSFSQ

SEQ ID NO: 6267 - DNA, 616 bp, Homo sapiens
gatgacaggcctgtggcggtacctcaagaacgcctatgcccgtgatgagttcaccaacacctgtgcagctgacagtgagatcgagttggcctacgctgatgtcgccaaacgcctcagccgatcctgagcacagccattttgccccatccccgctgcagaaggactcaaccactcccctaagactccagcttcatagactcctctgtatcactgccttgaggcgcactttttataatcaagcctcatcttgctggtatcatgggaactccagcctgctatctttcatgaagtttcatctcctaaaaagcttacccagcctgagcttggggacctgtgcagaggaaactaagaaaaatgcactcatcaactccttctcccagtgaacgcccgagatctttctccagatgcttcagcctgtctggccttcttatcatatgtgcagcacatcatgtctcagcaacagtgtggtgaggtccttaggtgtcccaagaacaactcagggagcacgggagggtctgcagttgggaccccacaactatacagctatagggtaggaggcttccttttcattggtcctgaatgaatacaaatcgctcagaaagcattttggtggcac

SEQ ID NO: 6268 - protein, 115 aa, Homo sapiens; identical to SEQ ID NO: 6266

SEQ ID NO: 6269 - DNA, 2759 bp, Homo sapiens
aagagctcgttgattcctctgcaaggtggtgcagcatcctctgtcccttcattcatttcagatctactcaggtctccctgtaaacagatctctcggatcaataagcatgaatgacgaagactacagcaccatctatgacacaatccaaaatgagaggacgtatgaggttccagaccagccagaagaaaatgaaagtccccattatgatgatgtccatgagtacttaaggccagaaaatgatttatatgccactcagctgaatacccatgagtatgattttgtgtcagtctataccattaagggtgaagagaccagcttggcctctgtccagtcagaagacagaggctacctcctgcctgatgagatatactctgaactccaggaggctcatccaggtgagccccaggaggacaggggcatctcaatggaagggttatattcatcaacccaggaccagcaactctgcgcagcagaactccaggagaatgggagtgtgatgaaggaagatctgccttctccttcaagcttcaccattcagcacagtaaggccttctctaccaccaagtattcctgctattctgatgctgaaggtttggaagaaaaggagggagctcacatgaaccctgagatttacctctttgtgaaggctggaatcgatggagaaagcatcggcaactgtcctttctctcagcgcctcttcatgatcctctggctgaaaggagtcgtgttcaatgtcaccactgtggatctgaaaagaaagccagctgacctgcacaacctagcccccggcacgcacccgcccttcctgaccttcaacggggacgtgaagacagacgtcaataagatcgaggagttcctggaggagaccttgacccctgaaaagtaccccaaactggctgcaaaacaccgggaatccaacacagcgggcatcgacatcttttccaagttttctgcctacatcaaaaataccaagcagcagaacaatgctgctcttgaaagaggcctaaccaaggctctaaagaaattggatgactacctgaacacccctctaccagaggagattgacgccaacacttgtggggaagacaaggggtcccggcgcaagttcctggatggggatgagctgaccctggctgactgcaatctgttgcccaagctccatgtggtcaagattgtggccaagaaataccgcaactatgatatcccggctgagatgacaggcctgtggcggtacctcaagaacgcctatgcccgtgatgagttcaccaacacctgtgcagctgacagtgagatcgagttggcctacgctgatgtcgccaaacgcctcagccgatcctgagcacagccattttgccccatccccgctgcagaaggactcaaccactcccctaagactccagcttcatagactcctctgtatcactgccttgaggcgcactttttataatcaagcctcatcttgctggtatcatgggaactccagcctgctatctttcatgaaggtcagcaccatccctggcctcctcacataggaatctagcagaaatgatagacacagtccacctttcggccggccagcctgatctgggctcagcatgtttggggtcagtcagtgttggagagcccacatatgggattgccactagcttcttctgccaatatcaaaataccttctcagatgctttagaaacatgcaacaccaactccttttctaccctcctctccgtccatacctacaaggccaaggacaaacgccatcttcatccttcttagaaagagatctattaccccattaggggagacagagagagtgaatggaggagtaccgagctggctatggacttgggtgtctggcaaacacagcttcagtctcactacttctgacactctggttattgggcactaagggccagactggaaagtcacttgagacacattctcagtttgttgcagtgccaggaatgctgcgctgctgctgctgcgcacctggcccatgctgtccctggcttccatgccgtccaggccctgccagaaaaggaaattggcatgcaattctaaactgcagtgactgggatgggaggggaggggagcagtgttgatgccaaaatacccacggggtctaccagccatggggtttgcttgcttaggagtagttgtttcagaggtgattacaggcctgggtttgactgtgcttaccaatgagtggtttttgagctatgagaaagtggatgggagtgggaggaggagagatgggtgaagacaaaagagttctttatgagcctcgatgttccctggtaaacttttaaaaaggccttctctcatgatctaagtcttggactggtggcatcatgtaactgctaaccttacagtaaaaacccaagaatgggtcaaaaatgtcttcccagtttctccaagctgcttctggaatgcaggtctgtcggctgggtgctctccagcagctgctcctgcctgattcaactgtagcctgtaatgggtaaaagccacatttaggaggtggtctgatcatagaacaccttaggaagaaagtccatgagactttctgactaggaaaccatgtggtttgaacttgaagaaaaatgtagacccatctgggttaattttcctacaatctgactcaactgccaggtgaaaaaaaaaaggaaaaatttttaagctaatatttcactcttttgtcattctccttaagtttcatctcctaaaaagcttacccagcctgagcttggggacctgtgcagagg

SEQ ID NO: 6270 - protein, 410 aa, Homo sapiens
MNDEDYSTIYDTIQNERTYEVPDQPEENESPHYDDVHEYLRPENDLYATQLNTHEYDFVSVYTIKGEETSLASVQSEDRGYLLPDEIYSELQEAHPGEPQEDRGISMEGLYSSTQDQQLCAAELQENGSVMKEDLPSPSSFTIQHSKAFSTTKYSCYSDAEGLEEKEGAHMNPEIYLFVKAGIDGESIGNCPFSQRLFMILWLKGVVFNVTTVDLKRKPADLHNLAPGTHPPFLTFNGDVKTDVNKIEEFLEETLTPEKYPKLAAKHRESNTAGIDIFSKFSAYIKNTKQQNNAALERGLTKALKKLDDYLNTPLPEEIDANTCGEDKGSRRKFLDGDELTLADCNLLPKLHVVKIVAKKYRNYDIPAEMTGLWRYLKNAYARDEFTNTCAADSEIELAYADVAKRLSRS

SEQ ID NO: 6271 - DNA, 2031 bp, Homo sapiens
gtacatgtgcaattcccggcctgggtttgaatcccagcacttctagctgcacaactttacccaagaggcttattctttctgagcctctggctctgcatctgtaaaatggactttacattcagtttctttatctggcaataagctgcctgtggaaagaaaggcttcttcttccaacagatgagtattctgcagtgtgtggggagctggcagtgtgatgaaggggacaggattctagatgagctactccactctgaagaccctatgactgtatccactggcaagaagtttgaataaaggcccttttactctttcatgccagctcttgaaagaggcctaaccaaggctctaaagaaattggatgactacctgaacacccctctaccagaggagattgacgccaacacttgtggggaagacaaggggtcccggcgcaagttcctggatggggatgagctgaccctggctgactgcaatctgttgcccaagctccatgtggtcaagacccaccttctcacttcctccagcaacttcctaagattgtggccaagaaataccgcaactatgatatcccggctgagatgacaggcctgtggcggtacctcaagaacgcctatgcccgtgatgagttcaccaacacctgtgcagctgacagtgagatcgagttggcctacgctgatgtcgccaaacgcctcagccgatcctgagcacagccattttgccccatccccgctgcagaaggactcaaccactcccctaagactccagcttcatagactcctctgtatcactgccttgaggcgcactttttataatcaagcctcatcttgctggtatcatgggaactccagcctgctatctttcatgaaggtcagcaccatccctggcctcctcacataggaatctagcagaaatgatagacacagtccacctttcggccggccagcctgatctgggctcagcatgtttggggtcagtcagtgttggagagcccacatatgggattgccactagcttcttctgccaatatcaaaataccttctcagatgctttagaaacatgcaacaccaactccttttctaccctcctctccgtccatacctacaaggccaaggacaaacgccatcttcatccttcttagaaagagatctattaccccattaggggagacagagagagtgaatggaggagtaccgagctggctatggacttgggtgtctggcaaacacagcttcagtctcactacttctgacactctggttattgggcactaagggccagactggaaagtcacttgagacacattctcagtttgttgcagtgccaggaatgctgcgctgctgctgctgcgcacctggcccatgctgtccctggcttccatgccgtccaggccctgccagaaaaggaaattggcatgcaattctaaactgcagtgactgggatgggaggggaggggagcagtgttgatgccaaaatacccacggggtctaccagccatggggtttgcttgcttaggagtagttgtttcagaggtgattacaggcctgggtttgactgtgcttaccaatgagtggtttttgagctatgagaaagtggatgggagtgggaggaggagagatgggtgaagacaaaagagttctttatgagcctcgatgttccctggtaaacttttaaaaaggccttctctcatgatctaagtcttggactggtggcatcatgtaactgctaaccttacagtaaaaacccaagaatgggtcaaaaatgtcttcccagtttctccaagctgcttctggaatgcaggtctgtcggctgggtgctctccagcagctgctcctgcctgattcaactgtagcctgtaatgggtaaaagccacatttaggaggtggtctgatcatagaacaccttaggaagaaagtccatgagactttctgactaggaaaccatgtggtttgaacttgaagaaaaatgtagacccatctgggttaattttcctacaatctgactcaactgccaggtgaaaaaaaaaaggaaaaa

SEQ ID NO: 6272 - protein, 89 aa, Homo sapiens
MPALERGLTKALKKLDDYLNTPLPEEIDANTCGEDKGSRRKFLDGDELTLADCNLLPKLHVVKTHLLTSSSNFLRLWPRNTATMISRLR

SEQ ID NO: 6273 - DNA, 2401 bp, Homo sapiens
gctgacagtcgcggatcctgtgacacctccgggcagcccggcacttgttgctcccacgacctgttgtcattcccttaacccggctttccccgtggccccccgcctcctcccggcttcgctccttttcatgtgagcatctgggacactgatctctcagaccccgctgctcgggctggagaatagatggttttgtgaaaaattaaacaccgccctgaagaggagccccgctgggcagcggcaggagcgcagagtgctggcccaggtgctgcagaggtggcgcctccccggcccgggacggtagccccgggcgccaacggcatgacagactcggcgacagctaacggggacgacagggaccccgagatcgagctctttgtgaaggctggaatcgatggagaaagcatcggcaactgtcctttctctcagcgcctcttcatgatcctctggctgaaaggagtcgtgttcaatgtcaccactgtggatctgaaaagaaagccagctgacctgcacaacctagcccccggcacgcacccgcccttcctgaccttcaacggggacgtgaagacagacgtcaataagatcgaggagttcctggaggagaccttgacccctgaaaagtaccccaaactggctgcaaaacaccgggaatccaacacagcgggcatcgacatcttttccaagttttctgcctacatcaaaaataccaagcagcagaacaatgctgctcttgaaagaggcctaaccaaggctctaaagaaattggatgactacctgaacacccctctaccagaggagattgacgccaacacttgtggggaagacaaggggtcccggcgcaagttcctggatggggatgagctgaccctggctgactgcaatctgttgcccaagctccatgtggtcaagattgtggccaagaaataccgcaactatgatatcccggctgagatgacaggcctgtggcggtacctcaagaacgcctatgcccgtgatgagttcaccaacacctgtgcagctgacagtgagatcgagttggcctacgctgatgtcgccaaacgcctcagccgatcctgagcacagccattttgccccatccccgctgcagaaggactcaaccactcccctaagactccagcttcatagactcctctgtatcactgccttgaggcgcactttttataatcaagcctcatcttgctggtatcatgggaactccagcctgctatctttcatgaaggtcagcaccatccctggcctcctcacataggaatctagcagaaatgatagacacagtccacctttcggccggccagcctgatctgggctcagcatgtttggggtcagtcagtgttggagagcccacatatgggattgccactagcttcttctgccaatatcaaaataccttctcagatgctttagaaacatgcaacaccaactccttttctaccctcctctccgtccatacctacaaggccaaggacaaacgccatcttcatccttcttagaaagagatctattaccccattaggggagacagagagagtgaatggaggagtaccgagctggctatggacttgggtgtctggcaaacacagcttcagtctcactacttctgacactctggttattgggcactaagggccagactggaaagtcacttgagacacattctcagtttgttgcagtgccaggaatgctgcgctgctgctgctgcgcacctggcccatgctgtccctggcttccatgccgtccaggccctgccagaaaaggaaattggcatgcaattctaaactgcagtgactgggatgggaggggaggggagcagtgttgatgccaaaatacccacggggtctaccagccatggggtttgcttgcttaggagtagttgtttcagaggtgattacaggcctgggtttgactgtgcttaccaatgagtggtttttgagctatgagaaagtggatgggagtgggaggaggagagatgggtgaagacaaaagagttctttatgagcctcgatgttccctggtaaacttttaaaaaggccttctctcatgatctaagtcttggactggtggcatcatgtaactgctaaccttacagtaaaaacccaagaatgggtcaaaaatgtcttcccagtttctccaagctgcttctggaatgcaggtctgtcggctgggtgctctccagcagctgctcctgcctgattcaactgtagcctgtaatgggtaaaagccacatttaggaggtggtctgatcatagaacaccttaggaagaaagtccatgagactttctgactaggaaaccatgtggtttgaacttgaagaaaaatgtagacccatctgggttaattttcctacaatctgactcaactgccaggtgaaaaaaaaaaggaaaaa

SEQ ID NO: 6274 - protein, 251 aa, Homo sapiens; identical to SEQ ID NO: 770

SEQ ID NO: 6275 - DNA, 1926 bp, Homo sapiens
gctgacagtcgcggatcctgtgacacctccgggcagcccggcacttgttgctcccacgacctgttgtcattcccttaacccggctttccccgtggccccccgcctcctcccggcttcgctccttttcatgtgagcatctgggacactgatctctcagaccccgctgctcgggctggagaatagatggttttgtgaaaaattaaacaccgccctgaagaggagccccgctgggcagcggcaggagcgcagagtgctggcccaggtgctgcagaggtggcgcctccccggcccgggacggtagccccgggcgccaacggcatgacagactcggcgacagctaacggggacgacagggaccccgagatcgagctctttgtgaaggctggaatcgatggagaaagcatcggcaactgtcctttctctcagcgcctcttcatgatcctctggctgaaaggagtcgtgttcaatgtcaccactgtggatctgaaaagaaagccagctgacctgcacaacctagcccccggcacgcacccgcccttcctgaccttcaacggggacgtgaagacagacgtcaataagatcgaggagttcctggaggagaccttgacccctgaaaagtaccccaaactggctgcaaaacaccgggaatccaacacagcgggcatcgacatcttttccaagttttctgcctacatcaaaaataccaagcagcagaacaatgctgctcttgaaagaggcctaaccaaggctctaaagaaattggatgactacctgaacacccctctaccagaggagattgacgccaacacttgtggggaagacaaggggtcccggcgcaagttcctggatggggatgagctgaccctggctgactgcaatctgttgcccaagctccatgtggtcaagattgtggccaagaaataccgcaactatgatatcccggctgagatgacaggcctgtggcggtacctcaagaacgcctatgcccgtgatgagttcaccaacacctgtgcagctgacagtgagatcgagttggcctacgctgatgtcgccaaacgcctcagccgatcctgagcacagccattttgccccatccccgctgcagaaggactcaaccactcccctaagactccagcttcatagactcctctgtatcactgccttgaggcgcactttttataatcaagcctcatcttgctggtatcatgggaactccagcctgctatctttcatgaaggtcagcaccatccctggcctcctcacataggaatctagcagaaatgatagacacagtccacctttcggccggccagcctgatctgggctcagcatgtttggggtcagtcagtgttggagagcccacatatgggattgccactagcttcttctgccaatatcaaaataccttctcagatgctttagaaacatgcaacaccaactccttttctaccctcctctccgtccatacctacaaggccaaggacaaacgccatcttcatccttcttagaaagagatctattaccccattaggggagacagagagagtgaatggaggagtaccgagctggctatggacttgggtgtctggcaaacacagcttcagtctcactacttctgacactctggttattgggcactaagggccagactggaaagtcacttgagacacattctcagtttgttgcagtgccaggaatgctgcgctgctgctgctgcgcacctggcccatgctgtccctggcttccatgccgtccaggccctgccagaaaaggaaattggcatgcaattctaaactgcagtgactgggatgggaggggaggggagcagtgttgatgccaaaatacccacggggtctaccagccatggggtttgcttgcttaggagtagttgtttcagaggtgattacaggcctgggtttgactgtg

SEQ ID NO: 6276 - protein, 251 aa, Homo sapiens; identical to SEQ ID NO: 770

SEQ ID NO: 6277 - DNA, 2002 bp, Homo sapiens
caaagtcattgccctccatgaactaacaatctacagggagctgtaaaacaagtacatgtgcaattcccggcctgggtttgaatcccagcacttctagctgcacaactttacccaagaggcttattctttctgagcctctggctctgcatctgtaaaatggactttacattcagtttctttatctggcaataaggaaaaatccaaatggatttctcactttttgaccagatgtttcattgtcacacagcccgtgtgacagcactggcccctagtacaggcagagttgaaaagtgatgtgatgggtcatggttgcccctctactcagagaaaactccttcttgacctcatcacggtcgctgaaagtactaagaattatatctgaaatcaagcactggtagcagaacacaaatatgttaccaaattagttggaagaggttaggagcttgtaaggaagaccatagcagttgaaaacaaagcaaggcacatttccattgtacgtcccaggagtagtttgaatggtttaaggaccagctatgtgtgtgcttgcataagcgtatgtgccctgggtattctgcagtgtgtggggagctggcagtgtgatgaaggggacaggattctagatgagctactccactctgaagaccctatgactgtatccactggcaagaagtttgaataaaggcccttttactctttcatgccagctcttgaaagaggcctaaccaaggctctaaagaaattggatgactacctgaacacccctctaccagaggagattgacgccaacacttgtggggaagacaaggggtcccggcgcaagttcctggatggggatgagctgaccctggctgactgcaatctgttgcccaagctccatgtggtcaaggaacaagtaccactgaaagggatgatataattccagctcagtcacactgtgtcagagtgatacaatgcaaagatcaggagacccgagttccggtcctgtatttgctgccaactagcagcatgagctgaggcacatcatttaatctttttggaattcatttttctcatgcctagaagaacagaagtggattgtattccttcttgccttcttttcctttcttctttccctccttctttccttttctcttgctcaaacatgtattcactaccactcaaaaaccatttgttgaacaaagcaaacaaatgaatctcccaagccttgggcttcatcctgtgatttcctcaattcccacctgccttaaattactcagtgaagccctgtccttggagaaaattcagtgggtggttaacccagagaagctggagatcaaaaagaagatggccaatgaaagaacaaaggccagcccttggcccctatctctttggatttctgctgatccagcttatcagatcccagaaacctggcaaacctctaaagttcacaaagagcgaaggggaagccaagtcaggcctccagtttggcttcggatgccaaaacttaatctgggctgtgggagctaactgttttcatatgaaagagcaaattcagaacatgagcatggaagtccctgcgaacgtcagatctccgtgtgcatccttacccccttgctgctttcatgctcactctcctcttgcgtggctcgctttcaggtttatctccatccctggaagcagagttgctctggcccaggctctccatgagagtttggcttgaacattcattgtctggccccctcctagttctcatctcccaaagtcaagccaatgtgtgaagaaatgaccagctcagcagccaaggcccagggtgcacaggtcttcgttgggagaggcatctgcaggcctttccttgctcactgggatccttgcctagcatagtgacgatgttcagccctggagacaaacaagaaggggaacaccaacatcaatagaagtatatatttacaaattgcatttctgctgtattgaaactaacattctgccctttaaaatcctgaaaataaaatttcagtatgaaatg

SEQ ID NO: 6278 - protein, 72 aa, Homo sapiens [sequence omitted]

SEQ ID NO: 6279 - DNA, 2022 bp, Homo sapiens
gctgacagtcgcggatcctgtgacacctccgggcagcccggcacttgttgctcccacgacctgttgtcattcccttaacccggctttccccgtggccccccgcctcctcccggcttcgctccttttcatgtgagcatctgggacactgatctctcagaccccgctgctcgggctggagaatagatggttttgtgaaaaattaaacaccgccctgaagaggagccccgctgggcagcggcaggagcgcagagtgctggcccaggtgctgcagaggtggcgcctccccggcccgggacggtagccccgggcgccaacggcatgacagactcggcgacagctaacggggacgacagggaccccgagatcgagctctttgtgaaggctggaatcgatggagaaagcatcggcaactgtcctttctctcagcgcctcttcatgatcctctggctgaaaggagtcgtgttcaatgtcaccactgtggatctgaaaagaaagccagctgacctgcacaacctagcccccggcacgcacccgcccttcctgaccttcaacggggacgtgaagacagacgtcaataagatcgaggagttcctggaggagaccttgacccctgaaaagtaccccaaactggctgcaaaacaccgggaatccaacacagcgggcatcgacatcttttccaagttttctgcctacatcaaaaataccaagcagcagaacaatgctgctcttgaaagaggcctaaccaaggctctaaagaaattggatgactacctgaacacccctctaccagaggagattgacgccaacacttgtggggaagacaaggggtcccggcgcaagttcctggatggggatgagctgaccctggctgactgcaatctgttgcccaagctccatgtggtcaaggaacaagtaccactgaaagggatgatataattccagctcagtcacactgtgtcagagtgatacaatgcaaagatcaggagacccgagttccggtcctgtatttgctgccaactagcagcatgagctgaggcacatcatttaatctttttggaattcatttttctcatgcctagaagaacagaagtggattgtattccttcttgccttcttttcctttcttctttccctccttctttccttttctcttgctcaaacatgtattcactaccactcaaaaaccatttgttgaacaaagcaaacaaatgaatctcccaagccttgggcttcatcctgtgatttcctcaattcccacctgccttaaattactcagtgaagccctgtccttggagaaaattcagtgggtggttaacccagagaagctggagatcaaaaagaagatggccaatgaaagaacaaaggccagcccttggcccctatctctttggatttctgctgatccagcttatcagatcccagaaacctggcaaacctctaaagttcacaaagagcgaaggggaagccaagtcaggcctccagtttggcttcggatgccaaaacttaatctgggctgtgggagctaactgttttcatatgaaagagcaaattcagaacatgagcatggaagtccctgcgaacgtcagatctccgtgtgcatccttacccccttgctgctttcatgctcactctcctcttgcgtggctcgctttcaggtttatctccatccctggaagcagagttgctctggcccaggctctccatgagagtttggcttgaacattcattgtctggccccctcctagttctcatctcccaaagtcaagccaatgtgtgaagaaatgaccagctcagcagccaaggcccagggtgcacaggtcttcgttgggagaggcatctgcaggcctttccttgctcactgggatccttgcctagcatagtgacgatgttcagccctggagacaaacaagaaggggaacaccaacatcaatagaagtatatatttacaaattgcatttctgctgtattgaaactaacattctgccctttaaaatcctgaaaataaaatttcagtatgaaatg

SEQ ID NO: 6280 - protein, 205 aa, Homo sapiens
MTDSATANGDDRDPEIELFVKAGIDGESIGNCPFSQRLFMILWLKGVVFNVTTVDLKRKPADLHNLAPGTHPPFLTFNGDVKTDVNKIEEFLEETLTPEKYPKLAAKHRESNTAGIDIFSKFSAYIKNTKQQNNAALERGLTKALKKLDDYLNTPLPEEIDANTCGEDKGSRRKFLDGDELTLADCNLLPKLHVVKEQVPLKGMI

SEQ ID NO: 6281 - DNA, 1639 bp, Homo sapiens
gctgacagtcgcggatcctgtgacacctccgggcagcccggcacttgttgctcccacgacctgttgtcattcccttaacccggctttccccgtggccccccgcctcctcccggcttcgctccttttcatgtgagcatctgggacactgatctctcagaccccgctgctcgggctggagaatagatggttttgtgaaaaattaaacaccgccctgaagaggagccccgctgggcagcggcaggagcgcagagtgctggcccaggtgctgcagaggtggcgcctccccggcccgggacggtagccccgggcgccaacggcatgacagactcggcgacagctaacggggacgacagggaccccgagatcgagctctttgtgaaggctggaatcgatggagaaagcatcggcaactgtcctttctctcagcgcctcttcatgatcctctggctgaaaggagtcgtgttcaatgtcaccactgtggatctgaaaagaaagccagctgacctgcacaacctagcccccggcacgcacccgcccttcctgaccttcaacggggacgtgaagacagacgtcaataagatcgaggagttcctggaggagaccttgacccctgaaaagtaccccaaactggctgcaaaacaccgggaatccaacacagcgggcatcgacatcttttccaagttttctgcctacatcaaaaataccaagcagcagaacaatgctgctcttgaaagaggcctaaccaaggctctaaagaaattggatgactacctgaacacccctctaccagaggagattgacgccaacacttgtggggaagacaaggggtcccggcgcaagttcctggatggggatgagctgaccctggctgactgcaatctgttgcccaagctccatgtggtcaaggtaagagagctctacccacaggggcctgcaagatccagctccatcttaggcccaggtcacctgtgtggatgagtcaaggacagtaccacctgttggtcaagaacctggaccctgaagtcaggtaataaggacccaaggtcaccctctgctgcttgttggctgtgtggcctccttgagcttcagttttcatttataaaataggcatatattgcttacttcaagtgttggtggaagagtaaatacagcgtgaaagtgcttggcatattgtgggggcttaatatgtgtaatagtcgcaattatcgttgttgtatacagtcatatcactccaaaggcctcttcctcataggatttccctggctacacccctacagctctattaaatgtgccctcatatgcattttttctttgtgcacagacccaccttctcacttcctccagcaacttcctaaggtgagcccacattattttcctcatctatcaaatgaagaggtggaggttgcaagaagtgatgtcactttcttgctatcattgcacttactaaccatttgcagcatgtagtgtcatcctctcctatataacaaaccctgggaatctgagagttggaaaggacatttagaggtcatccaaaacaatctcccacttcaacctggaccactttctgctgtttctgtgacaggcttctgtgaagctgtgactgcagcctctgagaacgaggagccctctgcttaatgag

SEQ ID NO: 6282 - protein, 219 aa, Homo sapiens
MTDSATANGDDRDPEIELFVKAGIDGESIGNCPFSQRLFMILWLKGVVFNVTTVDLKRKPADLHNLAPGTHPPFLTFNGDVKTDVNKIEEFLEETLTPEKYPKLAAKHRESNTAGIDIFSKFSAYIKNTKQQNNAALERGLTKALKKLDDYLNTPLPEEIDANTCGEDKGSRRKFLDGDELTLADCNLLPKLHVVKVRELYPQGPARSSSILGPGHLCG

SEQ ID NO: 6283 - DNA, 273 bp, Homo sapiens
gcctctggctctgcatctgtaaaatggactttacattcagtttctttatctggcaataagaaaggctttatagctactcccagggatgcataaagcacggcaaaccaacaaaggccaagaggaggtgagaaagaaaaacaaggagacaaccatcaaatggagccctgggcccgaatcttcaaattgctcctgtcttctccttctaagaggtgccacctgcagtgggtcatgctcctggctgatgctgctagaaaaagaactcatctgtatcac

SEQ ID NO: 6284 - protein, 61 aa, Homo sapiens
MHKARQTNKGQEEVRKKNKETTIKWSPGPESSNCSCLLLLRGATCSGSCSWLMLLEKELIC

SEQ ID NO: 6285 - DNA, 2565 bp, Homo sapiens
ataaatatcaaaacagccaaggtgaaagtcatcaaaatggaacttttttcttttaacaaagataagtgcttttttgtgttggaagtaaatttgtcagtggagcaagcaagcattttgatttatatagcatgataagaaaccatattgctgttaccttgggagagttcacacttatgaagggtagatgagatatggacaattcaaagcagccagtctatcacatatatgtataaatgaccatgaagtcactttttagtttatatttcaatctttctgcatgttgtactctgtaccctggctcacgaaggtgggaggttgtcattttttgtcttagttcaccgtgatgttctcagtgttatgtgcttacagtctgtgccatctttcagactttcctctaagggggaaatggctttaatggagctctcaatgtaaaatagatgcattaacaaaatatggacgagagtagggagatcatcacaaagaatagctaatggatgctgggcttaatacctaggtgatggggtgatctatgcagctgtttaccatggcacgtgtttaactatgtaacaagcctgcacattaacccctgaatgtaaaataaaaattggaaaaaaaaaacaacccaaaatacaagtaaacaaattaggtgcttttaaataaacttgaaagatttgctgtgaataaattagtttttatatcttccctttggaaaattagtatctaactactgatatatttttaaatgtttttcagggttcataaattcatggaacgtgaaggtcgcagacctcgtcttcttgtagcaaaaatgggacaagatggccatgacagaggagcaaaagttattgctacaggatttgctgatcttggttttgatgtggacataggccctcttttccagactcctcgtgaagtggcccagcaggctgtggatgcggatgtgcatgctgtgggcataagcaccctcgctgctggtcataaaaccctagttcctgaactcatcaaagaacttaactcccttggacggccagatattcttgtcatgtgtggaggggtgataccacctcaggattatgaatttctgtttgaagttggtgtttccaatgtatttggtcctgggactcgaattccaaaggctgccgttcaggtgcttgatgatattgagaagtgtttggaaaagaagcagcaatctgtataatatcctctttttgttttagcttttgtctaaaatattattttagttatgatcaaagaagagagtaaagctatgtcttcaatttaatttcaatacctgatttgtactttccttgaaagctttactttaaaataccttacttataggcctggtgtcatgctataagtatgtacatacagtttcacttcaaaaataaaaaaaaaatccctaaaaactctctatactctctataacaatactttatcaagaactctggacaatggtattatttttaaaaatcatggtgatgtatttattagaatgtttcttataaatctgtttactttttatattaagaattaaactgtacctaaaaaaactctgactattcccatttgtcagtttagcattacattgtcttgagcaccagaaaataaaatccatatattaataaaaacctatcttgaaaaactagtggagtgtatttacgtggcaaaagagattttgggaggagtcctcagccaaattctaccagaatcaccttaataaaagaagtattaaaatcaagcacagcaggttggaatatggggaatttgacagtatatttcttcaagtctgagtttactttcttcctgatcatgaccatctgaccttgttatttctgggcttggctcaagaccaaggagagtggatgttgatgaacattcctttaaataaaagtgcttaggttgtagttatggctttgtctagaatggtgatgtcaactgtgagtgtaggtctgtgatatagaaagaattcaactttccagatctagaaagatgctaccttgcatagatttgctccttaaacataaattgcaaaaataaaaatatcacagagaacacctgtactttgcttactgaaagatttgctcactaaagaaggaaagttgccatttacctgtttaacaaatctgcacatcctgcacatgttccccagaatgtaaaataaaaaaagtttaaataaaaaaggaaagttgtcctttattgttaacatgatccattacatgaatataacataaataattatcttttttaataaatttctattgtattagatcagagagcagtcttttggaaagtattatagatacattactgtagaatttacaaactcattgtaatacaatgtatttaattttcagaatatgattatctgaatggtattgtcatgattattgttcccattttcagatgaacactgacttcaagtccaatgatatattcactatgccattttattgacttttccttgtaaagcaatgcacactaatttagtaagtatttggtttctgtgatgtgttcagttgcgtgctgggtgacatgtgaaataaactcatccttgaggaattt

SEQ ID NO: 6286 - protein, 151 aa, Homo sapiens
MFFRVHKFMEREGRRPRLLVAKMGQDGHDRGAKVIATGFADLGFDVDIGPLFQTPREVAQQAVDADVHAVGISTLAAGHKTLVPELIKELNSLGRPDILVMCGGVIPPQDYEFLFEVGVSNVFGPGTRIPKAAVQVLDDIEKCLEKKQQSV

SEQ ID NO: 6287 - DNA, 3874 bp, Homo sapiens
ggaatgcgcccatgagagcgctattagattggctggagggagggcggtgtcggcctacgcccccagagtcgtccggctgacgctggcggtggcgcggtttgtgtgggcttggtgagggcggggaggcctggctgtgtggatgtctgacaggtgaggcgggggacgcagaagtgcagccgccctctcccacagcggagtccaaaacaggcctaccagtcagttcttatttctattgggtgtttccatgctccaccatgttaagagctaagaatcagctttttttactttcacctcattacctgaggcaggtaaaagaatcatcaggctccaggctcatacagcaacgacttctacaccagcaacagccccttcacccagaatgggctgccctggctaaaaagcagctgaaaggcaaaaacccagaagacctaatatggcacaccccggaagggatctctataaaacccttgtattccaagagagatactatggacttacctgaagaacttccaggagtgaagccattcacacgtggaccatatcctaccatgtatacctttaggccctggaccatccgccagtatgctggttttagtactgtggaagaaagcaataagttctataaggacaacattaaggctggtcagcagggattatcagttgcctttgatctggcgacacatcgtggctatgattcagacaaccctcgagttcgtggtgatgttggaatggctggagttgctattgacactgtggaagataccaaaattctttttgatggaattcctttagaaaaaatgtcagtttccatgactatgaatggagcagttattccagttcttgcaaattttatagtaactggagaagaacaaggtgtacctaaagagaagcttactggtaccatccaaaatgatatactaaaggaatttatggttcgaaatacatacatttttcctccagaaccatccatgaaaattattgctgacatatttgaatatacagcaaagcacatgccaaaatttaattcaatttcaattagtggataccatatgcaggaagcaggggctgatgccattctggagctggcctatactttagcagatggattggagtactctagaactggactccaggctggcctgacaattgatgaatttgcaccaaggttgtctttcttctggggaattggaatgaatttctatatggaaatagcaaagatgagagctggtagaagactctgggctcacttaatagagaaaatgtttcagcctaaaaactcaaaatctcttcttctaagagcacactgtcagacatctggatggtcacttactgagcaggatccctacaataatattgtccgtactgcaatagaagcaatggcagcagtatttggagggactcagtctttgcacacaaattcttttgatgaagctttgggtttgccaactgtgaaaagtgctcgaattgccaggaacacacaaatcatcattcaagaagaatctgggattcccaaagtggctgatccttggggaggttcttacatgatggaatgtctcacaaatgatgtttatgatgctgctttaaagctcattaatgaaattgaagaaatgggtggaatggccaaagctgtagctgagggaatacctaaacttcgaattgaagaatgtgctgcccgaagacaagctagaatagattctggttctgaagtaattgttggagtaaataagtaccagttggaaaaagaagacgctgtagaagttctggcaattgataatacttcagtgcgaaacaggcagattgaaaaacttaagaagatcaaatccagcagggatcaagctttggctgaacgttgtcttgctgcactaaccgaatgtgctgctagcggagatggaaatatcctggctcttgcagtggatgcatctcgggcaagatgtacagtgggagaaatcacagatgccctgaaaaaggtatttggtgaacataaagcgaatgatcgaatggtgagtggagcatatcgccaggaatttggagaaagtaaagagataacatctgctatcaagagggttcataaattcatggaacgtgaaggtcgcagacctcgtcttcttgtagcaaaaatgggacaagatggccatgacagaggagcaaaagttattgctacaggatttgctgatcttggttttgatgtggacataggccctcttttccagactcctcgtgaagtggcccagcaggctgtggatgcggatgtgcatgctgtgggcataagcaccctcgctgctggtcataaaaccctagttcctgaactcatcaaagaacttaactcccttggacggccagatattcttgtcatgtgtggaggggtgataccacctcaggattatgaatttctgtttgaagttggtgtttccaatgtatttggtcctgggactcgaattccaaaggctgccgttcaggtgcttgatgatattgagaagtgtttggaaaagaagcagcaatctgtataatatcctctttttgttttagcttttgtctaaaatattattttagttatgatcaaagaagagagtaaagctatgtcttcaatttaatttcaatacctgatttgtactttccttgaaagctttactttaaaataccttacttataggcctggtgtcatgctataagtatgtacatacagtttcacttcaaaaataaaaaaaaaatccctaaaaactctctatactctctataacaatactttatcaagaactctggacaatggtattatttttaaaaatcatggtgatgtatttattagaatgtttcttataaatctgtttactttttatattaagaattaaactgtacctaaaaaaactctgactattcccatttgtcagtttagcattacattgtcttgagcaccagaaaataaaatccatatattaataaaaacctatcttgaaaaactagtggagtgtatttacgtggcaaaagagattttgggaggagtcctcagccaaattctaccagaatcaccttaataaaagaagtattaaaatcaagcacagcaggttggaatatggggaatttgacagtatatttcttcaagtctgagtttactttcttcctgatcatgaccatctgaccttgttatttctgggcttggctcaagaccaaggagagtggatgttgatgaacattcctttaaataaaagtgcttaggttgtagttatggctttgtctagaatggtgatgtcaactgtgagtgtaggtctgtgatatagaaagaattcaactttccagatctagaaagatgctaccttgcatagatttgctccttaaacataaattgcaaaaataaaaatatcacagagaacacctgtactttgcttactgaaagatttgctcactaaagaaggaaagttgccatttacctgtttaacaaatctgcacatcctgcacatgttccccagaatgtaaaataaaaaaagtttaaataaaaaaggaaagttgtcctttattgttaacatgatccattacatgaatataacataaataattatcttttttaataaatttctattgtattagatcagagagcagtcttttggaaagtattatagatacattactgtagaatttacaaactcattgtaatacaatgtatttaattttcagaatatgattatctgaatggtattgtcatgattattgttcccattttcagatgaacactgacttcaagtccaatgatatattcactatgccattttattgacttttccttgtaaagcaatgcacactaatttagtaagtatttggtttctgtgatgtgttcagttgcgtgctgggtgacatgtgaaataaactcatccttgaggaattt

SEQ ID NO: 6288 - protein, 750 aa, Homo sapiens
MLRAKNQLFLLSPHYLRQVKESSGSRLIQQRLLHQQQPLHPEWAALAKKQLKGKNPEDLIWHTPEGISIKPLYSKRDTMDLPEELPGVKPFTRGPYPTMYTFRPWTIRQYAGFSTVEESNKFYKDNIKAGQQGLSVAFDLATHRGYDSDNPRVRGDVGMAGVAIDTVEDTKILFDGIPLEKMSVSMTMNGAVIPVLANFIVTGEEQGVPKEKLTGTIQNDILKEFMVRNTYIFPPEPSMKIIADIFEYTAKHMPKFNSISISGYHMQEAGADAILELAYTLADGLEYSRTGLQAGLTIDEFAPRLSFFWGIGMNFYMEIAKMRAGRRLWAHLIEKMFQPKNSKSLLLRAHCQTSGWSLTEQDPYNNIVRTAIEAMAAVFGGTQSLHTNSFDEALGLPTVKSARIARNTQIIIQEESGIPKVADPWGGSYMMECLTNDVYDAALKLINEIEEMGGMAKAVAEGIPKLRIEECAARRQARIDSGSEVIVGVNKYQLEKEDAVEVLAIDNTSVRNRQIEKLKKIKSSRDQALAERCLAALTECAASGDGNILALAVDASRARCTVGEITDALKKVFGEHKANDRMVSGAYRQEFGESKEITSAIKRVHKFMEREGRRPRLLVAKMGQDGHDRGAKVIATGFADLGFDVDIGPLFQTPREVAQQAVDADVHAVGISTLAAGHKTLVPELIKELNSLGRPDILVMCGGVIPPQDYEFLFEVGVSNVFGPGTRIPKAAVQVLDDIEKCLEKKQQSV

SEQ ID NO: 6289 - DNA, 2177 bp, Homo sapiens
ataaatatcaaaacagccaaggtgaaagtcatcaaaatggaacttttttcttttaacaaagataagtgcttttttgtgttggaagtaaatttgtcagtggagcaagcaagcattttgatttatatagcatgataagaaaccatattgctgttaccttgggagagttcacacttatgaagggtagatgagatatggacaattcaaagcagccagtctatcacatatatgtataaatgaccatgaagtcactttttagtttatatttcaatctttctgcatgttgtactctgtaccctggctcacgaaggtgggaggttgtcattttttgtcttagttcaccgtgatgttctcagtgttatgtgcttacagtctgtgccatctttcagactttcctctaagggggaaatggctttaatggagctctcaatgtaaaatagatgcattaacaaaatatggacgagagtagggagatcatcacaaagaatagctaatggatgctgggcttaatacctaggtgatggggtgatctatgcagctgtttaccatggcacgtgtttaactatgtaacaagcctgcacattaacccctgaatgtaaaataaaaattggaaaaaaaaaacaacccaaaatacaagtaaacaaattaggtgcttttaaataaacttgaaagatttgctgtgaataaattagtttttatatcttccctttggaaaattagtatctaactactgatatatttttaaatgtttttcagggttcataaattcatggaacgtgaaggtcgcagacctcgtcttcttgtagcaaaaatgggacaagatggccatgacagaggagcaaaagttattgctacaggatttgctgatcttggttttgatgtggacataggccctcttttccagactcctcgtgaagtggcccagcaggctgtggatgcggatgtgcatgctgtgggcataagcaccctcgctgctggtcataaaaccctagttcctgaactcatcaaagaacttaactcccttggacggccagatattcttgtcatgtgtggaggggtgataccacctcaggattatgaatttctgtttgaagttggtgtttccaatgtatttggtcctgggactcgaattccaaaggctgccgttcaggtgcttgatgatattgagaagtgtttggaaaagaagcagcaatctgtataatatcctctttttgttttagcttttgtctaaaatattattttagttatgatcaaagaagagagtaaagctatgtcttcaatttaatttcaatacctgatttgtactttccttgaaagctttactttaaaataccttacttataggcctggtgtcatgctataagtatgtacatacagtttcacttcaaaaataaaaaaaaaatccctaaaaactctctatactctctataacaatactttatcaagaactctggacaatggtattatttttaaaaatcatggtgatgtatttattagaatgtttcttataaatctgtttactttttatattaagaattaaactgtacctaaaaaaactctgactattcccatttgtcagtttagcattacattgtcttgagcaccagaaaataaaatccatatattaataaaaacctatcttgaaaaactagtggagtgtatttacgtggcaaaagagattttgggaggagtcctcagccaaattctaccagaatcaccttaataaaagaagtattaaaatcaagcacagcaggttggaatatggggaatttgacagtatatttcttcaagtctgagtttactttcttcctgatcatgaccatctgaccttgttatttctgggcttggctcaagaccaaggagagtggatgttgatgaacattcctttaaataaaagtgcttaggttgtagttatggctttgtctagaatggtgatgtcaactgtgagtgtaggtctgtgatatagaaagaattcaactttccagatctagaaagatgctaccttgcatagatttgctccttaaacataaattgcaaaaataaaaatatcacagagaacacctgtactttgcttactgaaagatttgctcactaaagaaggaaagttgccatttacctgtttaacaaatctgcacatcctgcacatgttccccagaatgtaaaataaaaaaagtttaaat

SEQ ID NO: 6290 - protein, 151 aa, Homo sapiens; identical to SEQ ID NO: 6286

SEQ ID NO: 6291 - DNA, 3486 bp, Homo sapiens
ggaatgcgcccatgagagcgctattagattggctggagggagggcggtgtcggcctacgcccccagagtcgtccggctgacgctggcggtggcgcggtttgtgtgggcttggtgagggcggggaggcctggctgtgtggatgtctgacaggtgaggcgggggacgcagaagtgcagccgccctctcccacagcggagtccaaaacaggcctaccagtcagttcttatttctattgggtgtttccatgctccaccatgttaagagctaagaatcagctttttttactttcacctcattacctgaggcaggtaaaagaatcatcaggctccaggctcatacagcaacgacttctacaccagcaacagccccttcacccagaatgggctgccctggctaaaaagcagctgaaaggcaaaaacccagaagacctaatatggcacaccccggaagggatctctataaaacccttgtattccaagagagatactatggacttacctgaagaacttccaggagtgaagccattcacacgtggaccatatcctaccatgtatacctttaggccctggaccatccgccagtatgctggttttagtactgtggaagaaagcaataagttctataaggacaacattaaggctggtcagcagggattatcagttgcctttgatctggcgacacatcgtggctatgattcagacaaccctcgagttcgtggtgatgttggaatggctggagttgctattgacactgtggaagataccaaaattctttttgatggaattcctttagaaaaaatgtcagtttccatgactatgaatggagcagttattccagttcttgcaaattttatagtaactggagaagaacaaggtgtacctaaagagaagcttactggtaccatccaaaatgatatactaaaggaatttatggttcgaaatacatacatttttcctccagaaccatccatgaaaattattgctgacatatttgaatatacagcaaagcacatgccaaaatttaattcaatttcaattagtggataccatatgcaggaagcaggggctgatgccattctggagctggcctatactttagcagatggattggagtactctagaactggactccaggctggcctgacaattgatgaatttgcaccaaggttgtctttcttctggggaattggaatgaatttctatatggaaatagcaaagatgagagctggtagaagactctgggctcacttaatagagaaaatgtttcagcctaaaaactcaaaatctcttcttctaagagcacactgtcagacatctggatggtcacttactgagcaggatccctacaataatattgtccgtactgcaatagaagcaatggcagcagtatttggagggactcagtctttgcacacaaattcttttgatgaagctttgggtttgccaactgtgaaaagtgctcgaattgccaggaacacacaaatcatcattcaagaagaatctgggattcccaaagtggctgatccttggggaggttcttacatgatggaatgtctcacaaatgatgtttatgatgctgctttaaagctcattaatgaaattgaagaaatgggtggaatggccaaagctgtagctgagggaatacctaaacttcgaattgaagaatgtgctgcccgaagacaagctagaatagattctggttctgaagtaattgttggagtaaataagtaccagttggaaaaagaagacgctgtagaagttctggcaattgataatacttcagtgcgaaacaggcagattgaaaaacttaagaagatcaaatccagcagggatcaagctttggctgaacgttgtcttgctgcactaaccgaatgtgctgctagcggagatggaaatatcctggctcttgcagtggatgcatctcgggcaagatgtacagtgggagaaatcacagatgccctgaaaaaggtatttggtgaacataaagcgaatgatcgaatggtgagtggagcatatcgccaggaatttggagaaagtaaagagataacatctgctatcaagagggttcataaattcatggaacgtgaaggtcgcagacctcgtcttcttgtagcaaaaatgggacaagatggccatgacagaggagcaaaagttattgctacaggatttgctgatcttggttttgatgtggacataggccctcttttccagactcctcgtgaagtggcccagcaggctgtggatgcggatgtgcatgctgtgggcataagcaccctcgctgctggtcataaaaccctagttcctgaactcatcaaagaacttaactcccttggacggccagatattcttgtcatgtgtggaggggtgataccacctcaggattatgaatttctgtttgaagttggtgtttccaatgtatttggtcctgggactcgaattccaaaggctgccgttcaggtgcttgatgatattgagaagtgtttggaaaagaagcagcaatctgtataatatcctctttttgttttagcttttgtctaaaatattattttagttatgatcaaagaagagagtaaagctatgtcttcaatttaatttcaatacctgatttgtactttccttgaaagctttactttaaaataccttacttataggcctggtgtcatgctataagtatgtacatacagtttcacttcaaaaataaaaaaaaaatccctaaaaactctctatactctctataacaatactttatcaagaactctggacaatggtattatttttaaaaatcatggtgatgtatttattagaatgtttcttataaatctgtttactttttatattaagaattaaactgtacctaaaaaaactctgactattcccatttgtcagtttagcattacattgtcttgagcaccagaaaataaaatccatatattaataaaaacctatcttgaaaaactagtggagtgtatttacgtggcaaaagagattttgggaggagtcctcagccaaattctaccagaatcaccttaataaaagaagtattaaaatcaagcacagcaggttggaatatggggaatttgacagtatatttcttcaagtctgagtttactttcttcctgatcatgaccatctgaccttgttatttctgggcttggctcaagaccaaggagagtggatgttgatgaacattcctttaaataaaagtgcttaggttgtagttatggctttgtctagaatggtgatgtcaactgtgagtgtaggtctgtgatatagaaagaattcaactttccagatctagaaagatgctaccttgcatagatttgctccttaaacataaattgcaaaaataaaaatatcacagagaacacctgtactttgcttactgaaagatttgctcactaaagaaggaaagttgccatttacctgtttaacaaatctgcacatcctgcacatgttccccagaatgtaaaataaaaaaagtttaaat

SEQ ID NO: 6292 - protein, 750 aa, Homo sapiens; identical to SEQ ID NO: 6288

SEQ ID NO: 6293 - DNA, 1647 bp, Homo sapiens
ataaatatcaaaacagccaaggtgaaagtcatcaaaatggaacttttttcttttaacaaagataagtgcttttttgtgttggaagtaaatttgtcagtggagcaagcaagcattttgatttatatagcatgataagaaaccatattgctgttaccttgggagagttcacacttatgaagggtagatgagatatggacaattcaaagcagccagtctatcacatatatgtataaatgaccatgaagtcactttttagtttatatttcaatctttctgcatgttgtactctgtaccctggctcacgaaggtgggaggttgtcattttttgtcttagttcaccgtgatgttctcagtgttatgtgcttacagtctgtgccatctttcagactttcctctaagggggaaatggctttaatggagctctcaatgtaaaatagatgcattaacaaaatatggacgagagtagggagatcatcacaaagaatagctaatggatgctgggcttaatacctaggtgatggggtgatctatgcagctgtttaccatggcacgtgtttaactatgtaacaagcctgcacattaacccctgaatgtaaaataaaaattggaaaaaaaaaacaacccaaaatacaagtaaacaaattaggtgcttttaaataaacttgaaagatttgctgtgaataaattagtttttatatcttccctttggaaaattagtatctaactactgatatatttttaaatgtttttcagggttcataaattcatggaacgtgaaggtcgcagacctcgtcttcttgtagcaaaaatgggacaagatggccatgacagaggagcaaaagttattgctacaggatttgctgatcttggttttgatgtggacataggccctcttttccagactcctcgtgaagtggcccagcaggctgtggatgcggatgtgcatgctgtgggcataagcaccctcgctgctggtcataaaaccctagttcctgaactcatcaaagaacttaactcccttggacggccagatattcttgtcatgtgtggaggggtgataccacctcaggattatgaatttctgtttgaagttggtgtttccaatgtatttggtcctgggactcgaattccaaaggctgccgttcaggtgcttgatgatattgagaagtgtttggaaaagaagcagcaatctgtataatatcctctttttgttttagcttttgtctaaaatattattttagttatgatcaaagaagagagtaaagctatgtcttcaatttaatttcaatacctgatttgtactttccttgaaagctttactttaaaataccttacttataggcctggtgtcatgctataagtatgtacatacagtttcacttcaaaaataaaaaaaaaatccctaaaaactctctatactctctataacaatactttatcaagaactctggacaatggtattatttttaaaaatcatggtgatgtatttattagaatgtttcttataaatctgtttactttttatattaagaattaaactgtacctaaaaaaactctgactattcccatttgtcagtttagcattacattgtcttgagcaccagaaaataaaatccatatattaataaaaacctatcttgaaaaact

SEQ ID NO: 6294 - protein, 151 aa, Homo sapiens; identical to SEQ ID NO: 6286

SEQ ID NO: 6295 - DNA, 2956 bp, Homo sapiens
ggaatgcgcccatgagagcgctattagattggctggagggagggcggtgtcggcctacgcccccagagtcgtccggctgacgctggcggtggcgcggtttgtgtgggcttggtgagggcggggaggcctggctgtgtggatgtctgacaggtgaggcgggggacgcagaagtgcagccgccctctcccacagcggagtccaaaacaggcctaccagtcagttcttatttctattgggtgtttccatgctccaccatgttaagagctaagaatcagctttttttactttcacctcattacctgaggcaggtaaaagaatcatcaggctccaggctcatacagcaacgacttctacaccagcaacagccccttcacccagaatgggctgccctggctaaaaagcagctgaaaggcaaaaacccagaagacctaatatggcacaccccggaagggatctctataaaacccttgtattccaagagagatactatggacttacctgaagaacttccaggagtgaagccattcacacgtggaccatatcctaccatgtatacctttaggccctggaccatccgccagtatgctggttttagtactgtggaagaaagcaataagttctataaggacaacattaaggctggtcagcagggattatcagttgcctttgatctggcgacacatcgtggctatgattcagacaaccctcgagttcgtggtgatgttggaatggctggagttgctattgacactgtggaagataccaaaattctttttgatggaattcctttagaaaaaatgtcagtttccatgactatgaatggagcagttattccagttcttgcaaattttatagtaactggagaagaacaaggtgtacctaaagagaagcttactggtaccatccaaaatgatatactaaaggaatttatggttcgaaatacatacatttttcctccagaaccatccatgaaaattattgctgacatatttgaatatacagcaaagcacatgccaaaatttaattcaatttcaattagtggataccatatgcaggaagcaggggctgatgccattctggagctggcctatactttagcagatggattggagtactctagaactggactccaggctggcctgacaattgatgaatttgcaccaaggttgtctttcttctggggaattggaatgaatttctatatggaaatagcaaagatgagagctggtagaagactctgggctcacttaatagagaaaatgtttcagcctaaaaactcaaaatctcttcttctaagagcacactgtcagacatctggatggtcacttactgagcaggatccctacaataatattgtccgtactgcaatagaagcaatggcagcagtatttggagggactcagtctttgcacacaaattcttttgatgaagctttgggtttgccaactgtgaaaagtgctcgaattgccaggaacacacaaatcatcattcaagaagaatctgggattcccaaagtggctgatccttggggaggttcttacatgatggaatgtctcacaaatgatgtttatgatgctgctttaaagctcattaatgaaattgaagaaatgggtggaatggccaaagctgtagctgagggaatacctaaacttcgaattgaagaatgtgctgcccgaagacaagctagaatagattctggttctgaagtaattgttggagtaaataagtaccagttggaaaaagaagacgctgtagaagttctggcaattgataatacttcagtgcgaaacaggcagattgaaaaacttaagaagatcaaatccagcagggatcaagctttggctgaacgttgtcttgctgcactaaccgaatgtgctgctagcggagatggaaatatcctggctcttgcagtggatgcatctcgggcaagatgtacagtgggagaaatcacagatgccctgaaaaaggtatttggtgaacataaagcgaatgatcgaatggtgagtggagcatatcgccaggaatttggagaaagtaaagagataacatctgctatcaagagggttcataaattcatggaacgtgaaggtcgcagacctcgtcttcttgtagcaaaaatgggacaagatggccatgacagaggagcaaaagttattgctacaggatttgctgatcttggttttgatgtggacataggccctcttttccagactcctcgtgaagtggcccagcaggctgtggatgcggatgtgcatgctgtgggcataagcaccctcgctgctggtcataaaaccctagttcctgaactcatcaaagaacttaactcccttggacggccagatattcttgtcatgtgtggaggggtgataccacctcaggattatgaatttctgtttgaagttggtgtttccaatgtatttggtcctgggactcgaattccaaaggctgccgttcaggtgcttgatgatattgagaagtgtttggaaaagaagcagcaatctgtataatatcctctttttgttttagcttttgtctaaaatattattttagttatgatcaaagaagagagtaaagctatgtcttcaatttaatttcaatacctgatttgtactttccttgaaagctttactttaaaataccttacttataggcctggtgtcatgctataagtatgtacatacagtttcacttcaaaaataaaaaaaaaatccctaaaaactctctatactctctataacaatactttatcaagaactctggacaatggtattatttttaaaaatcatggtgatgtatttattagaatgtttcttataaatctgtttactttttatattaagaattaaactgtacctaaaaaaactctgactattcccatttgtcagtttagcattacattgtcttgagcaccagaaaataaaatccatatattaataaaaacctatcttgaaaaact

SEQ ID NO: 6296 - protein, 750 aa, Homo sapiens; identical to SEQ ID NO: 6288

SEQ ID NO: 6297 - DNA, 4176 bp, Homo sapiens
gtgtgggcttggtgagggcggggaggcctggctgtgtggatgtctgacaggtcagttcttatttctattgggtgtttccatgctccaccatgttaagagctaagaatcagctttttttactttcacctcattacctgaggcaggtaaaagaatcatcaggctccaggctcatacagcaacgacttctacaccagcaacagccccttcacccagaatgggctgccctggctaaaaagcagctgaaaggcaaaaacccagaagacctaatatggcacaccccggaagggatctctataaaacccttgtattccaagagagatactatggacttacctgaagaacttccaggagtgaagccattcacacgtggaccatatcctaccatgtatacctttaggccctggaccatccgccagtatgctggttttagtactgtggaagaaagcaataagttctataaggacaacattaaggctggtcagcagggattatcagttgcctttgatctggcgacacatcgtggctatgattcagacaaccctcgagttcgtggtgatgttggaatggctggagttgctattgacactgtggaagataccaaaattctttttgatggaattcctttagaaaaaatgtcagtttccatgactatgaatggagcagttattccagttcttgcaaattttatagtaactggagaagaacaaggtgtacctaaagagaagcttactggtaccatccaaaatgatatactaaaggaatttatggttcgaaatacatacatttttcctccagaaccatccatgaaaattattgctgacatatttgaatatacagcaaagcacatgccaaaatttaattcaatttcaattagtggataccatatgcaggaagcaggggctgatgccattctggagctggcctatactttagcagatggattggagtactctagaactggactccaggctggcctgacaattgatgaatttgcaccaaggttgtctttcttctggggaattggaatgaatttctatatggaaatagcaaagatgagagctggtagaagactctgggctcacttaatagagaaaatgtttcagcctaaaaactcaaaatctcttcttctaagagcacactgtcagacatctggatggtcacttactgagcaggatccctacaataatattgtccgtactgcaatagaagcaatggcagcagtatttggagggactcagtctttgcacacaaattcttttgatgaagctttgggtttgccaactgtgaaaagtgctcgaattgccaggaacacacaaatcatcattcaagaagaatctgggattcccaaagtggctgatccttggggaggttcttacatgatggaatgtctcacaaatgatgtttatgatgctgctttaaagctcattaatgaaattgaagaaatgggtggaatggccaaagctgtagctgagggaatacctaaacttcgaattgaagaatgtgctgcccgaagacaagctagaatagattctggttctgaagtaattgttggagtaaataagtaccagttggaaaaagaagacgctgtagaagttctggcaattgataatacttcagtgcgaaacaggcagattgaaaaacttaagaagatcaaatccagcagggatcaagctttggctgaacgttgtcttgctgcactaaccgaatgtgctgctagcggagatggaaatatcctggctcttgcagtggatgcatctcgggcaagatgtacagtgggagaaatcacagatgccctgaaaaaggtatttggtgaacataaagcgaatgatcgaatggtgagtggagcatatcgccaggaatttggagaaagtaaagagataacatctgctatcaagaggtaatatgtaaggtttcttaggccagaatttcatcttttctgttagcacaatccccttgaatctactgggagcttaatttccttacatacaactgagaaaatttttgaattttataataataaatagtaaattaaatattaattatatagactatataacatataatagagtatataatttattcattacatataatatataattagaaatatatcatacatgatacatattatatatctatactatcattttaataggtacatgataatatttaataataaatatcaaatattgaaactaatattagttttcatataattaatactattttgaactttcaccatagtccccttcaggagtttctcatgtcaaacagatgtttaactaacaatgatattgcttcatatcctccaggtatttatatttcaatctgcttactatggtagagtttcatattttttgaagttgtttacatttttcattgcttgaataattataaaatcttaattttcataattgaaagtaaacatttagttggcatctatgcatacattacaatcagtatttattgaactgataataacttacatttatttccacagcatgacttggaaatatatattaatgtgatcatatttctcaagtgtaagaactagctttttgatgattggtctttccaacctctgtaacaagcttccaattaaaaactgaatttccatacttgtacactagataaatatcaaaacagccaaggtgaaagtcatcaaaatggaacttttttcttttaacaaagataagtgcttttttgtgttggaagtaaatttgtcagtggagcaagcaagcattttgatttatatagcatgataagaaaccatattgctgttaccttgggagagttcacacttatgaagggtagatgagatatggacaattcaaagcagccagtctatcacatatatgtataaatgaccatgaagtcactttttagtttatatttcaatctttctgcatgttgtactctgtaccctggctcacgaaggtgggaggttgtcattttttgtcttagttcaccgtgatgttctcagtgttatgtgcttacagtctgtgccatctttcagactttcctctaagggggaaatggctttaatggagctctcaatgtaaaatagatgcattaacaaaatatggacgagagtagggagatcatcacaaagaatagctaatggatgctgggcttaatacctaggtgatggggtgatctatgcagctgtttaccatggcacgtgtttaactatgtaacaagcctgcacattaacccctgaatgtaaaataaaaattggaaaaaaaaaacaacccaaaatacaagtaaacaaattaggtgcttttaaataaacttgaaagatttgctgtgaataaattagtttttatatcttccctttggaaaattagtatctaactactgatatatttttaaatgtttttcagggttcataaattcatggaacgtgaaggtcgcagacctcgtcttcttgtagcaaaaatgggacaagatggccatgacagaggagcaaaagttattgctacaggatttgctgatcttggttttgatgtggacataggccctcttttccagactcctcgtgaagtggcccagcaggctgtggatgcggatgtgcatgctgtgggcataagcaccctcgctgctggtcataaaaccctagttcctgaactcatcaaagaacttaactcccttggacggccagatattcttgtcatgtgtggaggggtgataccacctcaggattatgaatttctgtttgaagttggtgtttccaatgtatttggtcctgggactcgaattccaaaggctgccgttcaggtgcttgatgatattgagaagtgtttggaaaagaagcagcaatctgtataatatcctctttttgttttagcttttgtctaaaatattattttagttatgatcaaagaagagagtaaagctatgtcttcaatttaatttcaatacctgatttgtactttccttgaaagctttactttaaaataccttacttataggcctggtgtcatgctataagtatgtacatacagtttcacttcaaaaataaaaaaaaaatccctaaaaactctctatactctctataacaatactttatcaagaactctggacaatggtattatttttaaaaatcatggtgatgtatttattagaatgtttcttataaatctgtttactttttatattaagaattaaactgtacct

SEQ ID NO: 6298 - protein, 603 aa, Homo sapiens
MLRAKNQLFLLSPHYLRQVKESSGSRLIQQRLLHQQQPLHPEWAALAKKQLKGKNPEDLIWHTPEGISIKPLYSKRDTMDLPEELPGVKPFTRGPYPTMYTFRPWTIRQYAGFSTVEESNKFYKDNIKAGQQGLSVAFDLATHRGYDSDNPRVRGDVGMAGVAIDTVEDTKILFDGIPLEKMSVSMTMNGAVIPVLANFIVTGEEQGVPKEKLTGTIQNDILKEFMVRNTYIFPPEPSMKIIADIFEYTAKHMPKFNSISISGYHMQEAGADAILELAYTLADGLEYSRTGLQAGLTIDEFAPRLSFFWGIGMNFYMEIAKMRAGRRLWAHLIEKMFQPKNSKSLLLRAHCQTSGWSLTEQDPYNNIVRTAIEAMAAVFGGTQSLHTNSFDEALGLPTVKSARIARNTQIIIQEESGIPKVADPWGGSYMMECLTNDVYDAALKLINEIEEMGGMAKAVAEGIPKLRIEECAARRQARIDSGSEVIVGVNKYQLEKEDAVEVLAIDNTSVRNRQIEKLKKIKSSRDQALAERCLAALTECAASGDGNILALAVDASRARCTVGEITDALKKVFGEHKANDRMVSGAYRQEFGESKEITSAIKR

SEQ ID NO: 6299 - DNA, 2855 bp, Homo sapiens
ggaatgcgcccatgagagcgctattagattggctggagggagggcggtgtcggcctacgcccccagagtcgtccggctgacgctggcggtggcgcggtttgtgtgggcttggtgagggcggggaggcctggctgtgtggatgtctgacaggtgaggcgggggacgcagaagtgcagccgccctctcccacagcggagtccaaaacaggcctaccagtcagttcttatttctattgggtgtttccatgctccaccatgttaagagctaagaatcagctttttttactttcacctcattacctgaggcaggtaaaagaatcatcaggctccaggctcatacagcaacgacttctacaccagcaacagccccttcacccagaatgggctgccctggctaaaaagcagctgaaaggcaaaaacccagaagacctaatatggcacaccccggaagggatctctataaaacccttgtattccaagagagatactatggacttacctgaagaacttccaggagtgaagccattcacacgtggaccatatcctaccatgtatacctttaggccctggaccatccgccagtatgctggttttagtactgtggaagaaagcaataagttctataaggacaacattaaggctggtcagcagggattatcagttgcctttgatctggcgacacatcgtggctatgattcagacaaccctcgagttcgtggtgatgttggaatggctggagttgctattgacactgtggaagataccaaaattctttttgatggaattcctttagaaaaaatgtcagtttccatgactatgaatggagcagttattccagttcttgcaaattttatagtaactggagaagaacaaggtgtacctaaagagaagcttactggtaccatccaaaatgatatactaaaggaatttatggttcgaaatacatacatttttcctccagaaccatccatgaaaattattgctgacatatttgaatatacagcaaagcacatgccaaaatttaattcaatttcaattagtggataccatatgcaggaagcaggggctgatgccattctggagctggcctatactttagcagatggattggagtactctagaactggactccaggctggcctgacaattgatgaatttgcaccaaggttgtctttcttctggggaattggaatgaatttctatatggaaatagcaaagatgagagctggtagaagactctgggctcacttaatagagaaaatgtttcagcctaaaaactcaaaatctcttcttctaagagcacactgtcagacatctggatggtcacttactgagcaggatccctacaataatattgtccgtactgcaatagaagcaatggcagcagtatttggagggactcagtctttgcacacaaattcttttgatgaagctttgggtttgccaactgtgaaaagtgctcgaattgccaggaacacacaaatcatcattcaagaagaatctgggattcccaaagtggctgatccttggggaggttcttacatgatggaatgtctcacaaatgatgtttatgatgctgctttaaagctcattaatgaaattgaagaaatgggtggaatggccaaagctgtagctgagggaatacctaaacttcgaattgaagaatgtgctgcccgaagacaagctagaatagattctggttctgaagtaattgttggagtaaataagtaccagttggaaaaagaagacgctgtagaagttctggcaattgataatacttcagtgcgaaacaggcagattgaaaaacttaagaagatcaaatccagcagggatcaagctttggctgaacgttgtcttgctgcactaaccgaatgtgctgctagcggagatggaaatatcctggctcttgcagtggatgcatctcgggcaagatgtacagtgggagaaatcacagatgccctgaaaaaggtatttggtgaacataaagcgaatgatcgaatggtgagtggagcatatcgccaggaatttggagaaagtaaagagataacatctgctatcaagagggttcataaattcatggaacgtgaaggtcgcagacctcgtcttcttgtagcaaaaatgggacaagatggccatgacagaggagcaaaagttattgctacaggatttgctgatcttggttttgatgtggacataggccctcttttccagactcctcgtgaagtggcccagcaggctgtggatgcggatgtgcatgctgtgggcataagcaccctcgctgctggtcataaaaccctagttcctgaactcatcaaagaacttaactcccttggacggccagatattcttgtcatgtgtggaggggtgataccacctcaggattatgaatttctgtttgaagttggtgtttccaatgtatttggtcctgggactcgaattccaaaggctgccgttcaggtgcttgatgatattgagaagtgtttggaaaagaagcagcaatctgtataatatcctctttttgttttagcttttgtctaaaatattattttagttatgatcaaagaagagagtaaagctatgtcttcaatttaatttcaatacctgatttgtactttccttgaaagctttactttaaaataccttacttataggcctggtgtcatgctataagtatgtacatacagtttcacttcaaaaataaaaaaaaaatccctaaaaactctctatactctctataacaatactttatcaagaactctggacaatggtattatttttaaaaatcatggtgatgtatttattagaatgtttcttataaatctgtttactttttatattaagaattaaactgtacct

SEQ ID NO: 6300 - protein, 750 aa, Homo sapiens; identical to SEQ ID NO: 6288

SEQ ID NO: 6301 - DNA, 2713 bp, Homo sapiens
ggaatgcgcccatgagagcgctattagattggctggagggagggcggtgtcggcctacgcccccagagtcgtccggctgacgctggcggtggcgcggtttgtgtgggcttggtgagggcggggaggcctggctgtgtggatgtctgacaggtgaggcgggggacgcagaagtgcagccgccctctcccacagcggagtccaaaacaggcctaccagtcagttcttatttctattgggtgtttccatgctccaccatgttaagagctaagaatcagctttttttactttcacctcattacctgaggcaggtaaaagaatcatcaggctccaggctcatacagcaacgacttctacaccagcaacagccccttcacccagaatgggctgccctggctaaaaagcagctgaaaggcaaaaacccagaagacctaatatggcacaccccggaagggatctctataaaacccttgtattccaagagagatactatggacttacctgaagaacttccaggagtgaagccattcacacgtggaccatatcctaccatgtatacctttaggccctggaccatccgccagtatgctggttttagtactgtggaagaaagcaataagttctataaggacaacattaaggctggtcagcagggattatcagttgcctttgatctggcgacacatcgtggctatgattcagacaaccctcgagttcgtggtgatgttggaatggctggagttgctattgacactgtggaagataccaaaattctttttgatggaattcctttagaaaaaatgtcagtttccatgactatgaatggagcagttattccagttcttgcaaattttatagtaactggagaagaacaaggtgtacctaaagagaagcttactggtaccatccaaaatgatatactaaaggaatttatggttcgaaatacatacatttttcctccagaaccatccatgaaaattattgctgacatatttgaatatacagcaaagcacatgccaaaatttaattcaatttcaattagtggataccatatgcaggaagcaggggctgatgccattctggagctggcctatactttagcagatggattggagtactctagaactggactccaggctggcctgacaattgatgaatttgcaccaaggttgtctttcttctggggaattggaatgaatttctatatggaaatagcaaagatgagagctggtagaagactctgggctcacttaatagagaaaatgtttcagcctaaaaactcaaaatctcttcttctaagagcacactgtcagacatctggatggtcacttactgagcaggatccctacaataatattgtccgtactgcaatagaagcaatggcagcagtatttggagggactcagtctttgcacacaaattcttttgatgaagctttgggtttgccaactgtgaaaagtgctcgaattgccaggaacacacaaatcatcattcaagaagaatctgggattcccaaagtggctgatccttggggaggttcttacatgatggaatgtctcacaaatgatgtttatgatgctgctttaaagctcattaatgaaattgaagaaatgggtggaatggccaaagctgtagctgagggaatacctaaacttcgaattgaagaatgtgctgcccgaagacaagctagaatagattctggttctgaagtaattgttggagtaaataagtaccagttggaaaaagaagacgctgtagaagttctggcaattgataatacttcagtgcgaaacaggcagattgaaaaacttaagaagatcaaatccagcagggatcaagctttggctgaacgttgtcttgctgcactaaccgaatgtgctgctagcggagatggaaatatcctggctcttgcagtggatgcatctcgggcaagatgtacagtgggagaaatcacagatgccctgaaaaaggtatttggtgaacataaagcgaatgatcgaatggtgagtggagcatatcgccaggaatttggagaaagtaaagagataacatctgctatcaagagggttcataaattcatggaacgtgaaggtcgcagacctcgtcttcttgtagcaaaaatgggacaagatggccatgacagaggagcaaaagttattgctacaggatttgctgatcttggttttgatgtggacataggccctcttttccagactcctcgtgaagtggcccagcaggctgtggatgcggatgtgcatgctgtgggcataagcaccctcgctgctggtcataaaaccctagttcctgaactcatcaaagaacttaactcccttggacggccagatattcttgtcatgtgtggaggggtgataccacctcaggattatgaatttctgtttgaagttggtgtttccaatgtatttggtcctgggactcgaattccaaaggctgccgttcaggtgcttgatgatattgagaagtgtttggaaaagaagcagcaatctgtataatatcctctttttgttttagcttttgtctaaaatattattttagttatgatcaaagaagagagtaaagctatgtcttcaatttaatttcaatacctgatttgtactttccttgaaagctttactttaaaataccttacttataggcctggtgtcatgctataagtatgtacatacagtttcacttcaaaaataaaaaaaaaatccct

SEQ ID NO: 6302 - protein, 750 aa, Homo sapiens; identical to SEQ ID NO: 6288

SEQ ID NO: 6303 - DNA, 1673 bp, Homo sapiens
gctggagacagtgaggagaagaaaggggcgggacaagggcaaaggcgttagaagtcaccaccgacccagcccctcaacagcaagttggttcttcagcattaagatccaggtgtcagcctatgtctttatattgtcaagatgtctctttctaagaagttgactttagacaaactggatgttagagggaagcgagtcatcatgagagtagacttcaatgttcccatgaagaagaaccagattacaaacaaccagaggatcaaggcttccatcccaagcatcaagtactgcctggacaatggagccaaggcagtagttcttatgagtcatctaggtcggcctgatggtgttcccatgcctgacaaatattccttagcacctgttgctgttgagctcaaatccttgctgggcaaggatgttctgttcctgaaggactgtgtaggcgcagaagtggagaaagcctgtgccaacccagctcctggttcagtcatcctgctggagaacctgcgctttcatgtggaggaagaagggaagggccaagatccctctggaaagaagattaaagctgagccagataaaatagaagccttccgagcatcactttccaagctaggggacgtctatgtcaatgatgcttttggcactgcacaccgcgctcatagttccatggtgggagtgaatctgccccataaagcatccggattcttgatgaagaaggaactagattactttgctaaagccttggaaaacccagtgagaccctttctggctatacttggtggagccaaagtggcagacaagatccaacttatcaaaaatatgctggacaaagtcaatgagatgattattggtggtggaatggcttataccttccttaaggtactcaacaacatggagattggtgcttccctgtttgatgaagagggagccaagatcgttaaagatatcatggccaaagcacaaaagaatggtgtaaggattacttttcctgttgattttgttactggggacaagtttgacgagaacgctcaggttggaaaagccactgtagcatctggcatatctcctggctggatgggtttggactgtggtcctgagagcaacaagaatcatgctcaagttgtggctcaagcaaggctaattgtttggaatgggccgttaggagtatttgaatgggatgcctttgctaagggaaccaaagccctcatggatgaaattgtgaaagccacttccaagggctgcatcactgttatagggggtggagacactgctacttgctgtgccaaatggaacactgaagataaagtcagccatgtcagcactggaggcggtgccagtctagagcttctggaaggtaaaatccttcctggagtagaggccctcagcaacatgtagttaatatagtgttacttccttctgttttctgtccatggcccttaagtcagcttaatgcttttacatctcgatgtgacttttgttaaaatctactcctagatcaagacctatgtaatggacaagcagcaggccatcaggaactcttaatatcagcacagcaattcattttagtttggtcacgcatttgcctgttcaagttctcatttgaacttcaccattgtgctatctagggaggacatattcttaagttgcctattaaagaaagtgagctgaagaaactg

SEQ ID NO: 6304 - protein, 417 aa, Homo sapiens; identical to SEQ ID NO: 775

SEQ ID NO: 6305 - DNA, 692 bp, Homo sapiens
ggggcgggacaagggcaaaggcgttagaagtcaccaccgacccagcccctcaacagcaagttggttcttcagcattaagatccaggtgtcagcctatgtctttatattgtcaagatgtctctttctaagaagttgactttagacaaactggatgttagagggaagcgagtcatcatgagagtagacttcaatgttcccatgaagaagaaccagattacaaacaaccagaggatcaaggcttccatcccaagcatcaagtactgcctggacaatggagccaaggcagtagttcttatgagtcatctaggtcggcctgatggtgttcccatgcctgacaaatattccttagcacctgttgctgttgagctcaaatccttgctggccagataaaatagaagccttccgagcatcactttccaagctaggggacgtctatgtcaatgatgcttttggcactgcacaccgcgctcatagttccatggtgggagtgaatctgccccataaagcatccggattcttgatgaagaaggaactagattactttgctaaagccttggaaaacccagtgagaccctttctggctatacttggtggagccaaagtggcagacaagatccaacttatcaaaaatatgctggacaaagtcaatgagatgattattggtggtggaatggcttataccttccttaagg

SEQ ID NO: 6306 - protein, 91 aa, Homo sapiens
MSLSKKLTLDKLDVRGKRVIMRVDFNVPMKKNQITNNQRIKASIPSIKYCLDNGAKAVVLMSHLGRPDGVPMPDKYSLAPVAVELKSLLAR

SEQ ID NO: 6307 - DNA, 1843 bp, Homo sapiens
gtcttaaatcttagctgttttgcataatgcatgatcctctctctctctctctgtctctttctctctctctctctccctctgtttttcagaggtgagggtcctgctgtgttacccaggccggagtgcagtgactacttacaggcacgatcatagtgcactagagccttgaactcccgggctccagtattactcctgcctcagcctcctgagtatctgggactataggagtgcaccaccattcctggcataatcctctttttatgttgagttgaagaaagtcacaagacgtgagacgctttatgttgcagttaatggtctcttcctcccttttctctgttcctgcaaatggacaattattccttctcacaaggtttttggcttcccacttcagcatgcctccagcagtgttctaaaattactctacaattgccaaagtaagagcagcagatgctctaaatctatttccaggacacccgtctcatgatcaaggacaaatggggtccaaactccttggctgccagatgagcaaaactggagtaaagatgctgcgcaaaaggccaaaatgatgtcaaagcagtgtaaactgatacagatcaaagaacaggagtggaaaattgcaagcagggatatgtagcggctctgtatggcccaatgtgctcaaaactctccagaggttgttaatttcctggcaagatgaggttacatcatacagtctgtatttgcatatgtacccatacttgacagtgaaatatggtctaatacacaggttttattattattattatttaatttgaatattcacatttataggttccaaattcaggtcaccaaggataagggaatcaaagctctaaaaattatagaatatttgagcaatgcaataatgactggacaggcagctagatgcttagatggtttccactcaatgcagttgtctcagctacccacaatatattaccgctaggatttctttagctttaggaattgtcgataggcaattcttctgatctgcccataagaacatttttaaggggtcaaaggtgagcccatctcatggcaatacgataaccatgtaaattaggttcactgctagttttcagaaaagccattagtactttctacacaagtggatattaaaaatatctacaagaatattttattataaaataataaaaagtactaatgggacttctatatctatagattattggtaatctttgagcaatatcattgacaaattaattttcagtagcaaaactgaataaaactaagctcttttagctattctccaaaactcttatgacaaaaggattccaccatattgtacgctttagcatttgtaactcgtcaagaattgtttttatttctcaagtgtactacttgtatatagacacatatatgaccttattttatcacacatccaccttaaaaatacatagcaagtaaaagtagctcttaaagaaagtagctcttaaaagtagctctttagaaagcaacattgggtgcaggaactaagaggactggctggtgcttttcatcagtagtaggtggtggtggctaaggtttccactgtgggcacagcccaacacagccctatcaaactgactctgcagatcaccaaatggctaacattacactgaaaagtgtagggaaaatattgatttgtttattttctatgaattgagctaactttcctcactagtcttgttgttaaatagtggagaaaaaaaatttgaaaaaaaaataaaataaatttgaattcaatggagcaaatttggtctaatgcagtacaatactttttaaaatctgtctttgcaaattaaaataaaatactgttatcttg

SEQ ID NO: 6308 - protein, 37 aa, Homo sapiens
MLQLMVSSSLFSVPANGQLFLLTRFLASHFSMPPAVF

SEQ ID NO: 6309 - DNA, 510 bp, Homo sapiens
agaggtgagggtcctgctgtgttacccaggccggagtgcagtgactacttacaggcacgatcatagtgcactagagccttgaactcccgggctccagtattactcctgcctcagcctcctgagtatctgggactataggagtgcaccaccattcctggcataatcctctttttatgttgagttgaagaaagtcacaagacgtgagacgctttatgttgcagttaatggtctcttcctcccttttctctgttcctgcaaatggacaattattccttctcacaaggtttttggcttcccacttcagcatgcctccagcagtgttctaaaattactctacaattgccaaagtaagagcagcagatgctctaaatctatttccaggacacccgtctcatgatcaagaacaactgctgctgacaagtacccaagagcatatctgtgcctcagtttcctaatttgtaaacggagataacaatagtacttccattttggagttgctgtgaggaaaaa

SEQ ID NO: 6310 - protein, 37 aa, Homo sapiens; identical to SEQ ID NO: 6308

SEQ ID NO: 6311 - DNA, 454 bp, Homo sapiens
acagcaactccaaaatggaagtactattgttatctccgtttacaaattaggaaactgaggcacagatatgctcttgggtacttgtcagcagcagttgttctacaaatgagcgtcttagcctctggattactgctcaatgaggaaagctatgaaatgcatggataacttgctaatcagtatttgccatatgtgctagcagcatcagcatcagttgggagattatggtggcctccatgtcagacctcctaaatcggaatatcagagaaggtggcccaggttaccatgcttcatctgccaatgcattgaaaacttggaatgtaaattaattcaaccattgtggaagatggtgtagtgattcctcaaagacctagaagcagaaatatcatttgatccagaaatcccattactgtgtatacacccaaaggaatataaaccattctattacaaagataca

SEQ ID NO: 6312 - protein, 34 aa, Homo sapiens
MVASMSDLLNRNIREGGPGYHASSANALKTWNVN

SEQ ID NO: 6313 - DNA, 702 bp, Homo sapiens
agaggtgagggtcctgctgtgttacccaggccggagtgcagtgactacttacaggcacgatcatagtgcactagagccttgaactcccgggctccagtattactcctgcctcagcctcctgagtatctgggactataggagtgcaccaccattcctggcataatcctctttttatgttgagttgaagaaagtcacaagacgtgagacgctttatgttgcagttaatggtctcttcctcccttttctctgttcctgcaaatggacaattattccttctcacaaggtttttggcttcccacttcagcatgcctccagcagtgttctaaaattactctacaattgccaaagtaagagcagcagatgctctaaatctatttccaggacacccgtctcatgatcaaggtataaattctgcagtgatcaaaattcataaaggaaaatgaggctcctgcgtgtgtgtattagaagataattatgcaggcatgtagaagttgtattccagtttttattaacaaattcattacattatttaatgatttaaaaaaatctccctaagactaaaattaagaaaatcttagtaatgaagtatcattagaaaattaactttgttattgtggatttgaaatctctagctcctcatcgttattttaaaattctattgaaggatcatttttgaagcactttatgaaaaacaaaaaaatt

SEQ ID NO: 6314 - protein, 37 aa, Homo sapiens; identical to SEQ ID NO: 6308

SEQ ID NO: 6315 - DNA, 1888 bp, Homo sapiens
ttaaaagcacaaatacactacatagagaaaggcttggttcttatcaggacacaaatttaaaggctgtgtggacttggggatggaaattaaacacctcttgtttttggttgctgctgcttgcttactgcctatgttgtccatgaaaaagaaatcagctagagaccaatttaataagctcgtcaccgacttgccaaatgtacaagaagagatcgttaatatacacaacgccctcaggagaagagtagttccaccagccagcaacatgctgaagatgagttggagtgaagaggctgcacaaaatgccagaattttttcaaagtattgtgatatgacagagagcaacccccttgagaggagacttccaaataccttttgtggagaaaatatgcatatgacatcttatcctgtatcatggtcaagtgtaattggagtctggtacagtgagtctacaagtttcaaacatggagaatggacaacaacggatgatgacataactactgaccactacactcagattgtttgggccacatcttacctgattggctgtgccattgcatcttgccgccaacaaggatcacctcgatatctctacgtttgtcactattgtcatgagggaaatgatcctgaaacaaagaatgaaccttataagacaggcgtcccatgtgaagcctgcccaagtaactgtgaagacaaactttgcactaacccctgcatctactatgatgaatacttcgactgtgacatacaagtccattatctgggatgcaaccactcaacaactatcctattctgtaaagccacttgtctgtgtgacactgagataaaataggtctttgttattttcaactgttctatgctgtgacgatgaggaggagatgtctgttggattcatgtcttttgctatagttcagtagcttctgctaaatttcactgattttaatcatgctggagaccttaactcccatcctgatacatcctgaagtaacactgttttaaactttcttagtgctggagtaaaaggtcaagtccaacacctgccttaaatttaaatcatgtgatttatagtttttaagttggcataattcaacttatggtataactgggtccctcaacagtaacctgggctaaaataggtcttatgtggttcaactcccacccccgccttccccatattttcaaccactctgattatcttccctgcacaactaacatccagtaataattcttcacttttaaaattttacttctactttaaatcaatcattaaaggaatccacaaagcaaacagagttcagtctcatcttgcaaggtaaatatcatttaattggaagtagtttaaatgtctcattgttttattgacacatctatatatacatttgtgaagcaagaaacaataaaaaagcttcgtatgccattaatttaacaaaatatgtattcagtactgattgcatacaagatgcatgtttatatatatggaaggaatatagtttcatttcattgcaaaggcagtataaaagatatataaaatagcataatatgagaaattaagtccctaaagacatataggtcacatattattattgccagatgagcataaatagcttctgtttggagattcaggaaagccttagggtggaatgaggaacatcttctgagtaaacagggttgcaaaggttatgattatttcaacacaatggaagagcacagttaaggccaactaacgtaaaatgcactgaagccttagggaatattgaagggcctgacatggggaaagggaaggctaaaaatacttggtcaaattttaacattataccaaagttatacccagttctacctacttgtatatttctttactcatttcaataaagtgtttgaaaaaaaaaaaaaa

SEQ ID NO: 6316 - protein, 249 aa, Homo sapiens; identical to SEQ ID NO: 777

SEQ ID NO: 6317 - DNA, 1799 bp, Homo sapiens
ttaaaagcacaaatacactacatagagaaaggcttggttcttatcaggacacaaatttaaaggctgtgtggacttggggatggaaattaaacacctcttgtttttggttgctgctgcttgcttactgcctatgttgtccatgaaaaagaaatcagctagagaccaatttaataagctcgtcaccgacttgccaaatgtacaagaagagatcgttaatatacacaacgccctcaggagaagagtagttccaccagccagcaacatgctgaagatgagttggagtgaagaggctgcacaaaatgccagaattttttcaaagtattgtgatatgacagagagcaacccccttgagaggagacttccaaataccttttgtggagaaaatatgcatatgacatcttatcctgtatcatggtcaagtgtaattggagtctggtacagtgagtctacaagtttcaaacatggagaatggacaacaacggatgatgacataactactgaccactacactcagattgtttgggccacatcttacctgattggctgtgccattgcatcttgccgccaacaaggatcacctcgatatctctacgtttgtcactattgtcatgactaacccctgcatctactatgatgaatacttcgactgtgacatacaagtccattatctgggatgcaaccactcaacaactatcctattctgtaaagccacttgtctgtgtgacactgagataaaataggtctttgttattttcaactgttctatgctgtgacgatgaggaggagatgtctgttggattcatgtcttttgctatagttcagtagcttctgctaaatttcactgattttaatcatgctggagaccttaactcccatcctgatacatcctgaagtaacactgttttaaactttcttagtgctggagtaaaaggtcaagtccaacacctgccttaaatttaaatcatgtgatttatagtttttaagttggcataattcaacttatggtataactgggtccctcaacagtaacctgggctaaaataggtcttatgtggttcaactcccacccccgccttccccatattttcaaccactctgattatcttccctgcacaactaacatccagtaataattcttcacttttaaaattttacttctactttaaatcaatcattaaaggaatccacaaagcaaacagagttcagtctcatcttgcaaggtaaatatcatttaattggaagtagtttaaatgtctcattgttttattgacacatctatatatacatttgtgaagcaagaaacaataaaaaagcttcgtatgccattaatttaacaaaatatgtattcagtactgattgcatacaagatgcatgtttatatatatggaaggaatatagtttcatttcattgcaaaggcagtataaaagatatataaaatagcataatatgagaaattaagtccctaaagacatataggtcacatattattattgccagatgagcataaatagcttctgtttggagattcaggaaagccttagggtggaatgaggaacatcttctgagtaaacagggttgcaaaggttatgattatttcaacacaatggaagagcacagttaaggccaactaacgtaaaatgcactgaagccttagggaatattgaagggcctgacatggggaaagggaaggctaaaaatacttggtcaaattttaacattataccaaagttatacccagttctacctacttgtatatttctttactcatttcaataaagtgtttgaaaaaaaaaaaaaa

SEQ ID NO: 6318 - protein, 178 aa, Homo sapiens; identical to SEQ ID NO: 779

SEQ ID NO: 6319 - DNA, 1294 bp, Homo sapiens
tctttgcagctaccaggacagagcttggtgagataattcttttattcttcaacttttattttaacttcaatggtacatgtgcagggatggaaattaaacacctcttgtttttggttgctgctgcttgcttactgcctatgttgtccatgaaaaagaaatcagctagagaccaatttaataagctcgtcaccgacttgccaaatgtacaagaagagatcgttaatatacacaacgccctcaggagaagagtagttccaccagccagcaacatgctgaagatgagttggagtgaagaggctgcacaaaatgccagaattttttcaaagtattgtgatatgacagagagcaacccccttgagaggagacttccaaataccttttgtggagaaaatatgcatatgacatcttatcctgtatcatggtcaagtgtaattggagtctggtacagtgagtctacaagtttcaaacatggagaatggacaacaacggatgatgacataactactgaccactacactcagattgtttgggccacatcttacctgattggctgtgccattgcatcttgccgccaacaaggatcacctcgatatctctacgtttgtcactattgtcatgagggaaatgatcctgaaacaaagaatgaaccttataagacaggcgtcccatgtgaagcctgcccaagtaactgtgaagacaaactttgcactaacccctgcatctactatgatgaatacttcgactgtgacatacaagtccattatctgggatgcaaccactcaacaactatcctattctgtaaagccacttgtctgtgtgacactgagataaaataggtctttgttattttcaactgttctatgctgtgacgatgaggaggagatgtctgttggattcatgtcttttgctatagttcagtagcttctgctaaatttcactgattttaatcatgctggagaccttaactcccatcctgatacatcctgaagtaacactgttttaaactttcttagtgctggagtaaaaggtcaagtccaacacctgccttaaatttaaatcatgtgatttatagtttttaagttggcataattcaacttatggtataactgggtccctcaacagtaacctgggctaaaataggtcttatgtggttcaactcccacccccgccttccccatattttcaaccactctgattatcttccctgcacaactaacatccagtaataattcttcacttttaaaattttacttctactttaaatcaatcattaaaggaatccacaaagcaaaca

SEQ ID NO: 6320 - protein, 249 aa, Homo sapiens; identical to SEQ ID NO: 777

SEQ ID NO: 6321 - DNA, 1592 bp, Homo sapiens
ctccagtctgtctgtgctctcaaaaactttagtcgttataacaactgtgactgttgagaaatttcactgttttcctgcattcctggcgcgggactctagccagaggctccgaggactttgtagcgactgtcccaagcgtccagttcgatgcttctcagggcggcttgctttaagggcccacccctaaatttgggttgtaaaaatttttgaggcagaagctgaggaagattgtcattctgatactgtcagagcagatgatgatgaagaaaatgaaagtcctgctgaaacagatctgcaggcacaactccagatgttccgagctcagtggatgtttgaacttgctccaggtgtaagctctagcaatttagaaaatcgaccttgcagagcagcaagaggctctctccagaaaacatcggcagataccaaaggaaaacaagaacaggcaaaagaagaaaagctcgagaactcttcctaaaagcagtagaagaagaacaaaatggagctctctatgaagccatcaagttttatcgtagggctatgcaacttgtacctgatatagagttcaagattacttatacccggtctccagatggtgatggcgttggaaacagctacattgaagataatgatgatgacagcaaaatggcagatctcttgtcctacttccagcagcaactcacatttcaggagtctgtgcttaaactgtgtcagcctgagcttgagagcagtcagattcacatatcagtgctgccaatggaggtcctgatgtacatcttccgatgggtggtgtctagtgacttggacctcagatcattggagcagttgtcgctggtgtgcagaggattctacatctgtgccagagaccctgaaatatggcgtctggcctgcttgaaagtttggggcagaagctgtattaaacttgttccgtacacgtcctggagagagatgtttttagaacggcctcgtgttcggtttgatggcgtgtatatcagtaaaaccacatatattcgtcaaggggaacagtctcttgatggtttctatagagcctggcaccaagtggaatattacaggtacataagattctttcctgatggccatgtgatgatgttgacaacccctgaagagcctcagtccattgttccacgtttaagaactaggaataccaggactgatgcaattctactgggtcactatcgcttgtcacaagacacagacaatcagaccaaagtatttgctgtaataactaagaaaaaagaagaaaaaccacttgactataaatacagatattttcgtcgtgtccctgtacaagaagcagatcagagttttcatgtggggctacagctatgttccagtggtcaccagaggttcaacaaactcatctggatacatcattcttgtcacattacttacaaatcaactggtgagactgcagtcagtgcttttgagattgacaagatgtacacccccttgttcttcgccagagtaaggagctacacagctttctcagaaaggcctctgtagagcctcaagtccagtcctctatcacttttgcatgaattaaagtatatagcgcaaaagagcacctaagttat

SEQ ID NO: 6322 - protein, 327 aa, Homo sapiens
MQLVPDIEFKITYTRSPDGDGVGNSYIEDNDDDSKMADLLSYFQQQLTFQESVLKLCQPELESSQIHISVLPMEVLMYIFRWVVSSDLDLRSLEQLSLVCRGFYICARDPEIWRLACLKVWGRSCIKLVPYTSWREMFLERPRVRFDGVYISKTTYIRQGEQSLDGFYRAWHQVEYYRYIRFFPDGHVMMLTTPEEPQSIVPRLRTRNTRTDAILLGHYRLSQDTDNQTKVFAVITKKKEEKPLDYKYRYFRRVPVQEADQSFHVGLQLCSSGHQRFNKLIWIHHSCHITYKSTGETAVSAFEIDKMYTPLFFARVRSYTAFSERPL

SEQ ID NO: 6323 - DNA, 1849 bp, Homo sapiens
cgcgacccttagccctccactaggcagcccgcggggatgggtggccgggccgcccacacgggcagcaccggcactgcgcatgctcggcgcgtcggcgcaggtttccgcagctgagggggcagctccgcggcggcgtccggggtctccagtagggctgacgctccggtgctcgcacaatcccccgcctcggctggcaacgggcgtccctccactccccgagtccccggcagccgccgccaccccagcgcgccccgatctggccccctgccccgcgaagatggctgccgtacgccgggcccgcagttattgccgctgcctggtgcgcttctccgaccgagaactctgctaagctccgctgcagagacaggcaggagtagacacccggacacccagcacccctcctccggggggcggtgcagagggggcacggagagcccctcgagcgcagcaggccgccccgccagcatggcagaagctgaggaagattgtcattctgatactgtcagagcagatgatgatgaagaaaatgaaagtcctgctgaaacagatctgcaggcacaactccagatgttccgagctcagtggatgtttgaacttgctccaggtgtaagctctagcaatttagaaaatcgaccttgcagagcagcaagaggctctctccagaaaacatcggcagataccaaaggaaaacaagaacaggcaaaagaagaaaagctcgagaactcttcctaaaagcagtagaagaagaacaaaatggagctctctatgaagccatcaagttttatcgtagggctatgcaacttgtacctgatatagagttcaagattacttatacccggtctccagatggtgatggcgttggaaacagctacattgaagataatgatgatgacagcaaaatggcagatctcttgtcctacttccagcagcaactcacatttcaggagtctgtgcttaaactgtgtcagcctgagcttgagagcagtcagattcacatatcagtgctgccaatggaggtcctgatgtacatcttccgatgggtggtgtctagtgacttggacctcagatcattggagcagttgtcgctggtgtgcagaggattctacatctgtgccagagaccctgaaatatggcgtctggcctgcttgaaagtttggggcagaagctgtattaaacttgttccgtacacgtcctggagagagatgtttttagaacggcctcgtgttcggtttgatggcgtgtatatcagtaaaaccacatatattcgtcaaggggaacagtctcttgatggtttctatagagcctggcaccaagtggaatattacaggtacataagattctttcctgatggccatgtgatgatgttgacaacccctgaagagcctcagtccattgttccacgtttaagaactaggaataccaggactgatgcaattctactgggtcactatcgcttgtcacaagacacagacaatcagaccaaagtatttgctgtaataactaagaaaaaagaagaaaaaccacttgactataaatacagatattttcgtcgtgtccctgtacaagaagcagatcagagttttcatgtggggctacagctatgttccagtggtcaccagaggttcaacaaactcatctggatacatcattcttgtcacattacttacaaatcaactggtgagactgcagtcagtgcttttgagattgacaagatgtacacccccttgttcttcgccagagtaaggagctacacagctttctcagaaaggcctctgtagagcctcaagtccagtcctctatcacttttgcatgaattaaagtatatagcgcaaaagagcacctaagttat

SEQ ID NO: 6324 - protein, 327 aa, Homo sapiens; identical to SEQ ID NO: 6322

SEQ ID NO: 6325 - DNA, 2317 bp, Homo sapiens
cgcgacccttagccctccactaggcagcccgcggggatgggtggccgggccgcccacacgggcagcaccggcactgcgcatgctcggcgcgtcggcgcaggtttccgcagctgagggggcagctccgcggcggcgtccggggtctccagtagggctgacgctccggtgctcgcacaatcccccgcctcggctggcaacgggcgtccctccactccccgagtccccggcagccgccgccaccccagcgcgccccgatctggccccctgccccgcgaagatggctgccgtacgccgggcccgcagttattgccgctgcctggtgcgcttctccgaccgagaactctgctaagctccgctgcagagacaggcaggagtagacacccggacacccagcacccctcctccggggggcggtgcagagggggcacggagagcccctcgagcgcagcaggccgccccgccagcatggcagaagctgaggaagattgtcattctgatactgtcagagcagatgatgatgaagaaaatgaaagtcctgctgaaacagatctgcaggcacaactccagatgttccgagctcagtggatgtttgaacttgctccaggtgtaagctctagcaatttagaaaatcgaccttgcagagcagcaagaggctctctccagaaaacatcggcagataccaaaggaaaacaagaacaggcaaaagaagaaaagctcgagaactcttcctaaaagcagtagaagaagaacaaaatggagctctctatgaagccatcaagttttatcgtagggctatgcaacttgtacctgatatagagttcaagattacttatacccggtctccagatggtgatggcgttggaaacagctacattgaagataatgatgatgacagcaaaatggcagatctcttgtcctacttccagcagcaactcacatttcaggagtctgtgcttaaactgtgtcagcctgagcttgagagcagtcagattcacatatcagtgctgccaatggaggtcctgatgtacatcttccgatgggtggtgtctagtgacttggacctcagatcattggagcagttgtcgctggtgtgcagaggattctacatctgtgccagagaccctgaaatatggcgtctggcctgcttgaaagtttggggcagaagctgtattaaacttgttccgtacacgtcctggagagagatgtttttagaacggcctcgtgttcggtttgatggcgtgtatatcagtaaaaccacatatattcgtcaaggggaacagtctcttgatggtttctatagagcctggcaccaagtggaatattacaggtacataagattctttcctgatggccatgtgatgatgttgacaacccctgaagagcctcagtccattgttccacgtttaagaactaggaataccaggactgatgcaattctactgggtcactatcgcttgtcacaagacacagacaatcagaccaaagtatttgctgtaataactaagaaaaaagaagaaaaaccacttgactataaatacagatattttcgtcgtgtccctgtacaagaagcagatcagagttttcatgtggggctacagctatgttccagtggtcaccagaggttcaacaaactcatctggatacatcattcttgtcacattacttacaaatcaactggtgagactgcagtcagtgcttttgagattgacaagatgtacacccccttgttcttcgccagagtaaggagctacacagctttctcagaaaggcctctgtagagcctcaagtccagtcctctatcacttttgcatgaattaaagtatatagcgcaaaagagcacctaagttataaatgtgtgtgtgtgcgtgtgtgtgtatatatatatatatatatatatatatatatatatatatatatatatatggaattggaacttattttaaattgttggagttcttttaagaagaatataaattgattattttttttatttaaagggatagttgattcctggggtgttttgaaattaagttggaattaagttgcttaagcatatttatgttgtgagaaaccttaatatgaggtttatcatgccctttttcaagcagatttatgagcagatttctgtcacataagtcgtcttctgcttgagtatcctaatatttcaatgcatcaggggagcgctccactggataagcattttatttcccgcatggcataatgtttttgcactaaaggctcaaagtgtgagaacctgttctggatttgtttgaaattatttcaccaataaagatcataaataaatgtttctttcaag

SEQ ID NO: 6326 - protein, 327 aa, Homo sapiens; identical to SEQ ID NO: 6322

SEQ ID NO: 6327 - DNA, 3551 bp, Homo sapiens
cgcgacccttagccctccactaggcagcccgcggggatgggtggccgggccgcccacacgggcagcaccggcactgcgcatgctcggcgcgtcggcgcaggtttccgcagctgagggggcagctccgcggcggcgtccggggtctccagtagggctgacgctccggtgctcgcacaatcccccgcctcggctggcaacgggcgtccctccactccccgagtccccggcagccgccgccaccccagcgcgccccgatctggccccctgccccgcgaagatggctgccgtacgccgggcccgcagttattgccgctgcctggtgcgcttctccgaccgagaactctgctaagctccgctgcagagacaggcaggagtagacacccggacacccagcacccctcctccggggggcggtgcagagggggcacggagagcccctcgagcgcagcaggccgccccgccagcatggcagaagctgaggaagattgtcattctgatactgtcagagcagatgatgatgaagaaaatgaaagtcctgctgaaacagatctgcaggcacaactccagatgttccgagctcagtggatgtttgaacttgctccaggtgtaagctctagcaatttagaaaatcgaccttgcagagcagcaagaggctctctccagaaaacatcggcagataccaaaggaaaacaagaacaggcaaaagaagaaaagctcgagaactcttcctaaaagcagtagaagaagaacaaaatggagctctctatgaagccatcaagttttatcgtagggctatgcaacttgtacctgatatagagttcaagattacttatacccggtctccagatggtgatggcgttggaaacagctacattgaagataatgatgatgacagcaaaatggcagatctcttgtcctacttccagcagcaactcacatttcaggagtctgtgcttaaactgtgtcagcctgagcttgagagcagtcagattcacatatcagtgctgccaatggaggtcctgatgtacatcttccgatgggtggtgtctagtgacttggacctcagatcattggagcagttgtcgctggtgtgcagaggattctacatctgtgccagagaccctgaaatatggcgtctggcctgcttgaaagtttggggcagaagctgtattaaacttgttccgtacacgtcctggagagagatgtttttagaacggcctcgtgttcggtttgatggcgtgtatatcagtaaaaccacatatattcgtcaaggggaacagtctcttgatggtttctatagagcctggcaccaagtggaatattacaggtacataagattctttcctgatggccatgtgatgatgttgacaacccctgaagagcctcagtccattgttccacgtttaagaactaggaataccaggactgatgcaattctactgggtcactatcgcttgtcacaagacacagacaatcagaccaaagtatttgctgtaataactaagaaaaaagaagaaaaaccacttgactataaatacagatattttcgtcgtgtccctgtacaagaagcagatcagagttttcatgtggggctacagctatgttccagtggtcaccagaggttcaacaaactcatctggatacatcattcttgtcacattacttacaaatcaactggtgagactgcagtcagtgcttttgagattgacaagatgtacacccccttgttcttcgccagagtaaggagctacacagctttctcagaaaggcctctgtagagcctcaagtccagtcctctatcacttttgcatgaattaaagtatatagcgcaaaagagcacctaagttataaatgtgtgtgtgtgcgtgtgtgtgtatatatatatatatatatatatatatatatatatatatatatatatatggaattggaacttattttaaattgttggagttcttttaagaagaatataaattgattattttttttatttaaagggatagttgattcctggggtgttttgaaattaagttggaattaagttgcttaagcatatttatgttgtgagaaaccttaatatgaggtttatcatgccctttttcaagcagatttatgagcagatttctgtcacataagtcgtcttctgcttgagtatcctaatatttcaatgcatcaggggagcgctccactggataagcattttatttcccgcatggcataatgtttttgcactaaaggctcaaagtgtgagaacctgttctggatttgtttgaaattatttcaccaataaagatcataaataaatgtttctttcaagaaaatatatttggatggcctttttaaagtaacaggatatttaataagagtcctagatagccagcggagactttaagaatcattgcctctagctgggtgtggtggcatgcacctgtagtcccagctatttgggaggctgatgcaggagaatagcttaagcccaggaatttgagtctgggagtttgagtccagcatgggcaacataacaagaccccatcccttattaaaagaaaaaaaaataattcctcatttcatcattggtctttatatgtagccacaaacactgacctcatgtaggcaccttaccaatatatgacattaagtgagagtgaatcccttaggactggaacacttcaagctcaaccaactgactcagttgtcattcttcacaaaagaatagtagaggatcatgtaaacctgagcctaactcttgttccagtatgaaagttgggggagagcaccagccacctaggaaaactgtatgttacctttttactcaaaggagtcccccctgcccagtaacagtcctattagtgtttaatttcagagtttgtgtctggtagacctctacctgattcagatttggttttgttgtttcaaccatagttagagacaaattctcatgtactttcagaaatcaatatctgcagccactgttacttttaattgacattaagagacacttcataggttcccacaattcagtatgggataggctttttaaaaagcacatacagaccaggcgtggtggctcatgcctataatcccagcactttgggaggctaagacaggcagatcacctgagctcaggagtccaagaccagcctgggcaacatggcaaaacaccgtctctacaaaaaaaaaaaaaaaaaaaattagccaagtacagtggggcacacctatagtcgcagctacttgggaggctggggcaggagaattgcctgagcctgggaagtggaagttgcagtgagccaagatcgtgccattccactccagcctgagcaacacagtgagaccctatctcaaaaaaataatgatgatagtacacgttatgttaaaggtgaaatgtgcatacagaaggaagagagttggccaggtgtggtgactcacacctataatcccaatactttgggaggccaaggcaggaggattgcttgaggtcaggagttttagaccagcctggacaacatagcaagacctcatctcttctaaaaattaaaaaaaaaaaaaatagg

SEQ ID NO: 6328 - protein, 327 aa, Homo sapiens; identical to SEQ ID NO: 6322

SEQ ID NO: 6329 - DNA, 773 bp, Homo sapiens
agagaatatgcttttcagactcattttcctttggaaattaatagtaaggtctcaagtgccccctacagccttgctactcaaagtgggttccacaaagtgttgacagtatggtactaaatagaaagtggctgaatgagaaatgtagattgcagagggcaactggtgtgtttatatgcctgacattatttgggttttcccccctcaggcagaagctgaggaagattgtcattctgatactgtcagagcagatgatgatgaagaaaatgaaagtcctgctgaaacagatctgcaggcacaactccagatgttccgagctcagtggatgtttgaacttgctccaggtgtaagctctagcaatttagaaaatcgaccttgcagagcagcaagaggctctctccagaaaacatcggcagataccaaaggaaaacaagaacaggcaaaagaagaaaagttaagtattatagatattgtaacaaattacatttttttttttttggcacatggaaattttcactgacacagtaagtaggcattataaccagactttcgggacataaacacatatcttgtaaaataaaaattttgactagtatactagtttatatatttctcacaatttcttctaggtactttggatggtaccactactcctgcatggcttttttctctgtgggtacactgtcttcattgagctgtcttttgttaatttatagacctctgggattcatgtggttcctaaaagattggtgtctctgaatttattaacagaacca

SEQ ID NO: 6330 - protein, 114 aa, Homo sapiens
MPDIIWVFPPQAEAEEDCHSDTVRADDDEENESPAETDLQAQLQMFRAQWMFELAPGVSSSNLENRPCRAARGSLQKTSADTKGKQEQAKEEKLSIIDIVTNYIFFFLAHGNFH

SEQ ID NO: 6331 - DNA, 2054 bp, Homo sapiens
agagaatatgcttttcagactcattttcctttggaaattaatagtaaggtctcaagtgccccctacagccttgctactcaaagtgggttccacaaagtgttgacagtatggtactaaatagaaagtggctgaatgagaaatgtagattgcagagggcaactggtgtgtttatatgcctgacattatttgggttttcccccctcaggcagaagctgaggaagattgtcattctgatactgtcagagcagatgatgatgaagaaaatgaaagtcctgctgaaacagatctgcaggcacaactccagatgttccgagctcagtggatgtttgaacttgctccaggtgtaagctctagcaatttagaaaatcgaccttgcagagcagcaagaggctctctccagaaaacatcggcagataccaaaggaaaacaagaacaggcaaaagaagaaaagctcgagaactcttcctaaaagcagtagaagaagaacaaaatggagctctctatgaagccatcaagttttatcgtagggctatgcaacttgtacctgatatagagttcaagattacttatacccggtctccagatggtgatggcgttggaaacagctacattgaagataatgatgatgacagcaaaatggcagatctcttgtcctacttccagcagcaactcacatttcaggagtctgtgcttaaactgtgtcagcctgagcttgagagcagtcagattcacatatcagtgctgccaatggaggtcctgatgtacatcttccgatgggtggtgtctagtgacttggacctcagatcattggagcagttgtcgctggtgtgcagaggattctacatctgtgccagagaccctgaaatatggcgtctggcctgcttgaaagtttggggcagaagctgtattaaacttgttccgtacacgtcctggagagagatgtttttagaacggcctcgtgttcggtttgatggcgtgtatatcagtaaaaccacatatattcgtcaaggggaacagtctcttgatggtttctatagagcctggcaccaagtggaatattacaggtacataagattctttcctgatggccatgtgatgatgttgacaacccctgaagagcctcagtccattgttccacgtttaagaactaggaataccaggactgatgcaattctactgggtcactatcgcttgtcacaagacacagacaatcagaccaaagtatttgctgtaataactaagaaaaaagaagaaaaaccacttgactataaatacagatattttcgtcgtgtccctgtacaagaagcagatcagagttttcatgtggggctacagctatgttccagtggtcaccagaggttcaacaaactcatctggatacatcattcttgtcacattacttacaaatcaactggtgagactgcagtcagtgcttttgagattgacaagatgtacacccccttgttcttcgccagagtaaggagctacacagctttctcagaaaggcctctgtagagcctcaagtccagtcctctatcacttttgcatgaattaaagtatatagcgcaaaagagcacctaagttataaatgtgtgtgtgtgcgtgtgtgtgtatatatatatatatatatatatatatatatatatatatatatatatatggaattggaacttattttaaattgttggagttcttttaagaagaatataaattgattattttttttatttaaagggatagttgattcctggggtgttttgaaattaagttggaattaagttgcttaagcatatttatgttgtgagaaaccttaatatgaggtttatcatgccctttttcaagcagatttatgagcagatttctgtcacataagtcgtcttctgcttgagtatcctaatatttcaatgcatcaggggagcgctccactggataagcattttatttcccgcatggcataatgtttttgcactaaaggctcaaagtgtgagaacctgttctggatttgtttgaaattatttcaccaataaagatcataaataaatgtttctttcaag

SEQ ID NO: 6332 - protein, 327 aa, Homo sapiens; identical to SEQ ID NO: 6322

SEQ ID NO: 6333 - DNA, 2925 bp, Homo sapiens
agagaatatgcttttcagactcattttcctttggaaattaatagtaaggtctcaagtgccccctacagccttgctactcaaagtgggttccacaaagtgttgacagtatggtactaaatagaaagtggctgaatgagaaatgtagattgcagagggcaactggtgtgtttatatgcctgacattatttgggttttcccccctcaggcagaagctgaggaagattgtcattctgatactgtcagagcagatgatgatgaagaaaatgaaagtcctgctgaaacagatctgcaggcacaactccagatgttccgagctcagtggatgtttgaacttgctccaggtgtaagctctagcaatttagaaaatcgaccttgcagagcagcaagaggctctctccagaaaacatcggcagataccaaaggaaaacaagaacaggcaaaagaagaaaagctcgagaactcttcctaaaagcagtagaagaagaacaaaatggagctctctatgaagccatcaagttttatcgtagggctatgcaacttgtacctgatatagagttcaagattacttatacccggtctccagatggtgatggcgttggaaacagctacattgaagataatgatgatgacagcaaaatggcagatctcttgtcctacttccagcagcaactcacatttcaggagtctgtgcttaaactgtgtcagcctgagcttgagagcagtcagattcacatatcagtgctgccaatggaggtcctgatgtacatcttccgatgggtggtgtctagtgacttggacctcagatcattggagcagttgtcgctggtgtgcagaggattctacatctgtgccagagaccctgaaatatggcgtctggcctgcttgaaagtttggggcagaagctgtattaaacttgttccgtacacgtcctggagagagatgtttttagaacggcctcgtgttcggtttgatggcgtgtatatcagtaaaaccacatatattcgtcaaggggaacagtctcttgatggtttctatagagcctggcaccaagtggaatattacaggtacataagattctttcctgatggccatgtgatgatgttgacaacccctgaagagcctcagtccattgttccacgtttaagaactaggaataccaggactgatgcaattctactgggtcactatcgcttgtcacaagacacagacaatcagaccaaagtatttgctgtaataactaagaaaaaagaagaaaaaccacttgactataaatacagatattttcgtcgtgtccctgtacaagaagcagatcagagttttcatgtggggctacagctatgttccagtggtcaccagaggttcaacaaactcatctggatacatcattcttgtcacattacttacaaatcaactggtgagactgcagtcagtgcttttgagattgacaagatgtacacccccttgttcttcgccagagtaaggagctacacagctttctcagaaaggcctctgtagagcctcaagtccagtcctctatcacttttgcatgaattaaagtatatagcgcaaaagagcacctaagttataaatgtgtgtgtgtgcgtgtgtgtgtatatatatatatatatatatatatatatatatatatatatatatatatggaattggaacttattttaaattgttggagttcttttaagaagaatataaattgattattttttttatttaaagggatagttgattcctggggtgttttgaaattaagttggaattaagttgcttaagcatatttatgttgtgagaaaccttaatatgaggtttatcatgccctttttcaagcagatttatgagcagatttctgtcacataagtcgtcttctgcttgagtatcctaatatttcaatgcatcaggggagcgctccactggataagcattttatttcccgcatggcataatgtttttgcactaaaggctcaaagtgtgagaacctgttctggatttgtttgaaattatttcaccaataaagatcataaataaatgtttctttcaagaaaatatatttggatggcctttttaaagtaacaggatatttaataagagtcctagatagccagcggagactttaagaatcattgcctctagctgggtgtggtggcatgcacctgtagtcccagctatttgggaggctgatgcaggagaatagcttaagcccaggaatttgagtctgggagtttgagtccagcatgggcaacataacaagaccccatcccttattaaaagaaaaaaaaataattcctcatttcatcattggtctttatatgtagccacaaacactgacctcatgtaggcaccttaccaatatatgacattaagtgagagtgaatcccttaggactggaacacttcaagctcaaccaactgactcagttgtcattcttcacaaaagaatagtagaggatcatgtaaacctgagcctaactcttgttccagtatgaaagttgggggagagcaccagccacctaggaaaactgtatgttacctttttactcaaaggagtcccccctgcccagtaacagtcctattagtgtttaatttcagagtttgtgtctggtagacctctacctgattcagatttggttttgttgtttcaaccatagttagagacaaattctcatgtactttcagaaatcaatatctgcagccactgttacttttaattgacattaagagacacttcataggttcccacaattcagtatgggataggctttttaaaaagcacatacagaccaggcgtggtggctcatgcctataatcccagcactttgggaggctaagacaggcagatcacctgagctcaggagtccaagaccagcctgggcaacatggcaaaacaccgtctctacaaaaaaaaaaaaaaaaa

SEQ ID NO: 6334 - protein, 327 aa, Homo sapiens; identical to SEQ ID NO: 6322

SEQ ID NO: 6335 - DNA, 2903 bp, Homo sapiens
aagagacagggtcttgctatattgcccaggctagtttttacatctttaaaactgaatacttagctgggtgtggtggtgcacatgcctgtagtcctagctgttcaaaaggttaaggcaggaagattatttgagcctaggagttctgggctctagtgcactatgctgactgggtgtccacattaagttcagcatcagtgtagtaaactccaaggagctgggagccaccaggttacccagggaggggtgaactagcccaggttagaaatggagcaggtcaaaactcccatgctgatcagtagtgggatcatacctgtgaatagtctctgcactccagcgtggacaacatagtgagacctcatcactttaagaaaaacaaaccctgaatattttaagttagagatggagttagaaatacttttagttatagcagaatcatgtcaatttttagtacatcttttacttagctttttgcacacttttttttttttgagacggagtctcgccctgtcccctaggctggagtgcagtggcacagtcttggctcgccgcaacctccgtctcccaggttcaagcaattctcctgcctcggcctcctgagtagctgggactataggcacccaccaccatgcacagctaatttttgtatttttagtagagacagggtttcactatgttggccaggctggtctcgacctcctgacctcgtgatctgcctgccttggcctcccaaagtgctgggattacaggcgtgagccaccatgcccagcccctgcactaattttttaaacaaagtcctgttggtgctcccttcaaaatttatctccagtctgaccattttaccacttctgcaacaacccttctgactcagccactgttctgtttggtttgggttacatagtggcatcctacctggtcttcctgtttccactcttataccactagaccatattctccataaaccaccagagtgatcttttaaaataaaagcataaattatgttcaaaaccctccagtggcatccatctcatgtaaataaccactccttcctacaagatgccacctcacctgccccgactgcctcatcatagtttcctctgcacaatgcccactttgccacagctgtgtgctcctgctggctcttggatgagcccaccagtcacacttctgcctgagggccttgcacatgctctggttgctgcctgagatacttatccccatcactatgatcaccttcccagagaggcatttcctggcctccctatttcctcaccaccatcatttctgtctgctgactctactttgtctgttggttgatttttgcactaagcgtactaccagaagctttcctctcaatttgctttcccacagtaaaagagcagggcctttgccttgtccattagtttctcctcagaacagtgcctcccaggtgttcaacaaatacttgctaaataaaagatggctgatagcaaaaatatttatgtctatgtatagggacttagtttttattgacattgtgcttttattccctagagaccctgaaatatggcgtctggcctgcttgaaagtttggggcagaagctgtattaaacttgttccgtacacgtcctggagagagatgtttttagaacggcctcgtgttcggtttgatggcgtgtatatcagtaaaaccacatatattcgtcaaggggaacagtctcttgatggtttctatagagcctggcaccaagtggaatattacaggtacaactgtagtacactgagtgagtggaaaattctctctctccatgtattagttaaatggacatctgttctttgttgcttttgattgacccgcaaaatggccctcagtatttttatctagtactcaatgtaggaattgcactaaaaaaaaaaataggctaatataaattacagaatttcttctggcctcttttagatttcttcttgtcttttgccctgggtgtatttacttgccttttcaaatagcttgtgcttttattccaccttattgcttgccaaatattattgtcatttagaaaaaaatagacatgttaaccgttgtgtgtggctctcactttgtttgaaattgttgctttgggaaaaacacagaactttaataaaacaatatttgacttttattcagtgagtaaaacttaaaagttcaacagtttcccctgaggaagataaaatatctttggttctttgttgctggactaacaggtagtcagtaatatttgttttaatgttttagcagttctttagcccgtggtatttcagtgttggtttcatagctatgaataggcataggtactaatagataaggacatattttatactttgtgtggggggtgtgttttggtcttccttttcttattacataggtacataagattctttcctgatggccatgtgatgatgttgacaacccctgaagagcctcagtccattgttccacgtttaagaactaggaataccaggactgatgcaattctactgggtcactatcgcttgtcacaagacacagacaatcagaccaaagtatttgctgtaataactaagaaaaaagaagaaaaaccacttgactataaatacagatattttcgtcgtgtccctgtacaagaagcagatcagagttttcatgtggggctacagctatgttccagtggtcaccagaggttcaacaaactcatctggatacatcattcttgtcacattacttacaaatcaactggtgagactgcagtcagtgcttttgagattgacaagatgtacacccccttgttcttcgccagagtaaggagctacacagctttctcagaaaggcctctgtagagcctcaagtccagtcctctatcacttttgcatgaattaaagtatatagcgcaaaagagcacctaagttat

SEQ ID NO: 6336 - protein, 213 aa, Homo sapiens [sequence omitted]

SEQ ID NO: 6337 - DNA, 1688 bp, Homo sapiens
ttaatacagcttttgaaggatatttctcttgtatgaaattcccccttctctaacatcatatgtccagacagggcagagtttcatctgcgagtcctatcaccttgtggccacctgttgctggcgtctccacttccctctgatgggctcctggagcctgggcagcagcagcctgagagacagagagagttgctttgactgtgactgcaggtttcctgaggtcaaaattgggaatttggaaggccttagttgctcaggttttatctaattaaaagagtttaggaactcccatgtagaatgtcaattttctcttcagaatatgatgaaatattcatagtgtttacatttttttgtttttagcagcagtatttgcagaagtgtaattctaatgaaccttgtcacagctgtttgctcatttattttactgttattgcaaaagataagttatactctgtgctttttcagcatccttcaccaatttatcactttccctcttaaaaaatgtccaagtgttttccagtagaaggaaatactaggcttagagataggagataataattttacatcccatctatgtaatgttggttacatagtagttttacctccctggatcttcattttttaagctagtaaatagaaataatgcaatcatatttaacacatgaggttattatgatgattaactgagatgatgatgatggggaaaaaaatctgatatttttagagtatttaacagtttttaaagcactcatacattcttgtgatagtcaaaacgactctttactgcatgcaaatattatgttacttttagtgtcactgttgcatactatttctgtaaacatagaagtgaggtaaggtttcattataacttatgcatcttttcttttgcagaaaccacttgactataaatacagatattttcgtcgtgtccctgtacaagaagcagatcagagttttcatgtggggctacagctatgttccagtggtcaccagaggttcaacaaactcatctggatacatcattcttgtcacattacttacaaatcaactggtgagactgcagtcagtgcttttgagattgacaagatgtacacccccttgttcttcgccagagtaaggagctacacagctttctcagaaaggcctctgtagagcctcaagtccagtcctctatcacttttgcatgaattaaagtatatagcgcaaaagagcacctaagttataaatgtgtgtgtgtgcgtgtgtgtgtatatatatatatatatatatatatatatatatatatatatatatatatggaattggaacttattttaaattgttggagttcttttaagaagaatataaattgattattttttttatttaaagggatagttgattcctggggtgttttgaaattaagttggaattaagttgcttaagcatatttatgttgtgagaaaccttaatatgaggtttatcatgccctttttcaagcagatttatgagcagatttctgtcacataagtcgtcttctgcttgagtatcctaatatttcaatgcatcaggggagcgctccactggataagcattttatttcccgcatggcataatgtttttgcactaaaggctcaaagtgtgagaacctgttctggatttgtttgaaattatttcaccaataaagatcataaataaatgtttctttcaag

SEQ ID NO: 6338 - protein, 81 aa, Homo sapiens
MHLFFCRNHLTINTDIFVVSLYKKQIRVFMWGYSYVPVVTRGSTNSSGYIILVTLLTNQLVRLQSVLLRLTRCTPPCSSPE

SEQ ID NO: 6339 - DNA, 2559 bp, Homo sapiens
ttaatacagcttttgaaggatatttctcttgtatgaaattcccccttctctaacatcatatgtccagacagggcagagtttcatctgcgagtcctatcaccttgtggccacctgttgctggcgtctccacttccctctgatgggctcctggagcctgggcagcagcagcctgagagacagagagagttgctttgactgtgactgcaggtttcctgaggtcaaaattgggaatttggaaggccttagttgctcaggttttatctaattaaaagagtttaggaactcccatgtagaatgtcaattttctcttcagaatatgatgaaatattcatagtgtttacatttttttgtttttagcagcagtatttgcagaagtgtaattctaatgaaccttgtcacagctgtttgctcatttattttactgttattgcaaaagataagttatactctgtgctttttcagcatccttcaccaatttatcactttccctcttaaaaaatgtccaagtgttttccagtagaaggaaatactaggcttagagataggagataataattttacatcccatctatgtaatgttggttacatagtagttttacctccctggatcttcattttttaagctagtaaatagaaataatgcaatcatatttaacacatgaggttattatgatgattaactgagatgatgatgatggggaaaaaaatctgatatttttagagtatttaacagtttttaaagcactcatacattcttgtgatagtcaaaacgactctttactgcatgcaaatattatgttacttttagtgtcactgttgcatactatttctgtaaacatagaagtgaggtaaggtttcattataacttatgcatcttttcttttgcagaaaccacttgactataaatacagatattttcgtcgtgtccctgtacaagaagcagatcagagttttcatgtggggctacagctatgttccagtggtcaccagaggttcaacaaactcatctggatacatcattcttgtcacattacttacaaatcaactggtgagactgcagtcagtgcttttgagattgacaagatgtacacccccttgttcttcgccagagtaaggagctacacagctttctcagaaaggcctctgtagagcctcaagtccagtcctctatcacttttgcatgaattaaagtatatagcgcaaaagagcacctaagttataaatgtgtgtgtgtgcgtgtgtgtgtatatatatatatatatatatatatatatatatatatatatatatatatggaattggaacttattttaaattgttggagttcttttaagaagaatataaattgattattttttttatttaaagggatagttgattcctggggtgttttgaaattaagttggaattaagttgcttaagcatatttatgttgtgagaaaccttaatatgaggtttatcatgccctttttcaagcagatttatgagcagatttctgtcacataagtcgtcttctgcttgagtatcctaatatttcaatgcatcaggggagcgctccactggataagcattttatttcccgcatggcataatgtttttgcactaaaggctcaaagtgtgagaacctgttctggatttgtttgaaattatttcaccaataaagatcataaataaatgtttctttcaagaaaatatatttggatggcctttttaaagtaacaggatatttaataagagtcctagatagccagcggagactttaagaatcattgcctctagctgggtgtggtggcatgcacctgtagtcccagctatttgggaggctgatgcaggagaatagcttaagcccaggaatttgagtctgggagtttgagtccagcatgggcaacataacaagaccccatcccttattaaaagaaaaaaaaataattcctcatttcatcattggtctttatatgtagccacaaacactgacctcatgtaggcaccttaccaatatatgacattaagtgagagtgaatcccttaggactggaacacttcaagctcaaccaactgactcagttgtcattcttcacaaaagaatagtagaggatcatgtaaacctgagcctaactcttgttccagtatgaaagttgggggagagcaccagccacctaggaaaactgtatgttacctttttactcaaaggagtcccccctgcccagtaacagtcctattagtgtttaatttcagagtttgtgtctggtagacctctacctgattcagatttggttttgttgtttcaaccatagttagagacaaattctcatgtactttcagaaatcaatatctgcagccactgttacttttaattgacattaagagacacttcataggttcccacaattcagtatgggataggctttttaaaaagcacatacagaccaggcgtggtggctcatgcctataatcccagcactttgggaggctaagacaggcagatcacctgagctcaggagtccaagaccagcctgggcaacatggcaaaacaccgtctctacaaaaaaaaaaaaaaaaa

SEQ ID NO: 6340 - protein, 81 aa, Homo sapiens; identical to SEQ ID NO: 6338

SEQ ID NO: 6341 - DNA, 788 bp, Homo sapiens
cagatgaaaagctgtcagaaaattatgccatcagaattcctgtaaacaagctcctgcttcacccctgccatgagcaaaagcttcatgcgtcctccccagaagccaagcagatgccggtaccatgttttctgttcagcctgcagaactgtgcatggaacagtggcacttttcttttgtcttgaagttgtagccattaaactgcactggccagtcaaatataggtcttgttaatgagacaagaaacacctgtgtttggcttgccatgaagaattatactggctgttttgacctctggaggaaggctgagccctttggcatcacatgtgtttgcagctcgtcaagctggctggatatcccacctctccatgccctatagctctgtctcggaacctgtgattgctgtgaattgtgtcatctgcacacagttcactaaccagttatgtatagactggttatgctacatttagtagtttgtgttttattctgacagttggaaagccacaagagagttttaagttggggagtaacaaataaatctataatttaatgggactaccatgcctgctttgtgacaaatggatcactagaaggcagaaattgtagtggggtgaccagtttgaaggatgttgaaatgactgcaaataaacaagtttcacaggttctttaaggaaaaaaaaaaaaagaaatagctgacaattctatgcccaatcaagttgtcattgagataaagttaacagaatgtttgttaatatataaaatgtttaaattaaatgttaaatatattaaat

SEQ ID NO: 6342 - protein, 53 aa, Homo sapiens
MSKSFMRPPQKPSRCRYHVFCSACRTVHGTVALFFCLEVVAIKLHWPVKYRSC

SEQ ID NO: 6343 - DNA, 2912 bp, Homo sapiens
aggtcctctgagcaggctgcaccatggtcaagccatcgtgacccctgtgacccacagaaggtctcctggagccagaaagtctaggacaacaggaaaaccacaaaagaagaaaaacggctagttcctgtcttagctgattagccaaccttgcaacattctgtcattgtaacaggcttaccctaactgatcaatcaacctcgtgacactgtgctctgtaaccttgtgataatgtaccttatgacattcttcccctgcccgcaataaacggctcctaactgtaactttccggtgcttacctctaactgataaaactagctccaacccaccaccctccactgacttccttcgcactcagcccactcgcacccgggtgaataaacagcctttgttgctcacacttagcctgttcaagttgtctcttcaattagatgctcgcataacatttggtgccgaaagcccgggataggggaactcctccggcagacctctcctctatcctcccggtacccacgttctcccatgcaagagacttccctcgccctcaggacctcagaccagctccgcgagcactccggcctctgtctatggatatgaaatccaacaccggtcacggactcttcttggggagacagccttccttcagtgttcggtcaatgcccgggacgcccgccttggccatttgccagccacacaacccaggacctccaatggggacgcccactgaggatcctagtggttgctcttttccttgtctctttctttccccccagtctttccttgttctatcatgggcaatttcccgccttccatccctctttcttctgtctggcttgtgtcctcagaaacctcaaacctcttcaccttgcacccaatctaaaggctaaacgtctaatttttttctgtaacacgtcctggccccagtataaattagaaaatggcgctcagtggccagaaaacagcacttccaatttctctattttgtgggacttagacaacttctatggaaaaatgggcaaatgggtctgaggtaccctacttccaggcattttttacatacgatctctccctagcctatgcttccaatgtaatccatccccaattttccttatttcccttctgtctacccctccttcttccactggcgatgctgactcctctttgtctgttgacccctccgatctttctcccccaccacctatccgaacctgcttctaattctcccccagaacctatttctacccacaatccaccctcttatgcccctcccattaccacccttcctcacatcctctatggcttacagtttgggcctgcgaccaacccccaggcccctgcctagcaatttcccctcggagaggtggcaggaaccaaaggaatagttcgggttcaggtccctttctccctgttcgacctttcccaaattagtgaacatctaggctctttcccatctgaccccaccaaatatatacgagaattccaatacttaacccagtcctataatcttacttggaatgacttaaatgtcatccttacctctaccctcgctcctgaggagtgagagtgggtttggatcctagctcaatcttaggctgataaccgccggtgccgtaagcctggcctccagtaaggtgctagggcagtaccctgtgaagaccccggatggacttaccaggccctgggacccaggcatagccaggcgggactacatgatctcttgcctagttaaagggcttcagaaggctgcatataaagccgtcaattatgacaaactaaaaaacaaaaacaaaaacaaaaaaaaccactcagaacaaagataaaaatccagctcagtttatggcctgtctacctgccaccctcaggcgatatacagcactagaccctgaagggatagaaggccgccttattcttaacatgcattttattacccagtcagtttctgacagtagaaagaaacttcaaaaattagagtctggctctcagatcccacaacaggaattaatcaacctcgccttcaaggtgttcaataatagggaagagactgcccggcgacagcgcatttcagaactacagatgcttgcctccgccataagacaaaccccagctgcactgcctacctgcaagaacttcaaggcatctaaacgcaacatccaacagcccctctgggactttgcttcaagcgatgaaaacctggccactgggccaaggaatgcctgcagcctgggattcctcctaagccatgccccgcctgtgcgggccctcactggaagtctgactgcccgactctcatcgccacttccggagctcctggagctcaaacccaaagctccccaccgactccttcccagatctcctcggcttggcggctgaagactgacgctgcccgaacgtctcggaggccccttagacaatcgcggatgccgagcttcgggtaactcttagggtggaggcataaaaagacaggaatgtaaggtcctctgagcaggcggcgccatggtcaagccatcgtgacccctgtgactcacacgtacacatccagaaggtctcctggagccagaaagtctgggacgacaggaaaaccacaaaagaagaaaaacggctagttcctgtcttagctgatcagccaaccttgtgacattctatcattgtaacaggctgtaccctaactgatcaatcaacctcatgacactgtgctctgtaaccttatgataatgtaccttatgacattcttcccctgccctcaataaacagctccgaactataactttccactgcttacccctaaagtataaaactagctccaaccccaccacttccttttcggactcagcccacccgcacccagtgaataaacaaccttgttgctcacacttagcctgttcagggtgtctcttcaattagacgcacacataaca

SEQ ID NO: 6344 - protein, 99 aa, Homo sapiens
MDMKSNTGHGLFLGRQPSFSVRSMPGTPALAICQPHNPGPPMGTPTEDPSGCSFPCLFLSPQSFLVLSWAISRLPSLFLLSGLCPQKPQTSSPCTQSKG

SEQ ID NO: 6345 - DNA, 1096 bp, Homo sapiens
gcactcagcccactcgcacccgggtgaataaacagcctttgttgctcacacttagcctgttcaagttgtctcttcaattagatgctcgcataacatttggtgccgaaagcccgggataggggaactcctccggcagacctctcctctatcctcccggtacccacgttctcccatgcaagagacttccctcgccctcaggacctcagaccagctccgcgagcactccggcctctgtctatggatatggtgttcaataatagggaagagactgcccggcgacagcgcatttcagaactacagatgcttgcctccgccataagacaaaccccagctgcactgcctacctgcaagaacttcaaggcatctaaacgcaacatccaacagcccctctgggactttgcttcaagcgatgaaaacctggccactgggccaaggaatgcctgcagcctgggattcctcctaagccatgccccgcctgtgcgggccctcactggaagtctgactgcccgactctcatcgccacttccggagctcctggagctcaaacccaaagctccccaccgactccttcccagatctcctcggcttggcggctgaagactgacgctgcccgaacgtctcggaggccccttagacaatcgcggatgccgagcttcgggtaactcttagggtggaggcataaaaagacaggaatgtaaggtcctctgagcaggcggcgccatggtcaagccatcgtgacccctgtgactcacacgtacacatccagaaggtctcctggagccagaaagtctgggacgacaggaaaaccacaaaagaagaaaaacggctagttcctgtcttagctgatcagccaaccttgtgacattctatcattgtaacaggctgtaccctaactgatcaatcaacctcatgacactgtgctctgtaaccttatgataatgtaccttatgacattcttcccctgccctcaataaacagctccgaactataactttccactgcttacccctaaagtataaaactagctccaaccccaccacttccttttcggactcagcccacccgcacccagtgaataaacaaccttgttgctcac

SEQ ID NO: 6346 - protein, 119 aa, Homo sapiens
MDMVFNNREETARRQRISELQMLASAIRQTPAALPTCKNFKASKRNIQQPLWDFASSDENLATGPRNACSLGFLLSHAPPVRALTGSLTARLSSPLPELLELKPKAPHRLLPRSPRLGG

SEQ ID NO: 6347 - DNA, 657 bp, Homo sapiens
agatgctcgcataacatttggtgccgaaagcccgggataggggaactcctccggcagacctctcctctatcctcccggtacccacgttctcccatgcaagagacttccctcgccctcaggacctcagaccagctccgcgagcactccggcctctgtctatggatatgatctcctcggcttggcggctgaagactgacgctgcccgaacgtctcggaggccccttagacaatcgcggatgccgagcttcgggtaactcttagggtggaggcataaaaagacaggaatgtaaggtcctctgagcaggcggcgccatggtcaagccatcgtgacccctgtgactcacacgtacacatccagaaggtctcctggagccagaaagtctgggacgacaggaaaaccacaaaagaagaaaaacggctagttcctgtcttagctgatcagccaaccttgtgacattctatcattgtaacaggctgtaccctaactgatcaatcaacctcatgacactgtgctctgtaaccttatgataatgtaccttatgacattcttcccctgccctcaataaacagctccgaactataactttccactgcttacccctaaagtataaaactagctccaaccccaccacttccttttcggactcagcccacccg

SEQ ID NO: 6348 - protein, 31 aa, Homo sapiens
MDMISSAWRLKTDAARTSRRPLRQSRMPSFG

SEQ ID NO: 6349 - DNA, 668 bp, Homo sapiens
aactgataaaactagctccaacccaccaccctccactgacttccttcgcactcagcccactcgcacccgggtgaataaacagcctttgttgctcacacttagcctgttcaagttgtctcttcaattagatgctcgcataacatttggtgccgaaagcccgggataggggaactcctccggcagacctctcctctatcctcccggtacccacgttctcccatgcaagagacttccctcgccctcaggacctcagaccagctccgcgagcactccggcctctgtctatggatatgcataaaaagacaggaatgtaaggtcctctgagcaggcggcgccatggtcaagccatcgtgacccctgtgactcacacgtacacatccagaaggtctcctggagccagaaagtctgggacgacaggaaaaccacaaaagaagaaaaacggctagttcctgtcttagctgatcagccaaccttgtgacattctatcattgtaacaggctgtaccctaactgatcaatcaacctcatgacactgtgctctgtaaccttatgataatgtaccttatgacattcttcccctgccctcaataaacagctccgaactataactttccactgcttacccctaaagtataaaactagctccaaccccaccacttccttttcgga

SEQ ID NO: 6350 - protein, 34 aa, Homo sapiens
MQETSLALRTSDQLREHSGLCLWICIKRQECKVL

SEQ ID NO: 6351 - DNA, 906 bp, Homo sapiens
aggcttcaaaatggtgagaagataatgagaaaaggaaagaatctatggataagaaagaaagatgtgattgcttccccttctgccatgatcggaagtctcctgagacatccccagccatgtggaactaatcttatcatatctggatacttgaaacatcccacagaacatcaagtggtctgctatattaaagacataatgcagagcaaaaaagactagcacactagaagtcttggaagagaagcactctggaatcctagaagaactacttaaacttctgcagaaggaagtggatcttagcaacataagaatcaactatggtagtacctgtgatgccccctcctgaaaaaagccagcactaatttgaagtgacgaagctcatagggcacagaatttaaggagatacaccctctcaaggtcatatgaatgagcatttccttgaattttttccttaggcacttcagtcgattcaccctagtccctgcttgttccagaattgtctttcaaaatggaagatttatcccttagctactgggagtgttgttagaagaaaatctttatctaagcaatccttaggatgggctttggttgaaaaagtggccatccaaaagtcataaccgctaccattggcagcccataacccaaaactactgatcaactaaaaaatgtaaatgcctggcttcctctccccaaatcaggacaattctgttgggccatctcaacatcaaagcttactgtgaggtggctgaaagcttcactgggactgcatcacagctcaacattttcttcatcttaatactgcttccttaccctctgcacatgtgttcatcacaagagaaatttctaattactttccttttcactaacctgtatttcagagtctacttcttggaggaaatcttgtgaaac

SEQ ID NO: 6352 - protein, 63 aa, Homo sapiens [sequence omitted]

SEQ ID NO: 6353 - DNA, 242 bp, Homo sapiens
cttcaaaatggtgagaagataatgagaaaaggaaagaatctatggataagaagtaaggagaaaatcgttgacaattgtcaaaatcttgcctcattacttctccaggaatgatgtctatccttttcttcaaacacattctgtattctaggaattctgaattattttggattagccaaactcactataaactctactgtaaagaaggcattccaagagaaggaacaacgtgaaaagaaacaaac

SEQ ID NO: 6354 - protein, 40 aa, Homo sapiens
MMSILFFKHILYSRNSELFWISQTHYKLYCKEGIPREGTT

SEQ ID NO: 6355 - DNA, 323 bp, Homo sapiens
aagatgtgattgcttccccttctgccatgatcggaagtctcctgagacatccccagccatgtggaactgaagagaagcactctggaatcctagaagaactacttaaacttctgcagaaggaagtggatcttagcaacataagaatcaactatggtagtacctgtgatgccccctcctgaaaaaagccagcactaatttgaagtgacgaagctcatagggcacagaatttaaggagatacaccctctcaaggtcatatgaatgagcatttccttgaattttttccttaggcacttcagtcgattcaccctagtccctgcttgtt

SEQ ID NO: 6356 - protein, 50 aa, Homo sapiens
MIGSLLRHPQPCGTEEKHSGILEELLKLLQKEVDLSNIRINYGSTCDAPS

SEQ ID NO: 6357 - DNA, 3706 bp, Homo sapiens
tccgccctccccgcaggcggcgtgcggctgcatagcctgagaatcccggtggtgagcggggatggcggttgtagcggcggctgccggctggctactcaggctcagggcggcaggggctgaggggcactggcgtcggcttcctggcgcggggctggcgcggggctttttgcaccccgccgcgactgtcgaggatgcggcccagaggcggcaggtggctcattttactttccagccagatccggagccccgggagtacgggcaaactcagaaaatgaatcttttccagtctgtaacaagtgccttggataactcattggccaaagatcctactgcagtaatatttggtgaagatgttgcctttggtggagtctttagatgcactgttggcttgcgagacaaatatggaaaagatagagtttttaataccccattgtgtgaacaaggaattgttggatttggaatcggaattgcggtcactggagctactgccattgcggaaattcagtttgcagattatattttccctgcatttgatcagattgttaatgaagctgccaagtatcgctatcgctctggggatctttttaactgtggaagcctcactatccggtccccttggggctgtgttggtcatggggctctctatcattctcagagtcctgaagcattttttgcccattgcccaggaatcaaggtggttatacccagaagccctttccaggccaaaggacttcttttgtcatgcatagaggataaaaatccttgtatattttttgaacctaaaatactttacagggcagcagcggaagaagtccctatagaaccatacaacatcccactgtcccaggccgaagtcatacaggaagggagtgatgttactctagttgcctggggcactcaggttcatgtgatccgagaggtagcttccatggcaaaagaaaagcttggagtgtcttgtgaagtcattgatctgaggactataataccttgggatgtggacacaatttgtaagtctgtgatcaaaacagggcgactgctaatcagtcacgaggctcccttgacaggcggctttgcatcggaaatcagctctacagttcaggaggaatgtttcttgaacctagaggctcctatatcaagagtatgtggttatgacacaccatttcctcacatttttgaaccattctacatcccagacaaatggaagtgttatgatgcccttcgaaaaatgatcaactattgaccatataggtaggtatgcatcttgagaaagctactatgtgcccctgacattaacgtactgttaaccaagacacagcaatcatcagtgttttgatggtaacaaactttgatggtaaagttggtaaaaggcaactttcagaagaaaataatgtgctttagaaaaaaaattcaaatttatagtagtatatttacatttttgttgttgttgttgttctgagatggagtctcactctgtcgcccaggctagactgcagtggtgcaatctcagctcactgcaacctcccccctacccctgagttcaagcgattctcctgcctcagcctgctgagtagttgggattacaggcgcccaccaccatgcccagctaatttttgtgtttttattggaggtggggtgtcactatgttggctcagctgatttcaaattcctgacctcaagtgatccacctgccttagcctcccaaagtgctgggattacaggcatgagccactgcacctggctatatttacatttaatagaaacatatctagcatatgtatatgtgattttttttttttttttgagaccgagtctcactctgtcaccaggctggagtgcagtggtgcgatcttggctcatggcaacctctgcctcccaggttcaagcgattgtcctgcctcagtctcctgagtagctgggactacaggtgtgcaccaacatgcccagctaattttttatatttttagtagagacggggtttcaccatgttggccaggatggtctcgatctcttgaccttgtgttccacccgccttggcctcccaaagtgctggaattacaggcatgagccaccgcgcctggcctgtatatgtgatttctaaaaaatagatgcatgcatatgttaacattgaatagtcaatcactagatgaagatgctctctaccatggtttagattgcaagtgtactttataccattgtttcaacttcaacctttatttttgtatatattttttcagctacttaaactgttcatgaataggcgtactttctgtatttaaaaatggcccctcaagcaccgttaatttacattccagttatttacatgataattcatgacattctgaaacttgcctgtatattatctgaaaaatggatttcttgagcaaaagatctgtttattgtatgtaaggaaaaattttacctgaaaacaaacaaacaaaccctaaaactcagcaccactaccatttccagaagcttttttaacaagtgaatattttttacataatggataataaatggtatttattcatcatgattttctaagtaatgcttatcagccccttcagtggtgttattctaacaaaatgaatacattacaaattattaagttagcttttcagagttttaatatagaagttactagcactgacacactgattttgaaatgtttcaaaatgagtagatatgattagatcctttaccttttaatatctagtttttccaaaaatgatagtaatatcttttgaagaactatgctttttcaaaagcaaaatcaactctgtataatagcacattctctactttttaaagatcagaaatgctagaattcttgacttttgtgtatgggtagtaaatctagctcactgaaaatcagagtgaaacgcctttacatttgtgcggatagagaagttaactctccctcatatgtcactgtgctaccataatccctacattttctgtctgttctagtctaagaatattgttatagatggaagttaggaccattagcccacagatgcatgtattctctcagacataccggtgtagatgctatatttctgatgtcttcttaatgtctgtgaaagcaactggcatctacaataaatcacacttagagctggttagaggactccttcacttttgttgtccatgtggttcccttccgtggaccagccgtaataaagagccaaggtagtgatggtggccacgtgcctcgttgctatttttaaagtaatattcagatgtggttttaaatttagattatgtattccttttgaaacataagaaaaacatttaaacctatgctgaaaatacgataaaagaaaaacaactccaatatgctaaaagttaaatatggtatttaagaaaatagtcatgtatgcaattgagaaagtctataatttattttacagaaaagctggaagattatgactagatatggaaatattttttctgaatttttttttatatttcctccgacttacctctttttgaaaagagagtttttattaagtgaaccatcacgatattggctgaaaagttctacattctattattgtattgtaacacacatgtattgatgattttcattaagagtttcagattaactttgaaaaatattccacatggtaatcttataaattctgtttaattacatctgtaaatattatgtgtgtgatagtattcaataaagtaaaatcaaattgtc

SEQ ID NO: 6358 - protein, 392 aa, Homo sapiens; identical to SEQ ID NO: 791

SEQ ID NO: 6359 - DNA, 1544 bp, Homo sapiens
tccgccctccccgcaggcggcgtgcggctgcatagcctgagaatcccggtggtgagcggggatggcggttgtagcggcggctgccggctggctactcaggctcagggcggcaggggctgaggggcactggcgtcggcttcctggcgcggggctggcgcggggctttttgcaccccgccgcgactgtcgaggatgcggcccagaggcggcaggtggctcattttactttccagccagatccggagccccgggagtacgggcaaactcagaaaatgaatcttttccagtctgtaacaagtgccttggataactcattggccaaagatcctactgcagtaatatttggtgaagatgttgcctttggtggagtctttagatgcactgttggcttgcgagacaaatatggaaaagatagagtttttaataccccattgtgtgaacaaggaattgttggatttggaatcggaattgcggtcactggagctactgccattgcggaaattcagtttgcagattatattttccctgcatttgatcagattgttaatgaagctgccaagtatcgctatcgctctggggatctttttaactgtggaagcctcactatccggtccccttggggctgtgttggtcatggggctctctatcattctcagagtcctgaagcattttttgcccattgcccaggaatcaaggtggttatacccagaagccctttccaggccaaaggacttcttttgtcatgcatagaggataaaaatccttgtatattttttgaacctaaaatactttacagggcagcagcggaagaagtccctatagaaccatacaacatcccactgtcccaggccgaagtcatacaggaagggagtgatgttactctagttgcctggggcactcaggttcatgtgatccgagaggtagcttccatggcaaaagaaaagcttggagtgtcttgtgaagtcattgatctgaggactataataccttgggatgtggacacaatttgtaagtctgtgatcaaaacagggcgactgctaatcagtcacgaggctcccttgacaggcggctttgcatcggaaatcagctctacagttcaggaggaatgtttcttgaacctagaggctcctatatcaagagtatgtggttatgacacaccatttcctcacatttttgaaccattctacatcccagacaaatggaagtgttatgatgcccttcgaaaaatgatcaactattgaccatatagaaaagctggaagattatgactagatatggaaatattttttctgaatttttttttatatttcctccgacttacctctttttgaaaagagagtttttattaagtgaaccatcacgatattggctgaaaagttctacattctattattgtattgtaacacacatgtattgatgattttcattaagagtttcagattaactttgaaaaatattccacatggtaatcttataaattctgtttaattacatctgtaaatattatgtgtgtgatagtattcaataaagtaaaatcaaattgtc

SEQ ID NO: 6360 - protein, 392 aa, Homo sapiens; identical to SEQ ID NO: 791

SEQ ID NO: 6361 - DNA, 3800 bp, Homo sapiens
tccgccctccccgcaggcggcgtgcggctgcatagcctgagaatcccggtggtgagcggggatggcggttgtagcggcggctgccggctggctactcaggctcagggcggcaggggctgaggggcactggcgtcggcttcctggcgcggggctggcgcggggctttttgcaccccgccgcgactgtcgaggatgcggcccagaggcggcaggtggctcattttactttccagccagatccggagccccgggagtacgggcaaactcagaaaatgaatcttttccagtctgtaacaagtgccttggataactcattggccaaagatcctactgcagtaatatttggtgaagatgttgcctttggtggagtctttagatgcactgttggcttgcgagacaaatatggaaaagatagagtttttaataccccattgtgtgaacaaggaattgttggatttggaatcggaattgcggtcactggagctactgccattgcggaaattcagtttgcagattatattttccctgcatttgatcagattgttaatgaagctgccaagtatcgctatcgctctggggatctttttaactgtggaagcctcactatccggtccccttggggctgtgttggtcatggggctctctatcattctcagagtcctgaagcattttttgcccattgcccaggaatcaagatcaaagttataagcttatcttagttgagtagatgttgcctgatttttgaatgtgagctagaagttgtagactgggaaagaagccatgtgcgaggtggttatacccagaagccctttccaggccaaaggacttcttttgtcatgcatagaggataaaaatccttgtatattttttgaacctaaaatactttacagggcagcagcggaagaagtccctatagaaccatacaacatcccactgtcccaggccgaagtcatacaggaagggagtgatgttactctagttgcctggggcactcaggttcatgtgatccgagaggtagcttccatggcaaaagaaaagcttggagtgtcttgtgaagtcattgatctgaggactataataccttgggatgtggacacaatttgtaagtctgtgatcaaaacagggcgactgctaatcagtcacgaggctcccttgacaggcggctttgcatcggaaatcagctctacagttcaggaggaatgtttcttgaacctagaggctcctatatcaagagtatgtggttatgacacaccatttcctcacatttttgaaccattctacatcccagacaaatggaagtgttatgatgcccttcgaaaaatgatcaactattgaccatataggtaggtatgcatcttgagaaagctactatgtgcccctgacattaacgtactgttaaccaagacacagcaatcatcagtgttttgatggtaacaaactttgatggtaaagttggtaaaaggcaactttcagaagaaaataatgtgctttagaaaaaaaattcaaatttatagtagtatatttacatttttgttgttgttgttgttctgagatggagtctcactctgtcgcccaggctagactgcagtggtgcaatctcagctcactgcaacctcccccctacccctgagttcaagcgattctcctgcctcagcctgctgagtagttgggattacaggcgcccaccaccatgcccagctaatttttgtgtttttattggaggtggggtgtcactatgttggctcagctgatttcaaattcctgacctcaagtgatccacctgccttagcctcccaaagtgctgggattacaggcatgagccactgcacctggctatatttacatttaatagaaacatatctagcatatgtatatgtgattttttttttttttttgagaccgagtctcactctgtcaccaggctggagtgcagtggtgcgatcttggctcatggcaacctctgcctcccaggttcaagcgattgtcctgcctcagtctcctgagtagctgggactacaggtgtgcaccaacatgcccagctaattttttatatttttagtagagacggggtttcaccatgttggccaggatggtctcgatctcttgaccttgtgttccacccgccttggcctcccaaagtgctggaattacaggcatgagccaccgcgcctggcctgtatatgtgatttctaaaaaatagatgcatgcatatgttaacattgaatagtcaatcactagatgaagatgctctctaccatggtttagattgcaagtgtactttataccattgtttcaacttcaacctttatttttgtatatattttttcagctacttaaactgttcatgaataggcgtactttctgtatttaaaaatggcccctcaagcaccgttaatttacattccagttatttacatgataattcatgacattctgaaacttgcctgtatattatctgaaaaatggatttcttgagcaaaagatctgtttattgtatgtaaggaaaaattttacctgaaaacaaacaaacaaaccctaaaactcagcaccactaccatttccagaagcttttttaacaagtgaatattttttacataatggataataaatggtatttattcatcatgattttctaagtaatgcttatcagccccttcagtggtgttattctaacaaaatgaatacattacaaattattaagttagcttttcagagttttaatatagaagttactagcactgacacactgattttgaaatgtttcaaaatgagtagatatgattagatcctttaccttttaatatctagtttttccaaaaatgatagtaatatcttttgaagaactatgctttttcaaaagcaaaatcaactctgtataatagcacattctctactttttaaagatcagaaatgctagaattcttgacttttgtgtatgggtagtaaatctagctcactgaaaatcagagtgaaacgcctttacatttgtgcggatagagaagttaactctccctcatatgtcactgtgctaccataatccctacattttctgtctgttctagtctaagaatattgttatagatggaagttaggaccattagcccacagatgcatgtattctctcagacataccggtgtagatgctatatttctgatgtcttcttaatgtctgtgaaagcaactggcatctacaataaatcacacttagagctggttagaggactccttcacttttgttgtccatgtggttcccttccgtggaccagccgtaataaagagccaaggtagtgatggtggccacgtgcctcgttgctatttttaaagtaatattcagatgtggttttaaatttagattatgtattccttttgaaacataagaaaaacatttaaacctatgctgaaaatacgataaaagaaaaacaactccaatatgctaaaagttaaatatggtatttaagaaaatagtcatgtatgcaattgagaaagtctataatttattttacagaaaagctggaagattatgactagatatggaaatattttttctgaatttttttttatatttcctccgacttacctctttttgaaaagagagtttttattaagtgaaccatcacgatattggctgaaaagttctacattctattattgtattgtaacacacatgtattgatgattttcattaagagtttcagattaactttgaaaaatattccacatggtaatcttataaattctgtttaattacatctgtaaatattatgtgtgtgatagtattcaataaagtaaaatcaaattgtc

SEQ ID NO: 6362 - protein, 218 aa, Homo sapiens
MAVVAAAAGWLLRLRAAGAEGHWRRLPGAGLARGFLHPAATVEDAAQRRQVAHFTFQPDPEPREYGQTQKMNLFQSVTSALDNSLAKDPTAVIFGEDVAFGGVFRCTVGLRDKYGKDRVFNTPLCEQGIVGFGIGIAVTGATAIAEIQFADYIFPAFDQIVNEAAKYRYRSGDLFNCGSLTIRSPWGCVGHGALYHSQSPEAFFAHCPGIKIKVISLS

SEQ ID NO: 6363 - DNA, 673 bp, Homo sapiens
gccgactctggagcccaggctgttgcttcccagtctggtgatgaatcctccatagtctgcccaagtagcagcatatggatgtcttacagccaccagctcacataaagaagggtaagcatgttgctgtagtcacgccgtctgggctgcaatccaatcaagtttcagtattttgcatggcattctcactgcctcactttgccaggcatcgtggagttgaaaaacaagtcccaacagaatttgctcaaatatatctcatcgtgtgaaaggaatcacagagaactggatgatgtaatattgactgcctgttagtaaagagaataagcatgtccgccaaagaattaagcccaagagccagagatgcagaggaaatgatgagagggttgaaatggtaaatgaagatgtcaagtcatatgatgtgtggacccaggcgctgcggcagcacctggaacctttataagcacctcttccagaatggtacagattttctctcacaaaatgtacgactatatatcacactcttctgtttgatcatctttattttcgtatgtctacatgctaccatcaagcaacatcgtttgagccagaacaaaggctgctgccttccttcagttaacagcaggttttatttctctgccctgaatcctatgtagtcaaataaatacttttgtcacag

SEQ ID NO: 6364 - protein, 85 aa, Homo sapiens
MKMSSHMMCGPRRCGSTWNLYKHLFQNGTDFLSQNVRLYITLFCLIIFIFVCLHATIKQHRLSQNKGCCLPSVNSRFYFSALNPM

SEQ ID NO: 6365 - DNA, 659 bp, Homo sapiens
ggggggctgaggtggaaggattgcttgagcccaggaggttgaggctgcaggggctgacatcacgccactgcactccagcctgggcaacagagtgacaccctgtctcaaaaataatacgcatacatatatcagttaaaatagatgttaaaaaaatccgtctcaaaaaaaaaaaaaaaagatgtagggtagtatctttgaaaagtatagtttaaattgagagtactttatgaacacttgcatttttagattgcttttccatttaaaatgttttaagaggctgggtgcggtggctcacgcctgtaattccagcactttggaaggccgaggtgggtggattgcttgagcccaggagtttgagaccagcctgggcaatgtggtgaaaccctgtctctactaaaaacacaaaaattagctgggcttggtggtacacacctgtaatcctagctacttgggagactgaggcaaggtaattgcttgaactcaggaggcagaggtttcaatgagctgagattgcaccactgcactctatcctgggggacagagcgacacttggtctcaaaaaaaaaggttttaagaaggtgatatttgagaattgttaattatagaattttaatctgaaacatttccttttatggaaatgattacctatctgtgttgtt

SEQ ID NO: 6366 - protein, 38 aa, Homo sapiens
MNTCIFRLLFHLKCFKRLGAVAHACNSSTLEGRGGWIA

SEQ ID NO: 6367 - DNA, 540 bp, Homo sapiens
cattatactttgcaggaagaaaataataggcatttattctatagtaattgaatagacagatatagcaccttaaaaactaatgatagccattcatctctatgtatcatgtatctgtcaaagtaggaacaacttggcacagccaaaaattagccaggtgtggtggcaggcacctgtaatcccagctgaggcctggaggctgagataggagaatcagttgaagcgagaggcagaggttgcagcgagtggagattgcgccactacactccagctgggatgatagaatgaaactccagctaaaaaaaaaaaaaaaaagaacagtacttttcttacttcattaacctgggggttgaggacacttcctacttgtattctgagtctgactttgcctggacttaagtagatattaagaccaaaaaatttgctggctatgtgagtggcgtcaaacaaggtaagacctcagcagggagggtttcctttattctattaggttggtgcaaaagtaattgcataaacccaagttatgtcctattttagtgtggc

SEQ ID NO: 6368 - protein, 41 aa, Homo sapiens
MIAIHLYVSCICQSRNNLAQPKISQVWWQAPVIPAEAWRLR

SEQ ID NO: 6369 - DNA, 5028 bp, Homo sapiens
gtttgcggtttagaccccaaagattcctgttggtggtctgggtcacaggaggcaggtttcgggagctggaaatgtgagcgggtacgacaggcaccgcgggtaaccgacgccccgggtccttgctgcagccgggtacgcgggataccggcaccccgccttctccgcccgagtgctgccaggcgtgggcctggaatctcttcacaccttctctttggagcccttaatgatacgacgaaccccaagtgtttcagaacatgaagtaaacaatggagaactgttctgctgcatcgacgttcctgactgacagcttagagctggagctggggacggaatggtgcaaacctccttacttttcttgtgctgttgacaacagaggaggaggaaaacatttttctggagaatcctacctctgcagcggagcccttaagcgattgattttgaatcttgaccctttaccaactaattttgaagaagataccttggaaatatttggcattcagtgggttactgaaacagcattagtgaattcatctagagaactctttcatttattcaggcaacaactgtacaacttggaaaccttgttacagtccagttgtgattttgggaaggtatcaactctacactgcaaagcagacaatattaggcagcagtgtgtactatttctccattatgttaaagttttcatcttcaggtatctgaaagtacagaatgctgagagtcatgttcctgtccatccttatgaggctttggaggctcagcttccctcagtgttgattgatgagcttcatggattactcttgtatattggacacctatctgaacttcccagtgttaatataggagcatttgtaaatcaaaaccagattaagctttttccaccgtcatggcatttattacatctccacttggatatacattggctggtgctagaaattctttacatgctgggtgaaaaattgaaacaagttgtatatggtcatcagtttatgaatctggcaagtgacaatttaaccaacatcagcctatttgaagaacattgtgaaactctcctttgtgatttaataagcctgtcactcaacaggtacgacaaggttaggtcttctgaatcattaatgagtgaccagtgtccatgtttatgcattaaagaattatgggttctacttattcatcttctagaccacagaagtaaatggtttgtctcggaatcattttggaactggttgaataaactacttaaaacactgcttgaaaaatcaagtgaccgaagaagatcctctatgcctgtaatccagtccagggatccattaggttttagttggtggattattactcatgtagcatcattttacaagtttgatcgccatggagtaccagatgaaatgagaaaagtggaatcaaattggaactttgtagaagaactgctgaaaaagtccatcagtgttcagggtgtcattctagaagaacaattacgaatgtatcttcactgttgtttgacactttgtgatttctgggagccaaacattgcaattgttaccattttatgggaatattatagtaagaacctgaatagttccttcagtatttcttggcttccttttaaaggccttgctaataccatgaagtcacccttgtctatgcttgaaatggtgaagacttgctgttgcgataaacaagatcaggaactatataaatccagcagtagttatactatttttctttgtattctggcaaaagttgttaaaaaagcaatgaagagcaatggccctcatccttggaaacaagtcaaaggaagaatatattcaaaattccatcaaaaaagaatggaagaactaactgaagttggtctacagaacttttttagcctttttctactgttagcagctgttgcagaggtagaagatgttgcaagtcatgttttagacctcctgaatttcctcaagcctgcttttgtaacgtctcagagagccctcatttggaagggtcacatggccttcctcttgatgtatgcccagaaaaatctggacattggtgttttggctgagaaattttcatgtgctttccgggagaaagcaaaggaattcttggtgtctaagaatgaggaaatggtacagagacagactatctggacccttctttccatatacattgatggtgttcaagaagtgtttgagaccagctattgcttgtatccttcccatgaaaaactgcttaatgatggatttagtatgcttctgcgagcatgtcgagaatctgaacttaggacagtattgagcttcctacaagctgttctggccagaatcaggagtatgcatcaacaattgtgtcaggaacttcaaagggacaatgtggacctatttgtacagtcttcattatcggctaaagagcgccaccttgctgcagttgccagtgcactgtggagacatttcttttcatttttgaagagtcagagaatgtcacaggtagtgcctttctcacaacttgcggatgcagctgcagactttactttgctagcaatggacatgccaagcacagctccatcagattttcagcctcagccagttatatcaattattcaactttttggttgggatgatatcatctgccctcaagttgtagcaagatatttaagtcatgtcctacaaaatagcacattatgtgaagcactttctcattcaggctatgtatcttttcaagccttaaccgtaagatcatggattcgttgtgttttgcaaatgtatattaaaaacctctctgggcctgatgatttgctcatagataaaaatctggaagaggcagttgaaaaagagtacatgaaacagttggtcaaactgacaagattactatttaatctctcagaagtaaagagtattttctcaaaggcccaagttgaatatttatccatctcagaagaccctaaaaaagcacttgttcgattctttgaggctgttggtgtaacttacgggaacgtccagacactttctgataaatctgccatggtcacaaagtccttggaataccttggtgaagtattaaaatatattaagccttatttgggaaaaaaagttttcagtgcagggctgcagctgacttatggaatgatgggaattcttgtgaaatcatgggcacaaatctttgccacttctaaagcccaaaaattactattccggatcatagattgtttactgctgccacatgcagtattacagcaagagaaggaactgcctgcacctatgttgtcagcaattcagaaaagtcttcctttgtatctccagggcatgtgtatcgtgtgttgtcaatctcaaaatccgaatgcctatttgaatcaattgctagggaatgttattgagcagtatattgggcgatttcttccagcttcaccatatgtttcagatcttggacaacatcctgttttgctggcattgagaaacacagccactattccaccaatatcatctctaaagaaatgcattgtgcaagtcataaggaaatcctaccttgagtataaggggtcctcacctcctcctcgcttagcatccattctggccttcatcctccaactcttcaaggaaactaacacagacatttatgaagttgaactactcctccctggcattttaaaatgcttggtgttagtcagtgaaccacaagttaaaaggctggccacagagaacctgcaatacatggtaaaagcctgccaagtggggtcagaagaagaaccttcctcccagctgacttctgtgtttaggcagtttatccaggattatggtatgaggtactattaccaggtttacagcattttagaaacagtagcaacattggaccagcaggttgtcatccacttgatttctacccttactcagtctctgaaggattcagagcagaaatggggccttggcaggaatatagcacaaagggaagcctatagcaaacttttgtctcaccttggacagatgggacaagatgagatgcagagactggaaaatgataatacttaatatattttgtgattcatcctgtctattaattatcagtatctaaagccacattgttccactctaattcctacttttaattaattgtataatgttctgtttaaaataatttctaggattttttttccttttatatctgtaagtaaaaaatgtataaataaggaactgaaggttaattagcaactgtgtaataggatccttggaactttttacaaaactgcattctaccttgatgaaattttagttaaactaaattaaagaaacattttctgagagtgttttctgtgtgtgagtattaagcagatacttcatccatagactttttgttgtagtatgacttcctgcctccctgccttgtgactgatttgtcatgtttattttttatttttacaataatagttatgttttaaaatgatactttttcaaagtacctggctaccctatactgtgtttttggtgggggaaaggtgttgggaaatgtgactgtgtatttgtttttcttttttatatgtgtgaggcaagttaacaaagaaaacccttacaaagcacacttaactgtgttaggaatgagactgaatctggctaaaggattatacagctgatatccaaaaagaagtgtaaacatgccaacagggtttatatttaggttccaagagttgccaaattttttttttattcatcctttcttttggagttgtcattaaaaaaaaaatcatatcaggaggaggaaataaaggagactttaagaggagagtaaataaaaatattctagaaaagtaacaatagtagtggtctgagaagtcagctgatccatcttcttgctctttagccagagcttcttataacttagcattttatccaagaaacctgtttagtttcctttaacaacattgtttctcaacttttgaactcttaactcatccagattgttttaccagttggagcttgtccttgactccttttcctattgagcattatttggttgaaagagctccagtcctagttttgggaacccacctgggtctcaaactca

SEQ ID NO: 6370 - protein, 1243 aa, Homo sapiens; identical to SEQ ID NO: 797

SEQ ID NO: 6371 - DNA, 4269 bp, Homo sapiens
gtttgcggtttagaccccaaagattcctgttggtggtctgggtcacaggaggcaggtttcgggagctggaaatgtgagcgggtacgacaggcaccgcgggtaaccgacgccccgggtccttgctgcagccgggtacgcgggataccggcaccccgccttctccgcccgagtgctgccaggcgtgggcctggaatctcttcacaccttctctttggagcccttaatgatacgacgaaccccaagtgtttcagaacatgaagtaaacaatggagaactgttctgctgcatcgacgttcctgactgacagcttagagctggagctggggacggaatggtgcaaacctccttacttttcttgtgctgttgacaacagaggaggaggaaaacatttttctggagaatcctacctctgcagcggagcccttaagcgattgattttgaatcttgaccctttaccaactaattttgaagaagataccttggaaatatttggcattcagtgggttactgaaacagcattagtgaattcatctagagaactctttcatttattcaggcaacaactgtacaacttggaaaccttgttacagtccagttgtgattttgggaaggtatcaactctacactgcaaagcagacaatattaggcagcagtgtgtactatttctccattatgttaaagttttcatcttcaggtatctgaaagtacagaatgctgagagtcatgttcctgtccatccttatgaggctttggaggctcagcttccctcagtgttgattgatgagcttcatggattactcttgtatattggacacctatctgaacttcccagtgttaatataggagcatttgtaaatcaaaaccagattaagctttttccaccgtcatggcatttattacatctccacttggatatacattggctggtgctagaaattctttacatgctgggtgaaaaattgaaacaagttgtatatggtcatcagtttatgaatctggcaagtgacaatttaaccaacatcagcctatttgaagaacattgtgaaactctcctttgtgatttaataagcctgtcactcaacaggtacgacaaggttaggtcttctgaatcattaatgagtgaccagtgtccatgtttatgcattaaagaattatgggttctacttattcatcttctagaccacagaagtaaatggtttgtctcggaatcattttggaactggttgaataaactacttaaaacactgcttgaaaaatcaagtgaccgaagaagatcctctatgcctgtaatccagtccagggatccattaggttttagttggtggattattactcatgtagcatcattttacaagtttgatcgccatggagtaccagatgaaatgagaaaagtggaatcaaattggaactttgtagaagaactgctgaaaaagtccatcagtgttcagggtgtcattctagaagaacaattacgaatgtatcttcactgttgtttgacactttgtgatttctgggagccaaacattgcaattgttaccattttatgggaatattatagtaagaacctgaatagttccttcagtatttcttggcttccttttaaaggccttgctaataccatgaagtcacccttgtctatgcttgaaatggtgaagacttgctgttgcgataaacaagatcaggaactatataaatccagcagtagttatactatttttctttgtattctggcaaaagttgttaaaaaagcaatgaagagcaatggccctcatccttggaaacaagtcaaaggaagaatatattcaaaattccatcaaaaaagaatggaagaactaactgaagttggtctacagaacttttttagcctttttctactgttagcagctgttgcagaggtagaagatgttgcaagtcatgttttagacctcctgaatttcctcaagcctgcttttgtaacgtctcagagagccctcatttggaagggtcacatggccttcctcttgatgtatgcccagaaaaatctggacattggtgttttggctgagaaattttcatgtgctttccgggagaaagcaaaggaattcttggtgtctaagaatgaggaaatggtacagagacagactatctggacccttctttccatatacattgatggtgttcaagaagtgtttgagaccagctattgcttgtatccttcccatgaaaaactgcttaatgatggatttagtatgcttctgcgagcatgtcgagaatctgaacttaggacagtattgagcttcctacaagctgttctggccagaatcaggagtatgcatcaacaattgtgtcaggaacttcaaagggacaatgtggacctatttgtacagtcttcattatcggctaaagagcgccaccttgctgcagttgccagtgcactgtggagacatttcttttcatttttgaagagtcagagaatgtcacaggtagtgcctttctcacaacttgcggatgcagctgcagactttactttgctagcaatggacatgccaagcacagctccatcagattttcagcctcagccagttatatcaattattcaactttttggttgggatgatatcatctgccctcaagttgtagcaagatatttaagtcatgtcctacaaaatagcacattatgtgaagcactttctcattcaggctatgtatcttttcaagccttaaccgtaagatcatggattcgttgtgttttgcaaatgtatattaaaaacctctctgggcctgatgatttgctcatagataaaaatctggaagaggcagttgaaaaagagtacatgaaacagttggtcaaactgacaagattactatttaatctctcagaagtaaagagtattttctcaaaggcccaagttgaatatttatccatctcagaagaccctaaaaaagcacttgttcgattctttgaggctgttggtgtaacttacgggaacgtccagacactttctgataaatctgccatggtcacaaagtccttggaataccttggtgaagtattaaaatatattaagccttatttgggaaaaaaagttttcagtgcagggctgcagctgacttatggaatgatgggaattcttgtgaaatcatgggcacaaatctttgccacttctaaagcccaaaaattactattccggatcatagattgtttactgctgccacatgcagtattacagcaagagaaggaactgcctgcacctatgttgtcagcaattcagaaaagtcttcctttgtatctccagggcatgtgtatcgtgtgttgtcaatctcaaaatccgaatgcctatttgaatcaattgctagggaatgttattgagcagtatattgggcgatttcttccagcttcaccatatgtttcagatcttggacaacatcctgttttgctggcattgagaaacacagccactattccaccaatatcatctctaaagaaatgcattgtgcaagtcataaggaaatcctaccttgagtataaggggtcctcacctcctcctcgcttagcatccattctggccttcatcctccaactcttcaaggaaactaacacagacatttatgaagttgaactactcctccctggcattttaaaatgcttggtgttagtcagtgaaccacaagttaaaaggctggccacagagaacctgcaatacatggtaaaagcctgccaagtggggtcagaagaagaaccttcctcccagctgacttctgtgtttaggcagtttatccaggattatggtatgaggtactattaccaggtttacagcattttagaaacagtagcaacattggaccagcaggttgtcatccacttgatttctacccttactcagtctctgaaggattcagagcagaaatggggccttggcaggaatatagcacaaagggaagcctatagcaaacttttgtctcaccttggacagatgggacaagatgagatgcagagactggaaaatgataatacttaatatattttgtgattcatcctgtctattaattatcagtatctaaagccacattgttccactctaattcctacttttaattaattgtataatgttctgtttaaaataatttctaggattttttttccttttatatctgtaagtaaaaaatgtataaataaggaactgaaggttaattagcaactgtgtaataggatccttggaactttttacaaaactgcattctaccttgatgaaattttagttaaactaaattaaagaaacattttctgag

SEQ ID NO: 6372 - protein, 1243 aa, Homo sapiens; identical to SEQ ID NO: 797

SEQ ID NO: 6373 - DNA, 594 bp, Homo sapiens
cagacaatattcaacatcctgtaatcatcatagcgttctggaggtcagtaagtccaatatcaaggtgccagcatcaggcattatggccagcacacttcctgcgaatttgtaccaccaccccttatctcatctatgcttctgctcacagcactgcactggagccaggggatggatacctggcacttgtatgtcctatgaagaaagagaggaggatacattgcttccctatgtatccttaagggatagaccagaggaaaagttaagtaatagataaacaatcaataatacctaattggtttcccaatcaattagcacttactgtgttggatttgttcactttcagccatagttacaccttgaatttctgtatttccaaagtgggctcttttttttctaaggaatttcctcaattttttcgtgtaagtaggcttctgaggagtctatttcactgatttttgtgatatatttaatcattccagggctacaaaatttaagctgaatttaaattattcataatataacaatctctcttcctctgtctctctttctttctatatctttcattacatatatgtaataaaatattttcattat

SEQ ID NO: 6374 - protein, 63 aa, Homo sapiens
MASTLPANLYHHPLSHLCFCSQHCTGARGWIPGTCMSYEEREEDTLLPYVSLRDRPEEKLSNR

SEQ ID NO: 6375 - DNA, 4974 bp, Homo sapiens
gttttctgacatagaccccaggatctgtaattatcttagagaaactgcgggggcttagatggtactttgtagttcatttggttttttttgtttgtttgtttgttttttgcctttctctctttggggctgaagagctggtgtgtctgtgtgtgtgttcctctagagtgccaaaaaagaaaaaaaaaagtgctgaagagtcctagggagatgaggctatttttgtttgaagctgatacttctagctgagccacaagtgctgcttggaaagggcttaggttgtttccagggggagaactctgcagaggagaggcaaagttcaacaggacaacaaagaagcagcagaaacagccaggaaaacgaagagcccccaggttttgacacagaaccctccaccagagttctcaaatccccaaatactctgcaaagtgcaacttgacgggaacttttcaactgacttttacttttgacgaccaccatgactgagatcactgctgaaggaaatgcatctacaaccacaactgtgatagacagcaaaaatggatctgtgcccaaatcccccggaaaagtgctgaagaggacagtcacagaagacatagtgacgacgttcagctcccctgcagcctggcttctggtcattgccctgataatcacgtggtcagctgttgccatcgttatgtttgatttagtggattacaaaaacttttcagcaagctctattgccaagattggctcagatcctttaaaactggtacgtgatgctatggaggaaaccacggactggatctatggcttcttttctttgttatctgacatcatctcatctgaagatgaagaagatgatgatggtgacgaagatactgataaaggagaaatagatgagcctcccttgagaaaaaaagaaatacacaaagataagactgaaaaacaagagaaacctgaaaggaaaatacaaactaaagttacacacaaagaaaaagaaaaaggaaaagaaaaagtaagagaaaaagaaaaacctgaaaagaaagcaactcacaaggaaaaaattgagaaaaaagaaaaaccagaaacaaagacactggcgaaagaacagaagaaagctaagactgcagaaaagagtgaagaaaagactaaaaaggaagtgaaaggtggaaaacaggagaaagtgaagcaaacagctgcaaaagtaaaagaagtacagaaaacaccatcaaaacccaaagaaaaggaggacaaagagaaagcagctgtgtcaaagcatgaacagaaagatcagtatgcattctgtcgatatatgattgacatatttgtccatggggatttaaaaccaggacaaagcccagccattccacctcccttaccgacagaacaagcttccagacccactccggcatcacctgcccttgaagaaaaagaaggggaaaagaagaaggctgagaagaaagttacttctgaaacaaaaaagaaagaaaaagaagatatcaaaaagaaaagtgagaaggaaactgccattgatgtggaaaaaaaagagccgggaaaagcttctgaaaccaaacaagggactgtaaaaattgcagcacaagcagcagctaagaaggatgaaaagaaggaagattccaagaaaacaaaaaaacctgcagaagtagaacaacccaagggaaaaaaacaggaaaagaaagaaaaacatgtggaaccagcaaagtcaccaaagaaagaacactcagttccaagtgacaaacaagtaaaagcaaaaactgaacgagccaaagaggagattggtgcggtttcaattaaaaaagctgtacctggaaagaaggaagagaaaacaaccaagacagtggagcaagaaattagaaaagaaaaatctgggaagacttcttcaattctgaaagataaagaacctattaaagggaaagaagagaaagttccagcttccctaaaggaaaaagaacctgaaactaaaaaagatgaaaagatgtccaaagcaggcaaagaagtcaagcctaaacctccacaactacaaggaaaaaaggaagagaagccagagccccaaattaaaaaagaagcaaaaccagctatatctgaaaaagtgcaaatacacaaacaagacatagtgaaaccagaaaagactgtttctcatggtaaaccagaagaaaaagttctcaagcaggtaaaagctgtcacaatagaaaaaacagccaagcccaaaccaacaaaaaaagctgaacatcgagaaagagaacctccatctataaaaacagacaaaccaaaaccaactccaaaaggaacatcagaagtcacagaatcaggaaagaagaaaactgaaatatctgaaaaagaaagtaaagaaaaagcagacatgaagcatcttagagaagaaaaagtctcaacaagaaaagaaagtcttcaattacacaatgtgacaaaagcagaaaaacctgcaagagtatcaaaagatgttgaagatgtaccagcttcaaagaaagctaaagaaggaactgaagatgtgtctcccacaaagcagaaaagtcccatcagtttcttccagtgtgtctacttggatgggtacaatggctatggatttcagtttcctttcactcctgcagaccgccctggagagagctctggtcaagcaaattctccaggacagaagcaacaaggacagtaaacacacatgtatgacccttacaagtgctttaagattttaaaaatgtgatgttttgtccacagtagttcaggcaattaagaatatgcaacccagagaatttctgtgaaaacattttgctctttggcctggtgtggacggaaagggtggccaaatggattgagtgatgagcagacatgtttaagggtctaagtctcaagaatctgttatgtgtgtttgctgcggtgggagggggtgcttgtatttatcttatttccagtcactataaggttgtacacaaactaatttaaagtttacttaataatggtatctttaaaataattgacacaattgcaaaatgaattcctggcttcagttagctattatttttttaatgacaacatagactgtgctctaagtttaaaagatggggaagcttatataaaagtgacccttttgcatcatatgggtatctaaacttaatttacccaataagttgatgcttaatgattttattttatttttgtctatttctattttagttgtggctttgctctaagaatgggtaatagttgtactacagactgctataaatttcttgtgatactcttttagagctcaaaatatctctgagctttagacatggtaaggtggagagtaaatgcttgataaatctttaagatatgtcttgaatgataattaggacattcagtccagtggaaatacaccattcaattagtcaggtctggtgaatcgtttgtttaaaatattagcaaatgagatgtggaattctgaaatttctccagactgtgtcttaataaaaatgtcacctgggtgaaattttagatcaatcactaaatttgggtgacaaatataaaaatattttcatttcactttaatacattctttctgtgaagtaaaatgtttttctttctcataatggcaaaatatgaatgccatcaaagtttaaggaattcattttagccttaaatgccttcgtgagatgtcttacttgtattttaggtaactggtcatcagtgccaatgacatggataacaatttttaatctactcgacagtgcatccctgggaatgactgttatgtttttgtcatattcctggtaatataaatactcgtgttctttactacattgtttttatcaactctaaaagtcatgcctctgtgacctttatcatgtttacaattgcaactgaacttatgacaaattaactcaggaaataaattgagttatcctttctagcattgtaattaccatcagcaaggcctgagatagccagagccaatactagccaagtgatttattttcaaggattgccactaactacggttctttaggaccaagatataaaacagtcactaaaaatcattaggctaggtatcagtaatacattcattactaataatgcatttttggagacttttgtgaaagaagttggtctctgccaaaagctggtggaccacattcacaccacgaaagccagtgtcacatgaaccagattaatgactctctttatggggtatgtgggacatcctggaagtgtataatttcaggaatgaccagacaataccatcttgcaaagccccttcaggtgacaatctaaacttgtgggtaggagagtgcataaagtttattgctcaactgctcctccagcctgctgaatttactgagtaaagaaatagcaaatatgatagatgttttagatttcatagaacagaatggtttgtccattaattctttcattcaatgactgtttattgaatacctactcttttagggcgctgtgttaggtgctgtattgtacaagaaaaatataataaattagattcccagcgctattctgacatagtgaatgaccttgaaaaatttactaaacatactatgtttgtttctccatgagtaaaatagggatatagggacaaacagtctaatatctcatagaaataccatggagacaaataaaatattttaatataaatatgatattaaagtaaatttctgaagtaatacttttgggtatggcactagtttttcctctgactattttactgtttctttcactctcaatataaaaactatttgataagataaaacgatatattttattgtaattagaatttagacaaatcagctataatgtaaaaatgttaataataattacgttttatctgattaaagttacaatgatcatagcactttaaaaatattatctgaactgtcatttgtttatatattaccgtctaataaaatagttatagatcttccaagtttgatgccttacattttaaaaggaaaagataaatggttgattaag

SEQ ID NO: 6376 - protein, 729 aa, Homo sapiens; identical to SEQ ID NO: 801

SEQ ID NO: 6377 - DNA, 4907 bp, Homo sapiens
gttttctgacatagaccccaggatctgtaattatcttagagaaactgcgggggcttagatggtactttgtagttcatttggttttttttgtttgtttgtttgttttttgcctttctctctttggggctgaagagctggtgtgtctgtgtgtgtgttcctctagagtgccaaaaaagaaaaaaaaaagtgctgaagagtcctagggagatgaggctatttttgtttgaagctgatacttctagctgagccacaagtgctgcttggaaagggcttaggttgtttccagggggagaactctgcagaggagaggcaaagttcaacaggacaacaaagaagcagcagaaacagccaggaaaacgaagagcccccaggttttgacacagaaccctccaccagagttctcaaatccccaaatactctgcaaagtgcaacttgacgggaacttttcaactgacttttacttttgacgaccaccatgactgagatcactgctgaaggaaatgcatctacaaccacaactgtgatagacagcaaaaatggatctgtgcccaaatcccccggaaaagtgctgaagaggacagtcacagaagacatagtgacgacgttcagctcccctgcagcctggcttctggtcattgccctgataatcacgtggtcagctgttgccatcgttatgtttgatttagtggattacaaaaacttttcagcaagctctattgccaagattggctcagatcctttaaaactggtacgtgatgctatggaggaaaccacggactggatctatggcttcttttctttgttatctgacatcatctcatctgaagatgaagaagatgatgatggtgacgaagatactgataaaggagaaatagatgagcctcccttgagaaaaaaagaaatacacaaagataagactgaaaaacaagagaaacctgaaaggaaaatacaaactaaagttacacacaaagaaaaagaaaaaggaaaagaaaaagtaagagaaaaagaaaaacctgaaaagaaagcaactcacaaggaaaaaattgagaaaaaagaaaaaccagaaacaaagacactggcgaaagaacagaagaaagctaagactgcagaaaagagtgaagaaaagactaaaaaggaagtgaaaggtggaaaacaggagaaagtgaagcaaacagctgcaaaagtaaaagaagtacagaaaacaccatcaaaacccaaagaaaaggaggacaaagagaaagcagctgtgtcaaagcatgaacagaaagatcagtatgcattctgtcgatatatgattgacatatttgtccatggggatttaaaaccaggacaaagcccagccattccacctcccttaccgacagaacaagcttccagacccactccggcatcacctgcccttgaagaaaaagaaggggaaaagaagaaggctgagaagaaagttacttctgaaacaaaaaagaaagaaaaagaagatatcaaaaagaaaagtgagaaggaaactgccattgatgtggaaaaaaaagagccgggaaaagcttctgaaaccaaacaagggactgtaaaaattgcagcacaagcagcagctaagaaggatgaaaagaaggaagattccaagaaaacaaaaaaacctgcagaagtagaacaacccaagggaaaaaaacaggaaaagaaagaaaaacatgtggaaccagcaaagtcaccaaagaaagaacactcagttccaagtgacaaacaagtaaaagcaaaaactgaacgagccaaagaggagattggtgcggtttcaattaaaaaagctgtacctggaaagaaggaagagaaaacaaccaagacagtggagcaaggtaaaaaaaaatgaaggaggttgacattatcttctttagaaagacaacaacatgcggaggaaagcactggattcagacaggcggaagacaataacctttaagtctattactctttatcactgtccttgcatgtttttctgtgccagggagaatgtgagacagcaatctgggttggtctttcttttgtgtaactgaactttgaatatcagttccgaacagggaaactccccaaactgtttaattacatcaggggacatgctgaagattgctgggaataagacaatgatccagggtaactggtagacatattcctatttgatttgtggttttaacaccaccttactgattataatttgaaaaataaagatggcccaatcctatacatgcaaaaactatttctgttgcttgaaaaaaaatatgtaaaagttaaaatgaagaaaataacagcaaaaatagagtatattatgatatatactatattatgacttcaaccattctcccaagaggtctgaaatttcagtgttataaatcataatggtataaaatagttaatgcattttatttgtatttatgtagttatatcataaatagatcactccagactctgcttgagaaaaatgctacagtacactaaacttaaaacatttaaagtgatgtggcttctcttagagctcaagtgtgctaataattttaattgtcgttccctcatgtcattgctcttatataataatactatatttattgtaataaattaaattagaacttgcaataattttatcaagaacaaagtctaaatgatttctccttcaaatttgagatgcaattaaatgtatgaaatcctaatatcagaagttaagatcttttgacataaatatatcaagaaaatccttcaatccctcacatgtcaaataagtaaactaaggttaagaattcagttaagtaaaaagattggttaagaatttatttccttgggcttttcaaaataaaatccctttataattgcatggaaaatgttttccaatttattctggcttctggggactctgaaattttacagttcagtagatgtttctgttggtttctttttgaagaagagtggaattttagtttctgaaatataaagtgggagcactggatcctaatttcagtgtgttcatttatgcgtgttcctgagtctaaatttatttttttaaaaaataaaggtaattatccctgatctgcccatctgagaagatgttgtatagggcaaacatgaaaacatatgtgaaaggatatgaaaatgtgtaaacttctagataagcatgtaacagatacttaggcattttttcttataaaatcaatttcaacacagatgacataaattatcaaattactttgatttcattgagttttatagctttccccctctagtataaaagtgctgattactcatgatattcataggttgttttcatagccacagtatatcaaaagaagattgactagatataaaacacccacactaataatagtaccaaacagacaattgatttgaaaacattgtttctttcttctgatcatcacattggtgtcagtttcattaattttataatgtctcctctagtggacaagagactggaaatggttcttagagataggatcttactccttcagatgattttataattttgtttactaaaatcttcttttatcttattaaagcttaggctcttggattgtgtgaaaaaaatgaggttctttcaatggctatttttatattgacttggtaaatcatttcaattttaaatattgtatgacaatggcctcatatttttcaatcataacaatcataggaaataatatatttggatattttgcatatttttatgatagtatatctattactaataactgatacaaaaaatagatattttgtgcttttaataaagtaatatgagaagtaataatgacattctataaattgtcccatattctaatagttatgcataatgctttaagacttgtatactttgctttcttacatagtttttagttatcttcagaagtataaataatctattagtttataattcattgaaatatagttaaattctctttaaatatttattttatttatttgtttaaacatgtggactttatttagaaaaattatatgatttttgttactcttaatagagtttaagtacactttgtgatctgagtataattgtgcatattgaatctctggacttaaatactatggatattccagtatctcaaaattaagttgaaagttttattacagaataatgtagtattcagttctcttaagaattaaaaatcacttcgacagtcagttaagaagaaacacgacaaaaatatttttaggtaattaaataagatttgtctactaaccatcaagaataaattttaacacagttagtaaacattttattaagtataaagttggagcctgttgatcataaatgtatcagagttcactataataaaatattcaactttgccttaaattaaggaatgtttcaaaattcataaatgggctaatttgtgtccacttgaagagtttctttctttgcttttgatgctattctgtaaacaatggttccctacataattgtaatagtgttttacgttgtcacaacaccaggcaaaacccaagtgctattgcaagctttgtaaatctatcactgtcctcatccaccttatcagattcttctcttctttgtgtatgcactggtctttttaaaatctgtgatgtgtactgattgtagatttattccatactttcaagtgaatgctaataatatctaagagtaatgatttccctgagaaaactttatccatttgaatataatgaatgttcatatttcttggtgtaccaaagttataaaaaaagacagaaacaattttacatttaaaatcaatgaagtaaaacagaagatttagttaacacaattgtatttaattatttgcttaatatgtatttttaaaataacttatttgcatatgttgactaagtcatgctgttgaccctcaataaatgttaaattatgataatattat

SEQ ID NO: 6378 - protein, 460 aa, Homo sapiens
MTEITAEGNASTTTTVIDSKNGSVPKSPGKVLKRTVTEDIVTTFSSPAAWLLVIALIITWSAVAIVMFDLVDYKNFSASSIAKIGSDPLKLVRDAMEETTDWIYGFFSLLSDIISSEDEEDDDGDEDTDKGEIDEPPLRKKEIHKDKTEKQEKPERKIQTKVTHKEKEKGKEKVREKEKPEKKATHKEKIEKKEKPETKTLAKEQKKAKTAEKSEEKTKKEVKGGKQEKVKQTAAKVKEVQKTPSKPKEKEDKEKAAVSKHEQKDQYAFCRYMIDIFVHGDLKPGQSPAIPPPLPTEQASRPTPASPALEEKEGEKKKAEKKVTSETKKKEKEDIKKKSEKETAIDVEKKEPGKASETKQGTVKIAAQAAAKKDEKKEDSKKTKKPAEVEQPKGKKQEKKEKHVEPAKSPKKEHSVPSDKQVKAKTERAKEEIGAVSIKKAVPGKKEEKTTKTVEQGKKK

SEQ ID NO: 6379 - DNA, 1841 bp, Homo sapiens
gttttctgacatagaccccaggatctgtaattatcttagagaaactgcgggggcttagatggtactttgtagttcatttggttttttttgtttgtttgtttgttttttgcctttctctctttggggctgaagagctggtgtgtctgtgtgtgtgttcctctagagtgccaaaaaagaaaaaaaaaagtgctgaagagtcctagggagatgaggctatttttgtttgaagctgatacttctagctgagccacaagtgctgcttggaaagggcttaggttgtttccagggggagaactctgcagaggagaggcaaagttcaacaggacaacaaagaagcagcagaaacagccaggaaaacgaagagcccccaggttttgacacagaaccctccaccagagttctcaaatccccaaatactctgcaaagtgcaacttgacgggaacttttcaactgacttttacttttgacgaccaccatgactgagatcactgctgaaggaaatgcatctacaaccacaactgtgatagacagcaaaaatggatctgtgcccaaatcccccggaaaagtgctgaagaggacagtcacagaagacatagtgacgacgttcagctcccctgcagcctggcttctggtcattgccctgataatcacgtggtcagctgttgccatcgttatgtttgatttagtggattacaaaaacttttcagcaagctctattgccaagattggctcagatcctttaaaactggtacgtgatgctatggaggaaaccacggactggatctatggcttcttttctttgttatctgacatcatctcatctgaagatgaagaagatgatgatggtgacgaagatactgataaaggagaaatagatgagcctcccttgagaaaaaaagaaatacacaaagataagactgaaaaacaagagaaacctgaaaggaaaatacaaactaaagttacacacaaagaaaaagaaaaaggaaaagaaaaagtaagagaaaaagaaaaacctgaaaagaaagcaactcacaaggaaaaaattgagaaaaaagaaaaaccagaaacaaagacactggcgaaagaacagaagaaagctaagactgcagaaaagagtgaagaaaagactaaaaaggaagtgaaaggtggaaaacaggagaaagtgaagcaaacagctgcaaaagtaaaagaagtacagaaaacaccatcaaaacccaaagaaaaggaggacaaagagaaagcagctgtgtcaaagcatgaacagaaagatcagtatgcattctgtcgatatatgattgacatatttgtccatggggatttaaaaccaggacaaagcccagccattccacctcccttaccgacagaacaagcttccagacccactccggcatcacctgcccttgaagaaaaagaaggggaaaagaagaaggctgagaagaaagttacttctgaaacaaaaaagaaagaaaaagaagatatcaaaaagaaaagtgagaaggaaactgccattgatgtggaaaaaaaagagccgggaaaagcttctgaaaccaaacaagggactgtaaaaattgcagcacaagcagcagctaagaaggatgaaaagaaggaagattccaagaaaacaaaaaaacctgcagaagtagaacaacccaagggaaaaaaacaggaaaagaaagaaaaacatgtggaaccagcaaagtcaccaaagaaagaacactcagttccaagtgacaaacaagtaaaagcaaaaactgaacgagccaaagaggagattggtgcggtttcaattaaaaaagctgtacctggaaagaaggaagagaaaacaaccaagacagtggagc

SEQ ID NO: 6380 - protein, 454 aa, Homo sapiens
MTEITAEGNASTTTTVIDSKNGSVPKSPGKVLKRTVTEDIVTTFSSPAAWLLVIALIITWSAVAIVMFDLVDYKNFSASSIAKIGSDPLKLVRDAMEETTDWIYGFFSLLSDIISSEDEEDDDGDEDTDKGEIDEPPLRKKEIHKDKTEKQEKPERKIQTKVTHKEKEKGKEKVREKEKPEKKATHKEKIEKKEKPETKTLAKEQKKAKTAEKSEEKTKKEVKGGKQEKVKQTAAKVKEVQKTPSKPKEKEDKEKAAVSKHEQKDQYAFCRYMIDIFVHGDLKPGQSPAIPPPLPTEQASRPTPASPALEEKEGEKKKAEKKVTSETKKKEKEDIKKKSEKETAIDVEKKEPGKASETKQGTVKIAAQAAAKKDEKKEDSKKTKKPAEVEQPKGKKQEKKEKHVEPAKSPKKEHSVPSDKQVKAKTERAKEEIGAVSIKKAVPGKKEEKTTKTV

SEQ ID NO: 6381 - DNA, 553 bp, Homo sapiens
gagacaatttttccagcagtttgttgggtctggagttataaagttgaataagtgacaatcaatcagtgatctcagagaatttatagggtagtaggaagggaagttgtacgagtaaataattatatgatttcacattgaaatggaaatctgtactgtggaggtcagtgggctgggtattgtcaataaccaggataaagtctgtgtggtaggagcccactacctgctttaccatctgctgctactcattctcctgcccctgtcagttcctctctctaatggccagccacttcactgcagatggggggagtctttcttatttattttgttgttactataagtaagagacttacatgttattcaggtatttgaataacattgtttattgtctcttttgaagtaataattgatctctaccaacttattctaaaattaaaacataataaatacactgttttttttttcagagatgggagaatgctcaaaaacatgtaagatgtggagccgggaaaagcttctgaaaccaaacaagggactgtaaaaattgcagcacaag

SEQ ID NO: 6382 - protein, 65 aa, Homo sapiens [sequence omitted]

SEQ ID NO: 6383 - DNA, 420 bp, Homo sapiens
agaggttgcagtaagtctggatgccacatcaaactgtttgtggtacttctaaacttcgtggaagagccctgtttcataaatctgagacagccttggtctgagggagcaaagacagagaattcacgtgctgcccaggcatagccacatagcaggtggacatccctggacacttttctgacaaagcacgcaatgtggggacaacacagaaatccaagaaaggcaagaccaatttcaaggcactaaataagtggactgagacaagaagtacacagatacttcccagaacaaaagattttatgtcatagaccctcattggattttcctggaagtacggagagttacatccagagaactctgaacattttggaaggaccccaatcctgcaaacaatgaatggcaataaatcctgggactggaaag

SEQ ID NO: 6384 - protein, 49 aa, Homo sapiens
ISGLRQEVHRYFPEQKILCHRPSLDFPGSTESYIQRTLNILEGPQSCKQ

SEQ ID NO: 6385 - DNA, 2412 bp, Homo sapiens
agaggttgcagtaagtctggatgccacatcaaactgtttgtggtacttctaaacttcgtggaagagccctgtttcataaatctgagacagccttggtctgagggagcaaagacagagaattcacgtgctgcccaggcatagccacatagcaggtggacatccctggacacttttctgaccctcattggattttcctggaagtacggagagttacatccagagaactctgaacattttggaaggaccccaatcctgcaaacaatgaatggcaataaatcctgggactggaaaggggcttctcaaccccaaggcaaccataaagtcctatacaaagaaagatacagcagtgtgaaagaggcctggatgaaaaaacaaagacagagccagtgagccagagccagagccagaggacaagagagaaaggcagagaatggaaaacacagacagagaaggcagatgcgtagagagacagagattcaatgagaaaataaggaaggaagaaagaaagaaaacaaaaacgttctcagcactacaacttctgccttgttctgttccagaacagtatgagctcagtactttttcagactctcaattttctacaactaataatttgctctttcagttagtggcaaaggcttaacgacaaaggttcatctttaatattagagaggcacttttaaaatttatgatgctaagccttttgttctggatatggtatgttgcacaggtctagggactgggatttcagatgtctattccgtacccttattcttttatttattaaatcttttagtgtgtatttttttctattttctcttcttttattagtatgtatttcttgagtcattaacatacaacatatataggacttcctctgaggatacaataatgtatatgatggacaagatacgtaaaagtgccttgaagagacttggtcttgtgaggggacagacaggaaacaggcaattatcacctaacttaggtctgttgtttcaaggtaaaataagaataataacatctgtgttggctgggatgttgtgagtgtttgtggagataatagtacaaatgaaattactgagggacaatggtgaagatagggccatatcatggagcttacactagtgatggaaggagatgggagatacaaaagcaagtcaatatttcagatttcgtaaatgaatggcaagcatagagcagtgaggcagagaatgactggagaaagagactatgttaaactggatagtaaaggaagagcaggaccccactaaactatatggagttttgtgcaaatcacatgaacacacgtagaacattttaggctgctcatgtgactttggatttgtcctaagggcaatagtaagcctttgaactgctttagcatgataggattttaaaagatcactggctgctgtgtgaacaaaaataatgttgtaaagaaaaggatattagctgtatcagatcagctggagactactgaaataacccaagctggcttggactacataggagtagtgtaaactcattcattcatgcaagaaatacttactgagtgcctactcagtaccagacccttttctaggacatggagttatagcagtgaacaatatagaaaaaaatccccgaattcatggagactccagtgagcagagacaaaaaaatagcaactaaataagttaaaaggaattgagtaccctataaaagtttatcagggaaatgttataaggaatgactttcggagtaatgggtagtgatcttaaatgtatggtcaatgaaaatcagaagttgtagagaagtggataaattcacagtacgttttaaagtagacctaataagacttaatgaatttgatgtggcaagtgagaaaaatacatcaaggatgatgacttttataatttgacttgagtatctgggaacaaacaagtacagtgccataataagggcagaaaattttccattcactcagcaacttatgaactcatttgcttagtctttattgcctcttgcattatgtagttttcactttgctggagtacttgtatagaagatcaccagtgaagaagccagagatggtttatttggtcatcccaataatacatcttattgttaattaactctcaagggttttttttcacaattttagaaaaggtttaagcaaatgaattatttaacatgaattggctatgtgaccctactataaggtgtttaaaacaccaacagcttaaacttcttagatcaaaggacatcctccaggccaaaatgtttccactggaacggtttctttgcttcctgattaaaagcttccctaatatatttccacgtgttattacatattttcgtattcactttgatggaaagcaagaatagcagccaaatacatatttcatgcattcttttgattaaaaatgataaagg

SEQ ID NO: 6386 - protein, 42 aa, Homo sapiens
MNGNKSWDWKGASQPQGNHKVLYKERYSSVKEAWMKKQRQSQ

SEQ ID NO: 6387 - DNA, 566 bp, Homo sapiens
agaggttgcagtaagtctggatgccacatcaaactgtttgtggtacttctaaacttcgtggaagagccctgtttcataaatctgagacagccttggtctgagggagcaaagacagagaattcacgtgctgcccaggcatagccacatagcaggtggacatccctggacacttttctggtttaatgaagccagctgtcatgttgatgagactcatgtgtcaaggaactgaagatggtccatagccaacagccagccaggaactgattggctagtagtccttgaggaactgaatctcaccaacaaccatatagtgaacttgcaaatggtgcttcctcagttgaaactaaagatgagactgaagtcctagttaacactttgtttgccaccttgtaagattgtgaaacagaggcctgagctaagccatgcccagattcttgatccacagaaactgtgagataataaatgtgcattgatttaagcctcagattttgtggtaatgctttacaaagcaataagtaactaatgcagtattcaacaaattttttgaaaaaaaaaagatgcttgaa

SEQ ID NO: 6388 - protein, 47 aa, Homo sapiens
DSLGLREQRQRIHVLPRHSHIAGGHPWTLFWFNEASCHVDETHVSRN

SEQ ID NO: 6389 - DNA, 6012 bp, Homo sapiens
actaacaggagcagcctccgccgagcatggagagctgccgccgcggccggccggcgacgctggcgacgctttcgcccctgaggtagtttggcgaccgcgaagaaggaaaaagggcgggcgggcggctgtcctctcaccgtcctcaccccgcgaggcccggcccgctcctccgtcgtggatttcgcggcgatccccccggcagctctttgcaaagctgcttgaaacttctcccaaactcggcatggatacgactgcggcggcggcgctgcctgcttttgtggcgctcttgctcctctctccttggcctctcctgggatcggcccaaggccagttctccgcaggtggctgtacttttgatgatggtccaggggcctgtgattaccaccaggatctgtatgatgactttgaatgggtgcatgttagtgctcaagagcctcattatctaccacccgagatgccccaaggttcctatatgatagtggactcttcagatcacgaccctggagaaaaagccagacttcagctgcctacaatgaaggagaacgacactcactgcattgatttcagttacctattatatagccagaaaggactgaatcctggcactttgaacatattagttagggtgaataaaggacctcttgccaatccaatttggaatgtgactggattcacgggtagagattggcttcgggctgagctagcagtgagcaccttttggcccaatgaatatcaggtaatatttgaagctgaagtctcaggagggagaagtggttatattgccattgatgacatccaagtactgagttatccttgtgataaatctcctcatttcctccgtctaggggatgtagaggtgaatgcagggcaaaacgctacatttcagtgcattgccacagggagagatgctgtgcataacaagttatggctccagagacgaaatggagaagatataccagtagcccagactaagaacatcaatcatagaaggtttgccgcttccttcagattgcaagaagtgacaaaaactgaccaggatttgtatcgctgtgtaactcagtcagaacgaggttccggtgtgtccaattttgctcaacttattgtgagagaaccgccaagacccattgctcctcctcagcttcttggtgttgggcctacatatttgctgatccaactaaatgccaactcgatcattggcgatggtcctatcatcctgaaagaagtagagtaccgaatgacatcaggatcctggacagaaacccatgcagtcaatgctccaacttacaaattatggcatttagatccagataccgaatatgagatccgagttctacttacaagacctggtgaaggtggaacggggctcccaggacctccactaatcaccagaacaaaatgtgcagaacctatgagaaccccaaagacattaaagattgctgaaatacaggcaagacggattgctgtggactgggaatccttgggttacaacattacgcgttgccacacttttaatgtcactatctgctaccattacttccgtggtcacaacgagagcaaggcagactgtttggacatggaccccaaagcccctcagcatgttgtgaaccatctgccaccttatacaaatgtcagcctcaagatgatcctaaccaatccagagggaaggaaggagagtgaagagacaattattcaaactgatgaagatgtgcctggtcccgtaccagtaaaatctcttcaaggaacatcctttgaaaataagatcttcttgaactggaaagaacctttggatccaaatggaatcatcactcaatatgagatcagctatagcagtataagatcatttgatcctgcagttccagtggctggacctccccagactgtatcaaatttatggaacagtacacaccatgtctttatgcatctccaccctggaaccacgtaccagtttttcataagagccagcacggtcaaaggctttggtccagccacagccatcaatgtcaccaccaatatctcagctccaactttacctgactatgaaggagttgatgcctctctcaatgaaactgccaccacaataactgtattgttgagaccagcacaagccaaaggtgctcctatcagtgcttatcagattgttgtggaagaactgcacccacaccgaaccaagagagaagccggagccatggaatgctaccaggttcctgtcacataccaaaatgccatgagtgggggtgcaccgtattactttgctgcagaactccccccgggaaacctacctgagcctgccccgttcactgtgggtgacaatcggacctaccaaggcttttggaaccctcctttggctccgcgcaaaggatacaacatctatttccaggcgatgagcagtgtggagaaggaaactaaaacccagtgcgtacgcattgctacaaaagcagcagcaacagaagaaccagaagtgatcccagatcccgccaagcagacagacagagtggtgaaaatagcaggaattagtgctggaattttggtgttcatcctccttctcctagttgtcatattaattgtaaaaaagagcaaacttgctaaaaaacgcaaagatgccatggggaatacccggcaggagatgactcacatggtgaatgcaatggatcgaagttatgctgatcagagcactctgcatgcagaagatcctctttccatcaccttcatggaccaacataactttagtccaagatatgagaaccacagtgctacagcagagtccagtcgccttctagacgtacctcgctacctctgtgaggggacggaatccccttaccagacaggacagctgcatccagccatcagggtagctgatttactgcagcacattaatctcatgaagacatcagacagctatgggttcaaagaggaatatgagagcttttttgaaggacagtcagcatcttgggatgtagctaaaaaagatcaaaatagagcaaaaaaccgatatggaaacattatagcatatgatcactccagagtgattttgcaacccgtagaggatgatccttcctcagattatattaatgccaactatattgatggctaccagagaccaagtcattacattgcaacccaaggtcccgttcatgaaacagtgtatgatttctggaggatgatttggcaagaacaatctgcttgcattgtgatggttacaaatttagttgaggttggccgggttaaatgctataaatattggcctgatgatactgaagtttatggtgacttcaaagtaacgtgtgtagaaatggaaccacttgctgaatatgtagttaggacattcaccctggaaaggagggggtacaatgaaatccgtgaagttaaacagttccatttcacgggctggcctgaccatggagtgccctaccatgctacagggctgctttcctttatccggcgagtcaagttatcaaaccctcccagtgctggccccatcgttgtacattgcagtgctggtgctggacgaactggctgctacattgtgattgacatcatgctagacatggctgaaagagagggtgttgttgatatttacaattgtgtcaaagccttaagatctcggcgtattaatatggtccagacagaggaacagtacatttttattcatgatgccattttagaagcctgcttatgtggagaaactgccatacctgtctgtgaatttaaagctgcatattttgatatgattagaatagactcccagactaactcttcacatctcaaggatgaatttcagactctgaattcagtcacccctcgactacaagctgaagactgcagtatagcgtgcctgccaaggaaccatgacaagaaccgtttcatggacatgctgccacctgacagatgtctgccttttttaattacaattgatggggagagcagtaactacatcaatgctgctcttatggacagctacaggcaaccagctgctttcatcgtcacacaataccctctgccaaacactgtaaaagacttctggagattagtgtatgattatggctgtacctccattgtgatgttaaacgaagtcgacttgtcccagggctgccctcagtactggccagaggaagggatgctacgatatggccccatccaagtggaatgtatgtcttgttcaatggactgtgatgtgatcaaccggatttttaggatatgcaatctaacaagaccacaggaaggttatctgatggtgcaacagtttcagtacctaggatgggcttctcatcgagaagtgcctggatccaaaaggtcattcttgaaactgatacttcaggtggaaaagtggcaggaggaatgcgaggaaggggaaggccggacgattatccactgcctaaatggtggcgggcgaagtggcatgttctgtgctataggcatcgttgttgaaatggtgaaacggcaaaatgttgtcgatgttttccatgcagtaaagacactgaggaacagcaagccaaacatggtggaagccccggagcaataccgtttctgctatgatgtagctttggagtacctggaatcatcttagttgggtgagactctttaaagtgcatccatgaagaaacctgtccatctattgagccagcagctgttgtacctgttacacttgtgcagaaagattttaatgtggggggtgggagacttttacatttgagaggtaaaagtattttttttatgaagttgtgtatcttaataaaaaggactgaattagtttttattactatattaaagcatcaacatttcatgccacataaattatatttaataagaaccagattgaaatgagaacgtattggtgtttgtacagtgaacatgccaccttttttctcatggtttcagtagagcagctaccacatgttgcatgagttcatactttctacgtggcatttttctccctttctaaaatgaaagctgatgaatcttaaaaggaagaagaaaagaaaagctgtgcaaattcatagtaaagttcgttttttatatgtttccagtgtagcagatctctatataaatatataaatatatataactggcttattttcttttaatgtgcaatgatggctggatcatttaaagttctttttagaaaataacataagccaaagactcaagtgtaaatatgtctatatggagaaagcacattatatttattggttacttacattccttttttgatggctaaaatactaccaccacacaatcatcttttttttcctgaagaaagctttttctttagctaaaatcaattgtaaacgatttttgtagattattttttgtatgttttagtgtaagtagaagataaactttttattcataaaccaggaagcaatgttctttatagtgattctcttgtgtacatgcttgtgaattaaatttgtgtaaaatcccttggcaattgggtcttttaatataggaccaaattaaaacattttgctgaatatgtatagtttttcacaatttcattaggtaaataatggtttggtgatcatacatgagaaatgtacacattaaaaggccttgctgacaacttgcacaatgttgaacatagcctttaagcatcatttaaattttaaaggaatggagtttttcagcctgtggcccagcactggtcaagaaaacaagatggcaacatatatgctttcagggtcaaatttgagcaaactgtaaactgtcagggtgataaaatgtttctcttgatgtttacatgcacaagctttgcgttctgactataaaaagtgtgaacaaatcaatgccagattcctgttttgcgcattgtcatgggattcttaagtgaacctttctaaatgtggtcttgttcacatgctccacgtagctgtaacttcacatcatcagcttgcagtttgtaattgactaaagcattccagtgtcctctttctagattgccagctcatgacatggtgcttataaagatttaattaaagtaagaatgaaataaagtttttataattataacagtta

SEQ ID NO: 6390 - protein, 1440 aa, Homo sapiens; identical to SEQ ID NO: 803

SEQ ID NO: 6391 - DNA, 4760 bp, Homo sapiens
actaacaggagcagcctccgccgagcatggagagctgccgccgcggccggccggcgacgctggcgacgctttcgcccctgaggtagtttggcgaccgcgaagaaggaaaaagggcgggcgggcggctgtcctctcaccgtcctcaccccgcgaggcccggcccgctcctccgtcgtggatttcgcggcgatccccccggcagctctttgcaaagctgcttgaaacttctcccaaactcggcatggatacgactgcggcggcggcgctgcctgcttttgtggcgctcttgctcctctctccttggcctctcctgggatcggcccaaggccagttctccgcaggtggctgtacttttgatgatggtccaggggcctgtgattaccaccaggatctgtatgatgactttgaatgggtgcatgttagtgctcaagagcctcattatctaccacccgagatgccccaaggttcctatatgatagtggactcttcagatcacgaccctggagaaaaagccagacttcagctgcctacaatgaaggagaacgacactcactgcattgatttcagttacctattatatagccagaaaggactgaatcctggcactttgaacatattagttagggtgaataaaggacctcttgccaatccaatttggaatgtgactggattcacgggtagagattggcttcgggctgagctagcagtgagcaccttttggcccaatgaatatcaggtaatatttgaagctgaagtctcaggagggagaagtggttatattgccattgatgacatccaagtactgagttatccttgtgataaatctcctcatttcctccgtctaggggatgtagaggtgaatgcagggcaaaacgctacatttcagtgcattgccacagggagagatgctgtgcataacaagttatggctccagagacgaaatggagaagatataccagtagcccagactaagaacatcaatcatagaaggtttgccgcttccttcagattgcaagaagtgacaaaaactgaccaggatttgtatcgctgtgtaactcagtcagaacgaggttccggtgtgtccaattttgctcaacttattgtgagagaaccgccaagacccattgctcctcctcagcttcttggtgttgggcctacatatttgctgatccaactaaatgccaactcgatcattggcgatggtcctatcatcctgaaagaagtagagtaccgaatgacatcaggatcctggacagaaacccatgcagtcaatgctccaacttacaaattatggcatttagatccagataccgaatatgagatccgagttctacttacaagacctggtgaaggtggaacggggctcccaggacctccactaatcaccagaacaaaatgtgcagaacctatgagaaccccaaagacattaaagattgctgaaatacaggcaagacggattgctgtggactgggaatccttgggttacaacattacgcgttgccacacttttaatgtcactatctgctaccattacttccgtggtcacaacgagagcaaggcagactgtttggacatggaccccaaagcccctcagcatgttgtgaaccatctgccaccttatacaaatgtcagcctcaagatgatcctaaccaatccagagggaaggaaggagagtgaagagacaattattcaaactgatgaagatgtgcctggtcccgtaccagtaaaatctcttcaaggaacatcctttgaaaataagatcttcttgaactggaaagaacctttggatccaaatggaatcatcactcaatatgagatcagctatagcagtataagatcatttgatcctgcagttccagtggctggacctccccagactgtatcaaatttatggaacagtacacaccatgtctttatgcatctccaccctggaaccacgtaccagtttttcataagagccagcacggtcaaaggctttggtccagccacagccatcaatgtcaccaccaatatctcagctccaactttacctgactatgaaggagttgatgcctctctcaatgaaactgccaccacaataactgtattgttgagaccagcacaagccaaaggtgctcctatcagtgcttatcagattgttgtggaagaactgcacccacaccgaaccaagagagaagccggagccatggaatgctaccaggttcctgtcacataccaaaatgccatgagtgggggtgcaccgtattactttgctgcagaactccccccgggaaacctacctgagcctgccccgttcactgtgggtgacaatcggacctaccaaggcttttggaaccctcctttggctccgcgcaaaggatacaacatctatttccaggcgatgagcagtgtggagaaggaaactaaaacccagtgcgtacgcattgctacaaaagcagcagcaacagaagaaccagaagtgatcccagatcccgccaagcagacagacagagtggtgaaaatagcaggaattagtgctggaattttggtgttcatcctccttctcctagttgtcatattaattgtaaaaaagagcaaacttgctaaaaaacgcaaagatgccatggggaatacccggcaggagatgactcacatggtgaatgcaatggatcgaagttatgctgatcagagcactctgcatgcagaagatcctctttccatcaccttcatggaccaacataactttagtccaagatatgagaaccacagtgctacagcagagtccagtcgccttctagacgtacctcgctacctctgtgaggggacggaatccccttaccagacaggacagctgcatccagccatcagggtagctgatttactgcagcacattaatctcatgaagacatcagacagctatgggttcaaagaggaatatgagagcttttttgaaggacagtcagcatcttgggatgtagctaaaaaagatcaaaatagagcaaaaaaccgatatggaaacattatagcatatgatcactccagagtgattttgcaacccgtagaggatgatccttcctcagattatattaatgccaactatattgatggctaccagagaccaagtcattacattgcaacccaaggtcccgttcatgaaacagtgtatgatttctggaggatgatttggcaagaacaatctgcttgcattgtgatggttacaaatttagttgaggttggccgggttaaatgctataaatattggcctgatgatactgaagtttatggtgacttcaaagtaacgtgtgtagaaatggaaccacttgctgaatatgtagttaggacattcaccctggaaaggagggggtacaatgaaatccgtgaagttaaacagttccatttcacgggctggcctgaccatggagtgccctaccatgctacagggctgctttcctttatccggcgagtcaagttatcaaaccctcccagtgctggccccatcgttgtacattgcagtgctggtgctggacgaactggctgctacattgtgattgacatcatgctagacatggctgaaagagagggtgttgttgatatttacaattgtgtcaaagccttaagatctcggcgtattaatatggtccagacagaggaacagtacatttttattcatgatgccattttagaagcctgcttatgtggagaaactgccatacctgtctgtgaatttaaagctgcatattttgatatgattagaatagactcccagactaactcttcacatctcaaggatgaatttcagactctgaattcagtcacccctcgactacaagctgaagactgcagtatagcgtgcctgccaaggaaccatgacaagaaccgtttcatggacatgctgccacctgacagatgtctgccttttttaattacaattgatggggagagcagtaactacatcaatgctgctcttatggacagctacaggcaaccagctgctttcatcgtcacacaataccctctgccaaacactgtaaaagacttctggagattagtgtatgattatggctgtacctccattgtgatgttaaacgaagtcgacttgtcccagggctgccctcagtactggccagaggaagggatgctacgatatggccccatccaagtggaatgtatgtcttgttcaatggactgtgatgtgatcaaccggatttttaggatatgcaatctaacaagaccacaggaaggttatctgatggtgcaacagtttcagtacctaggatgggcttctcatcgagaagtgcctggatccaaaaggtcattcttgaaactgatacttcaggtggaaaagtggcaggaggaatgcgaggaaggggaaggccggacgattatccactgcctaaatggtggcgggcgaagtggcatgttctgtgctataggcatcgttgttgaaatggtgaaacggcaaaatgttgtcgatgttttccatgcagtaaagacactgaggaacagcaagccaaacatggtggaagccccggagcaataccgtttctgctatgatgtagctttggagtacctggaatcatcttagttgggtgagactctttaaagtgcatccatgaagaaacctgtccatctattgagccagcagctgttgtacctgttacacttgtgcagaaagattttaatgtggggggtgggagacttttacatttgagaggtaaaagtattttttttatgaagttgtgtatcttaataaaaaggactgaattagtttttattactat

SEQ ID NO: 6392 - protein, 1440 aa, Homo sapiens; identical to SEQ ID NO: 803

SEQ ID NO: 6393 - DNA, 1813 bp, Homo sapiens
tacaggcataagccactgtgcccagctgtatcttcttttaccgatgaggacactgacagagacagggtctcactctgtcacccaggagtacagtggcacgatcatagctcaacgtaaactggaacttctgggcttaagcgatgctctcgcttcagcctcccaagtacctgggaccacagcagggaaaaagcaaatcctggaggaagctcaccttctccacactgctcatcgcctggaaatagatgttgtatcctttgcgcggagccaaaggagggttccaaaagccttgtccttcaatccacatttcaattaacttccttgttctcccaatacctcatattgagtgatgattccatttggatccaaaggttctttccagttcaagaagatcttattttcaaaggatgttccttgaagagattttactgtgaacttcacacatgacattatccagaaatgtagtttcaaagtatatagcaattttgtgaggattgaaataaattaaaaatcactggatcaagggaaatacattgcattgtggctaggagcatcaagaaattctgaatgatatctcacgagagcaggatttatttcaatctacaaggagactatgaatgatactatgacctctgagacaggcaacataatttgatacattgaggaaagaaacccacaataaacagaaaatatgccagcactaaactttagaagatatgttcaagccattgtcagccgaagactatgagagaagttaactgaatgcatccgctctctccctgctccacagtaccagcaaggctgtgcagctgatccagacagagggccagtgagagcccctctgcacatctgtgtctattgctaaggctgccatgggcattggtttgtcttgcaagagtacctgttgtttccattatatgcaaatgacatacacttatgattatattgaaggaaaagatatttcttcatccttacgtatctctcatagaaggtggctaatgggggaaaaagggagcaaaatatccaattaatgaataaatgttgatttgatggcattgtaattataataactgcctatgtttacctaacacaatttagcctacaaataccataaaatggcatagatttattttatcgaacatcgttcaataatagggatggtttaaaatatttgtataattctacattgaaaaaggagtagaattgggaagtaccttccctagaagttttgtatttctatgctcttacagtttttctgttttgacaatagaattcactacaagtacctatagattgcatttgtaagacaaaagtttgtggcaaagttgtggacaagagagtgtcatactacttgtcgtgtacttggatgatcatagatgagagaaggaactatacttagatgaactaaaagacacacacaaacaggtgaggtgaggtgtgagcacaaacaaagtagattcaataactttctacatttgaaggaagatcatgtgtacaattatagacagaaaatgtctctctgtacctatgatttgtgtaaatactatatgaagttactaaaaccattatcatggcagtctactgattgcagggaatgtcacttcacatttccacatcaacaacttttaatggaaacagaatgctgacttttgttcccttgcctgagacttatatgacagctatttcagctactttttttgaaagtcctttataatataactctcaaaatggaaaagagagtggaaataaaatatgggtggggcaagattatattagataagcattatagcctttaaaatgtaataaatgtactttc

SEQ ID NO: 6394 - protein, 89 aa, Homo sapiens
MRTLTETGSHSVTQEYSGTIIAQRKLELLGLSDALASASQVPGTTAGKKQILEEAHLLHTAHRLEIDVVSFARSQRRVPKALSFNPHFN

SEQ ID NO: 6395 - DNA, 605 bp, Homo sapiens
aggactatacaagcctggcagtcatggaagttcaaggattgctttttatcgatatctagaaataatttacttctctttctgtgcaagaacaatatgctctcctgtttgcagagctgccccttcagtgtgtttctagagacgaaatggagaagatataccagtagcccagactaagaacatcaatcatagaaggtttgccgcttccttcagattgcaagaagtgacaaaaactgaccaggatttgtatcgctgtgtaactcagtcagaacgaggttccggtgtgtccaattttgctcaacttattgtgagagaaccgccaagacccattgctcctcctcagcttcttggtgttgggcctacatatttgctgatccaactaaatgccaactcgatcattggcgatggtcctatcatcctgaaagaagtagagtaccgaatgacatcaggatcctggacagaaacccatgcagtcaatgctccaacttacaaattatggcatttagatccagataccgaatatgagatccgagttctacttacaagacctggtgaaggtggaacggggctcccaggacctccactaatcaccagaacaaaatgtgcag

SEQ ID NO: 6396 - protein, 55 aa, Homo sapiens
MTSGSWTETHAVNAPTYKLWHLDPDTEYEIRVLLTRPGEGGTGLPGPPLITRTKC

SEQ ID NO: 6397 - DNA, 1535 bp, Homo sapiens
gctctgatcctaataatccttttgatactctgttctaatttactaagaagagtcaccaattttgtttctgtggtttggtatgaaataaggtggcagaaacagcactctccaaatatccatgcactcctgacatttttcagcagcccacattactaattctggctgagggattgggagcagaagagacacgtgtcatctctgagttgaggctgttaagagctggtgcaactttccattcttctcttcccctctagcagtgacctgagaagctacgtattgacacggcgctaccacgggtggaggagcctgcattgctgaatcacaggatgaaggcgaatccctgccagcctccatccatctctggggtgcttagcagaatcctcagctcacaagatgaataaatgcagactaaatgatgcacaaataatcttcacacacaaccatcaacacatggaaagactgcaggacggccagatcccaagctaacaaacaggggaagatgatgtttcaaatgatcatctgaatgctgggtttccaccttccaccaggaagtcatatgaaaaagaaaaaaaatggcattatgatacaaacagaaaatgtaacagtggagtgcagaaaatacaaaaaaaaggaaaaaataaatagaaaatcttcaaagaggcaatctgtttaaatcttcaagaactggaaacagtaaaagtgaacaggtttttattgagcatgtcaataaaatgtttgcataagactttacaagtgctttatttcatgaggtttttattattgatcaaagcaacgaaaatgaacgggaaattcattctcatcaaatctacaacttgggaggaggtccgatgaaatccctggaagctcacattttttataaatgaagagttaattaccggtgggaacaatgagaacctctgtggttcttcctgatgcttggatcctcccagacctctgtttccagtctccttctccacaacctggcctatgcgatgcaagtggtctaactgatctccgcctagggaaggatccttcggcaacttgccgacaagagaagcagcgatgcccgaggcaggtccaaaggagcactgactgcgtgggattgattacactggaggaacaaaaggtcctgtggctacacaagtttgaaaagcagaaggtacaatcattgtatttctggcagacttttcaaagactttaatatatgaatccctcatatgaatctcctggaggattatataataggcagatctcccagccattttcactgaacagttcttagaattggtatccttgaaaaatttcacctaaccactcaatatggtagccactagtcctgggtggctattgagcacctgaaatttgcctagtctgaattaagacacattctaagaataaagcacactgtatttcaaaggcagtacaaaaataaaaaagaatgtaagctgtctcaataataatttttgtattgaatacgtgttgaaatgatgttatttttgatatattgagtgaaataaattgtattgctaaaatga

SEQ ID NO: 6398 - protein, 49 aa, Homo sapiens
MLGFHLPPGSHMKKKKNGIMIQTENVTVECRKYKKKEKINRKSSKRQSV

SEQ ID NO: 6399 - DNA, 1577 bp, Homo sapiens
actggtgtgagtctttccacctttctaaggttcactccctcattagcatctcatcctaaggacaccttctacctccttgtcctctaagcaatgcttttcaaaccctacagaccagtgcctgcatcagaataatgaggaagggcttttggaatactatgcagccatgtccctctgcagggacatggatgaagctggaaaccgtcattctcagcaaactaacataagaacagaaaaccaaacaccacatgtcctcactcataagtgggagttgaacaatgagaatacatggacacgggcagtgacctgagaagctacgtattgacacggcgctaccacgggtggaggagcctgcattgctgaatcacaggatgaaggcgaatccctgccagcctccatccatctctggggtgcttagcagaatcctcagctcacaagatgaataaatgcagactaaatgatgcacaaataatcttcacacacaaccatcaacacatggaaagactgcaggacggccagatcccaagctaacaaacaggggaagatgatgtttcaaatgatcatctgaatgctgggtttccaccttccaccaggaagtcatatgaaaaagaaaaaaaatggcattatgatacaaacagaaaatgtaacagtggagtgcagaaaatacaaaaaaaaggaaaaaataaatagaaaatcttcaaagaggcaatctgtttaaatcttcaagaactggaaacagtaaaagtgaacaggtttttattgagcatgtcaataaaatgtttgcataagactttacaagtgctttatttcatgaggtttttattattgatcaaagcaacgaaaatgaacgggaaattcattctcatcaaatctacaacttgggaggaggtccgatgaaatccctggaagctcacattttttataaatgaagagttaattaccggtgggaacaatgagaacctctgtggttcttcctgatgcttggatcctcccagacctctgtttccagtctccttctccacaacctggcctatgcgatgcaagtggtctaactgatctccgcctagggaaggatccttcggcaacttgccgacaagagaagcagcgatgcccgaggcaggtccaaaggagcactgactgcgtgggattgattacactggaggaacaaaaggtcctgtggctacacaagtttgaaaagcagaaggtacaatcattgtatttctggcagacttttcaaagactttaatatatgaatccctcatatgaatctcctggaggattatataataggcagatctcccagccattttcactgaacagttcttagaattggtatccttgaaaaatttcacctaaccactcaatatggtagccactagtcctgggtggctattgagcacctgaaatttgcctagtctgaattaagacacattctaagaataaagcacactgtatttcaaaggcagtacaaaaataaaaaagaatgtaagctgtctcaataataatttttgtattgaatacgtgttgaaatgatgttatttttgatatattgagtgaaataaattgtattgctaaaatga

SEQ ID NO: 6400 - protein, 49 aa, Homo sapiens; identical to SEQ ID NO: 6398

SEQ ID NO: 6401 - DNA, 1992 bp, Homo sapiens
gctgaagaaaaagtgtgtaaaagagaagagaggtccaaactgaaatctgaggagcctcaacattcagaactcaactgggcgctgtggctcaagcctgtaatcccagcactttgggaggacgaggcaggcagaacacctgaggtgagaagtttgagaccagcctggccaacatggccaaaccttgtctctactgaaaatataaaaattagccaggcatggtggcgagcgcctgtaatcccacctactctggaggctgaggcagaagaatctcttgaacctggaaggcggaggttgcagtgagccgagatcacaccactgccctccagcctgggcgacagaacaagactccgtgtcagaaaaaaaaaaagaaaagaaaagaaaaagaaaaagaaaagaactcggtggagcacaagtagctgagtaatgccccagaagccggcatcattgttggacagctcagatgttcaggatgtttcattttgagcctacctcattggaatttcaaaatattggcctctttggagcaatacagagcaagtctgttccttcaagtagatgaaaagctccctgcatgtcttccattggacttctcccctttagcttaaaaatatccacagtcctgaaacatggctcagaagcagatattacccaaaccctactcttaaagctcggccagccagccacatgcaggaccctgaagcaaataagaggcagtgacctgagaagctacgtattgacacggcgctaccacgggtggaggagcctgcattgctgaatcacaggatgaaggcgaatccctgccagcctccatccatctctggggtgcttagcagaatcctcagctcacaagatgaataaatgcagactaaatgatgcacaaataatcttcacacacaaccatcaacacatggaaagactgcaggacggccagatcccaagctaacaaacaggggaagatgatgtttcaaatgatcatctgaatgctgggtttccaccttccaccaggaagtcatatgaaaaagaaaaaaaatggcattatgatacaaacagaaaatgtaacagtggagtgcagaaaatacaaaaaaaaggaaaaaataaatagaaaatcttcaaagaggcaatctgtttaaatcttcaagaactggaaacagtaaaagtgaacaggtttttattgagcatgtcaataaaatgtttgcataagactttacaagtgctttatttcatgaggtttttattattgatcaaagcaacgaaaatgaacgggaaattcattctcatcaaatctacaacttgggaggaggtccgatgaaatccctggaagctcacattttttataaatgaagagttaattaccggtgggaacaatgagaacctctgtggttcttcctgatgcttggatcctcccagacctctgtttccagtctccttctccacaacctggcctatgcgatgcaagtggtctaactgatctccgcctagggaaggatccttcggcaacttgccgacaagagaagcagcgatgcccgaggcaggtccaaaggagcactgactgcgtgggattgattacactggaggaacaaaaggtcctgtggctacacaagtttgaaaagcagaaggtacaatcattgtatttctggcagacttttcaaagactttaatatatgaatccctcatatgaatctcctggaggattatataataggcagatctcccagccattttcactgaacagttcttagaattggtatccttgaaaaatttcacctaaccactcaatatggtagccactagtcctgggtggctattgagcacctgaaatttgcctagtctgaattaagacacattctaagaataaagcacactgtatttcaaaggcagtacaaaaataaaaaagaatgtaagctgtctcaataataatttttgtattgaatacgtgttgaaatgatgttatttttgatatattgagtgaaataaattgtattgctaaaatga

SEQ ID NO: 6402 - protein, 67 aa, Homo sapiens
MSSIGLLPFSLKISTVLKHGSEADITQTLLLKLGQPATCRTLKQIRGSDLRSYVLTRRYHGWRSLHC

SEQ ID NO: 6403 - DNA, 1358 bp, Homo sapiens
cactgtgaagaatctgatagtcgaactgaatgaagccaagtccagtctttacggaaaaatttacacaacacttccagcagtgacctgagaagctacgtattgacacggcgctaccacgggtggaggagcctgcattgctgaatcacaggatgaaggcgaatccctgccagcctccatccatctctggggtgcttagcagaatcctcagctcacaagatgaataaatgcagactaaatgatgcacaaataatcttcacacacaaccatcaacacatggaaagactgcaggacggccagatcccaagctaacaaacaggggaagatgatgtttcaaatgatcatctgaatgctgggtttccaccttccaccaggaagtcatatgaaaaagaaaaaaaatggcattatgatacaaacagaaaatgtaacagtggagtgcagaaaatacaaaaaaaaggaaaaaataaatagaaaatcttcaaagaggcaatctgtttaaatcttcaagaactggaaacagtaaaagtgaacaggtttttattgagcatgtcaataaaatgtttgcataagactttacaagtgctttatttcatgaggtttttattattgatcaaagcaacgaaaatgaacgggaaattcattctcatcaaatctacaacttgggaggaggtccgatgaaatccctggaagctcacattttttataaatgaagagttaattaccggtgggaacaatgagaacctctgtggttcttcctgatgcttggatcctcccagacctctgtttccagtctccttctccacaacctggcctatgcgatgcaagtggtctaactgatctccgcctagggaaggatccttcggcaacttgccgacaagagaagcagcgatgcccgaggcaggtccaaaggagcactgactgcgtgggattgattacactggaggaacaaaaggtcctgtggctacacaagtttgaaaagcagaaggtacaatcattgtatttctggcagacttttcaaagactttaatatatgaatccctcatatgaatctcctggaggattatataataggcagatctcccagccattttcactgaacagttcttagaattggtatccttgaaaaatttcacctaaccactcaatatggtagccactagtcctgggtggctattgagcacctgaaatttgcctagtctgaattaagacacattctaagaataaagcacactgtatttcaaaggcagtacaaaaataaaaaagaatgtaagctgtctcaataataatttttgtattgaatacgtgttgaaatgatgttatttttgatatattgagtgaaataaattgtattgctaaaatga

SEQ ID NO: 6404 - protein, 49 aa, Homo sapiens; identical to SEQ ID NO: 6398

SEQ ID NO: 6405 - DNA, 1185 bp, Homo sapiens
gtaaaagagaagagaggtccaaactgaaatctgaggagcctcaacattcagaactcaactgggcgctgtggctcaagcctgtaatcccagcactttgggaggacgaggcaggcagaacacctgaggtgagaagtttgagaccagcctggccaacatggccaaaccttgtctctactgaaaatataaaaattagccaggcatggtggcgagcgcctgtaatcccacctactctggaggctgaggcagaagaatctcttgaacctggaaggcggaggttgcagtgagccgagatcacaccactgccctccagcctgggcgacagaacaagactccgtgtcagaaaaaaaaaaagaaaagaaaagaaaaagaaaaagaaaagaactcggtggagcacaagtagctgagtaatgccccagaagccggcatcattgttggacagctcagatgttcaggatgtttcattttgagcctacctcattggaatttcaaaatattggcctctttggagcaatacagagcaagtctgttccttcaagtagatgaaaagctccctgcatgtcttccattggacttctcccctttagcttaaaaatatccacagtcctgaaacatggctcagaagcagatattacccaaaccctactcttaaagctcggccagccagccacatgcaggaccctgaagcaaataagaggcagtgacctgagaagctacgtattgacacggcgctaccacgggtggaggagcctgcattgctgaatcacaggatgaaggcgaatccctgccagcctccatccatctctggggtgcttagcagaatcctcagctcacaagatgaataaatgcagactaaatgatgcacaaataatcttcacacacaaccatcaacacatggaaagactgcaggacggccagatcccaagctaacaaacaggggaagatgatgtttcaaatgatcatctgaatgctgggtttccaccttccaccaggaagtcatatgaaaaagaaaaaaaatggcattatgatacaaacagaaaatgtaacagtggagtgcagaaaatacaaaaaaaaggaaaaaataaatagaaaatcttcaaagaggcaatctgtttaaatcttcaagaactggaaacagtaaaagtgaacaggtttttattgagcatgtcaataaaatgtttgcataag

SEQ ID NO: 6406 - protein, 67 aa, Homo sapiens; identical to SEQ ID NO: 6402

SEQ ID NO: 6407 - DNA, 714 bp, Homo sapiens
agtgcgactggcccttacatgctggtatatgtcagactcttagcatcactctcatttcatactgctgttgatgatgtgaattttggaaatattctcccctattgggtctttctccatgacagatgatgtcctttggcttcggttttttgcctaagaactgtaagtggtgcttgctagccctactaagaatcctgccattgttgcaaatttcagaaaaaaggctggagtgcagtggtgcacacgcctcacactgtgacacagcgggagagcccagagcgacagctgttggaatgactgcactcttcctgctcaagtctgacctttccaagaaacatagcagcagcagagatgtcgctattgtgatcagaattactttggaagcataggtctcccctaaaccacctgctgctccaagagctgaggactgcatatccagatgatggcatgctgtcaggaaagcgtatgaagaccactacttctaccctgctagagtgcacacagccaccattccagagctgcccagaaccttaagcccacccacctctattaggacctttgtctagtccaaaactttctgaaatctcatccaggacctgccctgacatggatcttcattttcattccctattcacctgaattgttgccaggaccagaataagacttttagagtccctgagctcctccatacataaatacaaataccattttattttt

SEQ ID NO: 6408 - protein, 87 aa, Homo sapiens
MMSFGFGFLPKNCKWCLLALLRILPLLQISEKRLECSGAHASHCDTAGEPRATAVGMTALFLLKSDLSKKHSSSRDVAIVIRITLEA

SEQ ID NO: 6409 - DNA, 2123 bp, Homo sapiens
agtgcgactggcccttacatgctggtatatgtcagactcttagcatcactctcatttcatactgctgttgatgatgtgaattttggaaatattctcccctattgggtctttctccatgacagatgatgtcctttggcttcggttttttgcctaagaactgtaagtggtgcttgctagccctactaagaatcctgccattgttgcaaatttcagaaaaaaggctggagtgcagtggtgcacacgcctcacactgtgacacagcgggagagcccagagcgacagctgttggaatgactgcactcttcctgctcaagtctgacctttccaagcctttgtcctatgtctggagacttcttggaagctggagcacacaaatagctacagcaaacttgaggaatgggcatgaatagactggcttcggggaacctgccagcttggccgtgtggccaaggtaataggcaagccaaggcagagctagagctcagagctggaggggaaattaaagcagcaaatgtagaaacattaagcctgaagaggcgacgacgttgaattctaaaatgcaggccaaagctcagactgcaagctgtctggctgctccgggtgtgcccagaagtcaaagtccagcaggggcaaaggtggaggtgtggtcctgcacgtggggtgttggggggatgtggaagaggaggtgctttaagatccagagattccagctgccctggtgcacccttggaagaataaaaggctaggaactggacaagtcaggctcgagtccaagctgcctgaggaatcggggaaagaatggagctcagagtgggaggtcagggcagtatttaaaaatccaggatagcagcaaagctggcggtggcccctgactctggtaagggcagcctgcagcaccatgccaaggggggcctgactgatcatgccctgcatttgcaaacaaggattagtagggtatgagtaggattctgctggtgcctgggaaggcagtgccatctacaactttacaaagttttaacaaaggcctgaaggacacaaccttccccaaagtcctgacgtcgctgtttgctggcaacaaatagagtcaaaagaagagaggcacagaatgtgccaggggtgtgctgcgtacagccccgatgaccacaaggccttcttgggtcaagttctgccatctctggttaagatgggctcaccctctaggaccctgattgagtcctcggaccaccaagagtgccccaccaagagcctccctcttctggtgactcgtgcctgcttcccgtggagagctccagaagggaggaaactgtgaggaggtggagaacgtggcagggatcctaactttcttactgaaggaagttcttcacaagtacccatctgccttcagggaagaaaacataactcattttggtctttcaaattcagttctcaaaaccaaatcctgttgtcagcaatctgtgtcccaacgccttcttcagcaacagcattttccctgtggaattagtttccaatgttctttcttaaataaaccactgaagattaaaaggaatccagatacccaccacattttgtttccttaatgagtaattatcacatttctttggctacttaaatgcattctctgagtcaggtaaaggagatcgtaatagttaatcaacaagaagtaattcttgggtacttaacaatagtctaagcacttaatcatacttaaaattgactattaatgaaccttataaaccattttgcaattctgaaagtgaatttctctgcaggcttagagattactaagccatttagatcttaccaaacaaatattattcatgctttaattcctgggaaaagaaatttagaaaatgaggttaatgttcagttgtcctttcctgagtttaacaattatatattccatctgggatgctctgaactcaggttaaacattcttcaagttattcccacatttttcaagttattcccacgttagtgacctactttattagtattattactaaagaaaagggctgggtgcggtggcccacatctgtaatcccagcactttgggaggctgaagcaggaggatcacttgagcttgggagttcaagaccagcctgagagggagactccgtctctac

SEQ ID NO: 6410 - protein, 95 aa, Homo sapiens
MMSFGFGFLPKNCKWCLLALLRILPLLQISEKRLECSGAHASHCDTAGEPRATAVGMTALFLLKSDLSKPLSYVWRLLGSWSTQIATANLRNGHE

SEQ ID NO: 6411 - DNA, 571 bp, Homo sapiens
tagggtgcttagcagaatcctcagctcacaagatgaataaatgcagactaaatgatgcacaaataatcttcacacacaaccatcaacacatggaaagactgcaggacggccagatcccaagctaacaaacaggggaagatgatgtttcaaatgatcatctgaatgctgggtttccaccttccaccaggaagtcatatggtcaaattatcccggatcctgaaatatatcttttgatagaaatgactctggtactttccgcaacttactttctatggagcactttcctgaaacaagatttgtgtttaaatattcctccttctacaaagtattaaacagtagtaagttctgcaacgttgacaatggaaacctggcaatgtgcccttgtttgactattaaggaattgcttccaagtaccacagggccttgaagaccaaaataacacaattacctggaaggtgaacaatggcaacttatcaggtgtggtaaacacttttttcccaagaagatcctttattccttctgaatgcacatcaagaaggagtgaatacataaatcacatatttgttaataa

SEQ ID NO: 6412 - protein, 51 aa, Homo sapiens
MEHFPETRFVFKYSSFYKVLNSSKFCNVDNGNLAMCPCLTIKELLPSTTGP

SEQ ID NO: 6413 - DNA, 1447 bp, Homo sapiens
gagaagtaggcaaatgatgcggctgaacaatgcctccttgacttcaggatataaaaactactttcatgagcttcaagtcagggtaatggtgctcagaaaaagaagccaatcaggagatctgttttctgtgcccttttaacacttctaactcaggcacccaaaccagcctgtagcagaaagagcatcaaagccatcctctggactctacacaagcctttgtcctatgtctggagacttcttggaagctggagcacacaaatagctacagcaaacttgaggaatgggcatgaatagactggcttcggggaacctgccagcttggccgtgtggccaaggtaataggcaagccaaggcagagctagagctcagagctggaggggaaattaaagcagcaaatgtagaaacattaagcctgaagaggcgacgacgttgaattctaaaatgcaggccaaagctcagactgcaagctgtctggctgctccgggtgtgcccagaagtcaaagtccagcaggggcaaaggtggaggtgtggtcctgcacgtggggtgttggggggatgtggaagaggaggtgctttaagatccagagattccagctgccctggtgcacccttggaagaataaaaggctaggaactggacaagtcaggctcgagtccaagctgcctgaggaatcggggaaagaatggagctcagagtgggaggtcagggcagtatttaaaaatccaggatagcagcaaagctggcggtggcccctgactctggtaagggcagcctgcagcaccatgccaaggggggcctgactgatcatgccctgcatttgcaaacaaggattagtagggtatgagtaggattctgctggtgcctgggaaggcagtgccatctacaactttacaaagttttaacaaaggcctgaaggacacaaccttccccaaagtcctgacgtcgctgtttgctggcaacaaatagagtcaaaagaagagaggcacagaatgtgccaggggtgtgctgcgtacagccccgatgaccacaaggccttcttgggtcaagttctgccatctctggttaagatgggctcaccctctaggaccctgattgagtcctcggaccaccaagagtgccccaccaagagcctccctcttctggtgactcgtgcctgcttcccgtggagagctccagaagggaggaaactgtgaggaggtggagaacgtggcagggatcctaactttcttactgaaggaagttcttcacaagtacccatctgccttcagggaagaaaacataactcattttggtctttcaaattcagttctcaaaaccaaatcctgttgtcagcaatctgtgtcccaacgccttcttcagcaacagcattttccctgtggaattagtttccaatgttctttcttaaataaaccactgaagattaaaaggaatccagatacccaccaca

SEQ ID NO: 6414 - protein, 41 aa, Homo sapiens
MMRLNNASLTSGYKNYFHELQVRVMVLRKRSQSGDLFSVPF

SEQ ID NO: 6415 - DNA, 1535 bp, Homo sapiens
aatctatctggtcagatacttagtacctagatgtggagaccatatctcacagttctgtcaggcaggagcagtccaaacactttgattatcagctgtctcttgctcgggaaattactaggtaccaacactgttatatatgcagaggtgtctgaaaaatgaatgcagatcaatttccagttccacacagagcacatctgtaaaatatgacctttggataatggctggagtgtttacctgcagtattcgtttttgcatgtggctttccctagatatgtcaggatacagcaggaccaaaacctagcctttgtcctatgtctggagacttcttggaagctggagcacacaaatagctacagcaaacttgaggaatgggcatgaatagactggcttcggggaacctgccagcttggccgtgtggccaaggtaataggcaagccaaggcagagctagagctcagagctggaggggaaattaaagcagcaaatgtagaaacattaagcctgaagaggcgacgacgttgaattctaaaatgcaggccaaagctcagactgcaagctgtctggctgctccgggtgtgcccagaagtcaaagtccagcaggggcaaaggtggaggtgtggtcctgcacgtggggtgttggggggatgtggaagaggaggtgctttaagatccagagattccagctgccctggtgcacccttggaagaataaaaggctaggaactggacaagtcaggctcgagtccaagctgcctgaggaatcggggaaagaatggagctcagagtgggaggtcagggcagtatttaaaaatccaggatagcagcaaagctggcggtggcccctgactctggtaagggcagcctgcagcaccatgccaaggggggcctgactgatcatgccctgcatttgcaaacaaggattagtagggtatgagtaggattctgctggtgcctgggaaggcagtgccatctacaactttacaaagttttaacaaaggcctgaaggacacaaccttccccaaagtcctgacgtcgctgtttgctggcaacaaatagagtcaaaagaagagaggcacagaatgtgccaggggtgtgctgcgtacagccccgatgaccacaaggccttcttgggtcaagttctgccatctctggttaagatgggctcaccctctaggaccctgattgagtcctcggaccaccaagagtgccccaccaagagcctccctcttctggtgactcgtgcctgcttcccgtggagagctccagaagggaggaaactgtgaggaggtggagaacgtggcagggatcctaactttcttactgaaggaagttcttcacaagtacccatctgccttcagggaagaaaacataactcattttggtctttcaaattcagttctcaaaaccaaatcctgttgtcagcaatctgtgtcccaacgccttcttcagcaacagcattttccctgtggaattagtttccaatgttctttcttaaataaaccactgaagattaaaaggaatccagatacccaccaca

SEQ ID NO: 6416 - protein, 67 aa, Homo sapiens [sequence omitted]

SEQ ID NO: 6417 - DNA, 1999 bp, Homo sapiens
tatatatgagaaaaccatggctcactgagatttgatgacttatccagagccacttacctagtcactacagcaaagatattcaaataaaaatttgtctagcttaagagtactctcctgtgtaagtagggtaccatgttgaaggttgcagaggaagtatgtatttattttctgttttctactataataaattaccacaacgttaatgacttaaaaatacaaaattttaatattgagttctgggccctcacgtgccaaaaaccacctggtgtggcaactgcacgccactctgcatcctacagcgtggatcctctgcatgtgcttttgggagatgagctcactgaaatggccatgtccagtcaaggacactttgagggaaattttgagtctctggatcttgcagaatttgctcaaaatcagccatgggggaataagatgtttggacaggaatctggatctctggctaaaaagtatcccgtgacaacccagctgttaattggaagcttcactagatgatgcatggagttcatattccaaaaggttgaaaattggctgcaacagctgtgggggggtgaattttttctccttcagcttgcaagtcatactgagtacatcaaagatgactggcaacaactagaggaggacatgaagaaagcaaaagaacagctgaagatccataaaagcaatcagatacctactaaggtcaagagcaaagctgaggaggtggtgtcatttgtgaagaagaatgttctaatgactggggaaattttcagaggtcttctgcttggcatggcatcataaggaggatgacctcatttctattgttcttgttttttttccagccaccagcctctatactccatcatagggcatagagccctgcctcttcttttcccatgacttcctccctgctgtggcaaatccaaatggctttgggaagcatctgttggtataagttaatatggtcctaccttgagcttgatggtggcagaagagacaatagatattagttctccttccagtcactattaaagatatgctttactcagaaaaaaaaagacaaaaaagctctggatgccaaaagtttgaaatgagtgtcactgggctaaaattaagatattggcgtgccttttctacgttccttggattgtagaactctgcctacattccttggatcacagccttcttcctctattttcaagccagtagcattgggctgagtcttcctcacactgccatctcccttgttctctcttctgtttccctctgctactgttaataagcattgtatttacattgggcacacctgtataactcaggacattctccctaatttcagaccaggtgaatagaaacctttattttatctaccaccttaatttctctttgccgaatgtattcactggttccagagatttgagcatggacatctttgactggctattattttgagcagaaggtcaaagagaggacaggtattagtagtctgtggaaaaagcagtatctaggaaatatttggtagaggagtgagggagccttaagagattggtagattgagggaagaacttgataaaaagtaagaatcttaaagctatatgaggtgagggatagccaagaaaggtcttagcacagtgatactcaatgtggggttgggatgagggcactatatttccacaaggcagcatatgagtcttagagggtaggttagtggtctgaaattaaaacagtattttttatagtcctagaatttgtttttgtcatatttaatggcatttggatttaaaaaattgaaaaatgtataacactttatacttttcacagaaagagataggttttggaagagtagagaaatactaactgataagttgatcagggagataggatcagaaataaatacgaggctgaggcaggagaatcacttgaacccggaaggcagaggttgcagtgagccgagactgcaccattccactcagcctgggcaacaagagtgaaactctgtctc

SEQ ID NO: 6418 - protein, 126 aa, Homo sapiens [sequence omitted]

SEQ ID NO: 6419 - DNA, 1670 bp, Homo sapiens
atgttgcacagcacagcacaggctggggactgtgattcgaagaatgagtttggggacagggacaacgccttaaaatgggtcaacgcgcggacgcgagggggcactacccgggagcttaggaagggagagccaggaagacagcagcctctcctgccgcccaacgtgcccagctgcagcgaggaggggcggcgcgcaagccggctggacccgggcggtccccacgttgcgcccaccctccgggccaaaacgccgccgctcgggtcactgagtggccgcccacggaagaagtcagatcgccgggctctgggctgcgtacgggatccgaggaagggggattcaaacgcggatccggaaggaagggacactgaaccccgcagcgtccccagcgccgtggggcggcgggacgtgtccttgggctgccagcgggcgcggaagctggagtccggcagggtcgggaagaacggccgcgggtctgcgtggagaagtcgcctcgcggcgcggagcgcgccagcggcggcggcggctgccagagcgcgagatgcggcgcgcagccgccggaccgtcccggctgggaaaactcgcgggcggcactgcgcagcgctgacccggcgcaggtccgaggggtgtgccccggcccctcccgtctccgccccctcccgcgccagtcgcgcgcccctccccgcggcggcagcgtcggcggcgcatccaggggcggcgcggagccttgctcagcccagcagccagtgcctgcgagctccgctgctgcttggggaattcactttgctgcttgttcgcttctcccttcctcaggcttcttctgatggttttccgtctcctgcccgagcctttcctttaaaaggaaaactttactgcgatacccttttccccttggaggagaggattaaaagttccaagaactggtgccgcccgtgccatttgggcgctgggaaggtgctcggcggcggggttcccggtcccaccatgtgcaccaacatagtttacgagtggctcaaagcgctgcagcttccgcagtacgcggagtccttcgtggataacggctacgatgacctggaggtgtgcaagcagatcggggacccggacctggatgccatcggggtgctggcgcccgcgcaccgccgccgtatcctggaggccgtgcgccggctgcgggagcaggacgccaacgccgccggcctctacttcacgcttgagccgcagccggcgccccccgggccgcccgccgacgccgtccccaccggccgccggggggagccgtgcggcggcccggcccagggcacccgcggggactctcgcggccacacgaccgccccccgcagcagggagctggtgagctaccccaaactgaagctgaagatcatgatcagggataagctcgtccgtgacggcatccacctgagcaagcccccgtactcccgcaaggtattattatgccgctaccttcaagaagtaatttgcgtgctgtttattggagctgtgaatttaatcatctcaatcccacgctattacaggatgactataagaagatgtattgacatttctttggacacataattttgcctccattgtgtgttgttttgccagaatactgaaggcagtgtttgtatgatggcacatccaaataaaaagcaggtcctccttttgggacagtg

SEQ ID NO: 6420 - protein, 523 aa, Homo sapiens
MLHSTAQAGDCDSKNEFGDRDNALKWVNARTRGGTTRELRKGEPGRQQPLLPPNVPSCSEEGRRASRLDPGGPHVAPTLRAKTPPLGSLSGRPRKKSDRRALGCVRDPRKGDSNADPEGRDTEPRSVPSAVGRRDVSLGCQRARKLESGRVGKNGRGSAWRSRLAARSAPAAAAAARARDAARSRRTVPAGKTRGRHCAALTRRRSEGCAPAPPVSAPSRASRAPLPAAAASAAHPGAARSLAQPSSQCLRAPLLLGEFTLLLVRFSLPQASSDGFPSPARAFPLKGKLYCDTLFPLEERIKSSKNWCRPCHLGAGKVLGGGVPGPTMCTNIVYEWLKALQLPQYAESFVDNGYDDLEVCKQIGDPDLDAIGVLAPAHRRRILEAVRRLREQDANAAGLYFTLEPQPAPPGPPADAVPTGRRGEPCGGPAQGTRGDSRGHTTAPRSRELVSYPKLKLKIMIRDKLVRDGIHLSKPPYSRKVLLCRYLQEVICVLFIGAVNLIISIPRYYRMTIRRCIDISLDT

SEQ ID NO: 6421 - DNA, 2721 bp, Homo sapiens
agtgcctgcgagctccgctgctgcttggggaattcactttgctgcttgttcgcttctcccttcctcaggcttcttctgatggttttccgtctcctgcccgagcctttcctttaaaaggaaaactttactgcgatacccttttccccttggaggagaggattaaaagttccaagaactggtgccgcccgtgccatttgggcgctgggaaggtgctcggcggcggggttcccggtcccaccatgtgcaccaacatagtttacgagtggctcaaagcgctgcagcttccgcagtacgcggagtccttcgtggataacggctacgatgacctggaggtgtgcaagcagatcggggacccggacctggatgccatcggggtgctggcgcccgcgcaccgccgccgtatcctggaggccgtgcgccggctgcgggagcaggacgccaacgccgccggcctctacttcacgcttgagccgcagccggcgccccccgggccgcccgccgacgccgtccccaccggccgccggggggagccgtgcggcggcccggcccagggcacccgcggggactctcgcggccacacgaccgccccccgcagcagggagctggtgagctaccccaaactgaagctgaagatcatgatcagggataagctcgtccgtgacggcatccacctgagcaagcccccgtactcccgcaaggtcccaatggctggcatcctagagtacttaatgaattggccgaagtcatcacagagccgctagatatcatttttgagacctcgtggaggactgatgaggtgcctgaagactggaaaagggcatatttagaaccttctttcaaaaagggaaatggatgatgaccctggaaatactcatcagcttaactttttgcttggacaaattctggaataatcaacttagtaaactgggtaactggcttataacagctagaaataaggcagtgaactatcacgcataaagaagtattgagttcatttttttaagaagatatcatgatgagatacagtcttatgcatttcttggcattctcccttccattcttaatgaaaacagatgaggttggctaaggcatttgagtcataacttagtttaagtacaatataacaaaaaggtagatttctgacagtaagtagtaattatattatttccaaatttgcttttaacttgagaacagtagctttaatttttatattcaagcatacattctacttcatttcatataggaccatgtttttataagataagatacataattctatgtagaatagtttggtgaaggaattcttattttaaggtgcttttatatagttattttgtatattggtacaatgttaaaggtgatgaattaaggaacatcaccaagagaggacaatttcttctaacttctctttttaaatttaatctggctgaggtttagtattaggactaatacaagtgtcttgctctgacatgcatcaagcaagagctagctattttacttcatagctagtttcttgcactctgtggagactgccagggccgcagctcacagcctgttctgagctgcagtgctttatcccaccttgctctccaggcttctgacttcaggcctgtgggggccgggaggtgggcagcggcagtggcctgaggagccctgtagaactacggctgaaaaagaaagtagattgaggtggggggaggaaattaacaggaatctagagtttttctaattcttatcgtcttatcgttcttgtgtttggatgctggtagtttttttttttttagacagagtctcgctctgtcacccaggctggagtgtagtggcacaatcttggctcacagtgactttcgcctcccaggttcaaggaattctcctgcctcggcctcttggtagctgggattacaggcacgcatcaccacacccagctaatttttttgtatttttagtagagatggggttttaccatgttggccaggctgttcttgaactcctggcctcaaatgatccactcgccgtggcctccagtagcgctgggattacaggcgtgagccatcacacccggcctggatgctggtagttttattttctgcttagaaaacgcaaccatgttgatgggaccaaaaacttagttgaaagaagccatggcaaaagatgttgacgtacaactggctcctgaggctgtcaattgtttagagctcccaagtagtactgcattacggaatctactacttagaagaatgtacaagatgtaagttcccatcggcaccgtcatggtaagaagaataagaaactctcaaaggaaaagaaacttacattcactttttcctggtccattttggttcctaagaatagataggccattaagaaggatattaggtttctaaggacaattttaacacaatactgctttaaaaatctgaagtttaaatagtttagctatttctgtaggttaattcaggcactgactaaaatcagtctcattatcatatacaaatgtaaggaagttaaattttaaaagcatgtataggttgtccttaaattatacaaaagcttttagtttcatcaggattatattccagttaacctttcatcttttttttttttccaaatgaactagggtctttaaaattcctaagtagattcttttgagtggtaggggagtctgtatagattacagatataatttattgtgataacaaatggcttcctgtttgacctcat

SEQ ID NO: 6422 - protein, 173 aa, Homo sapiens; identical to SEQ ID NO: 808

SEQ ID NO: 6423 - DNA, 773 bp, Homo sapiens
ctctcttttcctcctgctctggccgcgttaagatgtggctacttcccttcgcgttctacctcgattgaaaattttctgaggcctccgtagccatgcttcccgtacagctgtggaaccgtaagtggtgttttatcttcattgcttcagggagtgttgatttgtctgccattcgactctcagaaattctgtcaggaaaaataaatggatatgaaatctgaagataaaggtttgtggggaaagaataaaaggatcatgaaatgtcagggctgaaaaatatcttagcatccagcctagtgttctatttacaccatccctgttttggctcccaatctgattctcttcctattgcatcaaactgagttttaaagaaatttgaaactatgcatttcaagactatttggtgattatgttaatctccaattctgcctatttttgattatgttaaaatcagccaaaatatagaacatagagttatgcttatgcccaacatcataatatgccttcagttattaacatatgttgtaggtaagcttgttattatttgaaatgtaaatatttatatgtgtaatgtgtaaaagttttcaaatatgggtcataacatatccaatggtttatttgtctatgccactaatacatctttgggcacccaagtttaagtgcagtacattttgctggttgatgtaccaaggaatgacttataattgtgatgaaatttgaacttcatattgcaaaagataatcatcatttgctagaaaaaattaaaaccgtttaaa

SEQ ID NO: 6424 - protein, 41 aa, Homo sapiens
MLPVQLWNRKWCFIFIASGSVDLSAIRLSEILSGKINGYEI

SEQ ID NO: 6425 - DNA, 404 bp, Homo sapiens
gtggctacttcccttcgcgttctacctcgattgaaaattttctgaggcctccgtagccatgcttcccgtacagctgtggaaccgatttaaaattatggaaattcttcaggcagaaaatgggcacatatggttatcacagaaaagctgttttaaagccagttttaaggtattattatgccgctaccttcaagaagtaatttgcgtgctgtttattggagctgtgaatttaatcatctcaatcccacgctattacaggatgactataagaagatgtattgacatttctttggacacataattttgcctccattgtgtgttgttttgccagaatactgaaggcagtgtttgtatgatggcacatccaaataaaaagcaggtcctccttttgggacagtgatccattt

SEQ ID NO: 6426 - protein, 79 aa, Homo sapiens
MLPVQLWNRFKIMEILQAENGHIWLSQKSCFKASFKVLLCRYLQEVICVLFIGAVNLIISIPRYYRMTIRRCIDISLDT

SEQ ID NO: 6427 - DNA, 483 bp, Homo sapiens
ggctacttcccttcgcgttctacctcgattgaaaattttctgaggcctccgtagccatgcttcccgtacagctgtggaaccggcctcattttcttctgtcactggagccatcatttatttagcagctttgttaaacagaaaggggtctgtcctgcgtgtgcagtctttggatttaaaattatggaaattcttcaggcagaaaatgggcacatatggttatcacagaaaagctgttttaaagccagttttaaggtattattatgccgctaccttcaagaagtaatttgcgtgctgtttattggagctgtgaatttaatcatctcaatcccacgctattacaggatgactataagaagatgtattgacatttctttggacacataattttgcctccattgtgtgttgttttgccagaatactgaaggcagtgtttgtatgatggcacatccaaataaaaagcaggtcctccttttgggacagtga

SEQ ID NO: 6428 - protein, 67 aa, Homo sapiens
MEILQAENGHIWLSQKSCFKASFKVLLCRYLQEVICVLFIGAVNLIISIPRYYRMTIRRCIDISLDT

SEQ ID NO: 6429 - DNA, 402 bp, Homo sapiens
ttgcctgcttgtaatgttacccctgagaaaagtcatctgaaaatgggaaatggacctggacaggaataagcagagcatgctgatttaaaattatggaaattcttcaggcagaaaatgggcacatatggttatcacagaaaagctgttttaaagccagttttaaggtattattatgccgctaccttcaagaagtaatttgcgtgctgtttattggagctgtgaatttaatcatctcaatcccacgctattacaggatgactataagaagatgtattgacatttctttggacacataattttgcctccattgtgtgttgttttgccagaatactgaaggcagtgtttgtatgatggcacatccaaataaaaagcaggtcctccttttgggacagtgatccattt

SEQ ID NO: 6430 - protein, 67 aa, Homo sapiens; identical to SEQ ID NO: 6428

SEQ ID NO: 6431 - DNA, 3897 bp, Homo sapiens
aaggtaaagccactagagagaaactgaaagaaaacattcttaagataaattgaattgacattttctctctaaaatatgatttatagaccacagataggaattaagagtttcctgataattttggcttcatattattttaaaggattatcaagaggaaattgctattgctcaagagaacaaaatacagctccaacaaatgggagaacgacttgctaaagccagccatgaaagcaaagcatctgagattgaatacaagctgggaaaggtcaacgaccggtggcagcatctcctggacctcattgcagccagggtgaagaagctgaaggagaccctggtagccgtgcagcagcttgataagaacatgagcagcctgaggacctggctcgctcacatcgagtcagagctggccaagccaatagtctacgattcctgtaactcggaagaaatacagagaaagcttaatgagcagcaggagcttcagagagacatagagaagcacagtacaggtgttgcatctgtcctcaacctgtgtgaagtcctgctgcacgactgtgacgcctgtgccactgatgccgagtgtgactctatacagcaggctacgagaaacctggaccggcggtggagaaacatttgtgctatgtccatggaaaggaggctgaaaatcgaagagacgtggcgattgtggcagaaatttctggatgactattcacgttttgaagattggctgaagtcttcagaaaggacagctgcttttcccagctcttctggggtgatctatacagttgccaaggaagaactaaagaaatttgaggctttccagcgacaggtccacgagtgcctgacgcagctggaactgatcaacaagcagtaccgccgcctggccagggagaaccgcactgattcagcatgtagcctcaaacagatggttcacgaaggcaaccagagatgggacaacctgcaaaagcgtgtcacctccatcttgcgcagactcaagcattttattggccagcgtgaggagtttgagactgcgcgggacagcattctggtctggctcacagagatggatctgcagctcactaatattgaacatttttctgagtgtgatgttcaagctaaaataaagcaactcaaggccttccagcaggaaatttcactgaaccacaataagattgagcagataattgcccaaggagaacagctgatagaaaagagtgagcccttggatgcagcgatcatcgaggaggaactagatgagctccgacggtactgccaggaggtcttcgggcgtgtggaaagataccataagaaactgatccgcctgcctctcccagacgatgagcacgacctctcagacagggagctggagctggaagactctgcagctctgtcggacctgcactggcacgaccgctctgcagacagcctgctttctccacagccttcctccaatctctccctctcgctcgctcagcccctccggagcgagcggtcaggacgagacaccccggctagtgtggactccatccccctggagtgggatcacgactatgacctcagtcgggacctggagtctgcaatgtccagagctctgccctctgaggatgaagaaggtcaggatgacaaagatttctacctccggggagctgttggcttatcagatgtaatgatccccgaaagccctgaggcctatgtaaaactcacagaaaatgcaatcaaaaatacctccggggaccacagtgccctagagtcacagatccgacaactgggcaaagccctggatgatagccgttttcagatacagcaaaccgaaaatatcattcgcagcaaaactcccacggggccggagctagacaccagctacaaaggctacatgaaactgctgggcgaatgcagtagcagtatagactccgtgaagagactggagcacaaactgaaggaggaagaggagagccttcctggctttgttaacctgcatagtaccgaaacccaaacggctggtgtgattgaccgatgggagcttctccaggcccaggcattgagcaaggagttgaggatgaagcagaacctccagaagtggcagcagtttaactcagacttgaacagcatctgggcctggctgggggacacggaggaggagttggaacagctccagcgtctggaactcagcactgacatccagaccatcgagctccagatcaaaaagctcaaggagctccagaaagctgtggaccaccgcaaagccatcatcctctccatcaatctctgcagccctgagttcacccaggctgacagcaaggagagccgggacctgcaggatcgcttgtcgcagatgaatgggcgctgggaccgagtgtgctctctgctggaggagtggcggggcctgctgcaggatgccctgatgcagtgccagggtttccatgaaatgagccatggtttgcttcttatgctggagaacattgacagaaggaaaaatgaaattgtccctattgattctaaccttgatgcagagatacttcaggaccatcacaaacagcttatgcaaataaagcatgagctgttggaatcccaactcagagtagcctctttgcaagacatgtcttgccaactactggtgaatgctgaaggaacagactgtttagaagccaaagaaaaagtccatgttattggaaatcggctcaaacttctcttgaaggaggtcagtcgtcatatcaaggaactggagaagttattagacgtgtcaagtagtcagcaggatttgtcttcctggtcttctgctgatgaactggacacctcagggtctgtgagtcccacatcaggaaggagcaccccaaacagacagaaaacgccacgaggcaagtgtagtctctcacagcctggaccctctgtcagcagtccacatagcaggtccacaaaaggtggctccgattcctccctttctgagccagggccaggtcggtccggccgcggcttcctgttcagagtcctccgagcagctcttccccttcagcttctcctgctcctcctcatcgggcttgcctgccttgtaccaatgtcagaggaagactacagctgtgccctctccaacaactttgcccggtcattccaccccatgctcagatacacgaatggccctcctccactctgaactaagcagatgccatctgcagaagtgctggtagcataaggaggatcgggtcataagcaatcccaaactaccaacaagaggaccttgatcttggcgaaagccctcggtgtggcagctttagccctcctccagatcacatgtgtgcaaattatggcttcagaggtggaagataaacagtgacgggggaacaaacagacaacaagaaggtttggaagaaatctggtttgagactctgaaccttagcactaaggagattgagtaaggacctccaaagttccccggactcatgaattctgggcccttggcccattctgtgcacagccaaggacttcagtagaccatctgggcagctttcccatggtgctgctccaaccatcagataaatgaccctcccaagcaccatgtcagtgtcgtacaatctaccaaccaaccagtgctgaagagattttagaaccttgtaacatacaatttttaagagcttatatggcagcttcctttttaccttgttttcctttggggcatgatgttttaacctttgctttagaagcacaagctgtaaatctaaaaggcacttttttttagaggtataaagaaaaactagatgtaataaataagatcatggaaggctttatgtgaaaaaagttgaatgttatagtaaaaaaaaaaagatatttatgtatgtacagtttgctaaagccaagttttgtttgtattgatttctttgcatttattatagatattataaaatagtt

SEQ ID NO: 6432 - protein, 982 aa, Homo sapiens
MGERLAKASHESKASEIEYKLGKVNDRWQHLLDLIAARVKKLKETLVAVQQLDKNMSSLRTWLAHIESELAKPIVYDSCNSEEIQRKLNEQQELQRDIEKHSTGVASVLNLCEVLLHDCDACATDAECDSIQQATRNLDRRWRNICAMSMERRLKIEETWRLWQKFLDDYSRFEDWLKSSERTAAFPSSSGVIYTVAKEELKKFEAFQRQVHECLTQLELINKQYRRLARENRTDSACSLKQMVHEGNQRWDNLQKRVTSILRRLKHFIGQREEFETARDSILVWLTEMDLQLTNIEHFSECDVQAKIKQLKAFQQEISLNHNKIEQIIAQGEQLIEKSEPLDAAIIEEELDELRRYCQEVFGRVERYHKKLIRLPLPDDEHDLSDRELELEDSAALSDLHWHDRSADSLLSPQPSSNLSLSLAQPLRSERSGRDTPASVDSIPLEWDHDYDLSRDLESAMSRALPSEDEEGQDDKDFYLRGAVGLSDVMIPESPEAYVKLTENAIKNTSGDHSALESQIRQLGKALDDSRFQIQQTENIIRSKTPTGPELDTSYKGYMKLLGECSSSIDSVKRLEHKLKEEEESLPGFVNLHSTETQTAGVIDRWELLQAQALSKELRMKQNLQKWQQFNSDLNSIWAWLGDTEEELEQLQRLELSTDIQTIELQIKKLKELQKAVDHRKAIILSINLCSPEFTQADSKESRDLQDRLSQMNGRWDRVCSLLEEWRGLLQDALMQCQGFHEMSHGLLLMLENIDRRKNEIVPIDSNLDAEILQDHHKQLMQIKHELLESQLRVASLQDMSCQLLVNAEGTDCLEAKEKVHVIGNRLKLLLKEVSRHIKELEKLLDVSSSQQDLSSWSSADELDTSGSVSPTSGRSTPNRQKTPRGKCSLSQPGPSVSSPHSRSTKGGSDSSLSEPGPGRSGRGFLFRVLRAALPLQLLLLLLIGLACLVPMSEEDYSCALSNNFARSFHPMLRYTNGPPPL

SEQ ID NO: 6433 - DNA, 10730 bp, Homo sapiens
tgttctcacgagggggcagcttgggcttgaccgagcaggagcttcatggtcccacacgtagtatgacatgtgacctctgcacattgtttacagttcctaaactgtgatttctttttctgtgaaatagttataatagtaagtggctaccaagtagaaagtggtcatggggggtgaaggttaaacacaataacggacacacagaacttacacagggcattttatgccaagctatattgaatatctatatccctctacctgcccgtcaatgtcatgaatattgacaattcactctagaccctgctagaagaatccaaagaaattgacagtgagctggaagcaatgactgagaaattacagtacctcactagcgtgtactgtacagaaaaaatgtctcagcaagtggcagaactgggacgggagactgaggagttgcgacagatgatcaaaattcgtttgcagaacctccaagatgcagctaaggatatgaaaaaatttgaagcagagttgaaaaagttacaagctgccttggagcaagcccaggcaacactgacttctccagaagttggacgtctcagtctcaaggagcagctctctcatcggcagcatttgttgtctgagatggagtcactgaagccgaaggtgcaagcagtgcagctctgccagagtgccctccggatccccgaggatgtggttgccagcttacctctctgtcatgctgctctgcggctgcaggaagaggccagccggctgcagcacaccgccatccagcagtgtaacatcatgcaggcagctgtggtacaatatgaacaatatgagcaagaaatgaaacatctccagcaactgatagaaggagctcacagagagattgaggataaacctgttgccaccagtaacatacaggagctgcaggctcagatttctcggcatgaggagctggcgcagaaaattaagggctaccaggagcagatcgcttctttgaattccaagtgcaagatgctgacgatgaaagccaagcacgccaccatgctgctgacggtgaccgaggtcgaggggctggcggaagggacagaggacctggatggggagctcctccccacgccttcggcccacccctctgtggtcatgatgactgcaggtcgctgtcacactttgctgtcaccggtcactgaggagtctggggaggagggaaccaacagtgagatttcctctccacctgcctgtcgctccccttcacctgtggctaatacagatgcttctgttaaccaggacattgcatattaccaagccttgtctgctgagaggttgcagacagatgctgcaaaaattcaccccagcacatccgcatcccaggagttctatgaaccgggattggagccatccgctactgccaaactgggtgatttgcagcgttcttgggaaaccttaaagaatgtgatcagtgagaagcagcgcacactctatgaagctttggaacgccagcagaagtaccaggactccctccagtccatctctacgaagatggaggccattgagctgaaactcagtgagagcccagagcctggcaggagtccagaaagccagatggctgaacatcaggcattgatggatgagattctcatgctccaggatgaaatcaatgagctccagtcctctctcgcagaggagctggtatccgagtcttgtgaggccgaccctgcggagcagctggccttgcagtccacgctcactgtcttagccgagcgaatgtccaccatcaggatgaaagcctcggggaaacggcagcttttggaggagaagttgaatgatcagctggaggaacaaaggcaggaacaggccctgcagaggtatcgctgtgaagccgatgagctggacagctggctcttgagtaccaaggccactctggacactgcgctgagtccacccaaggagcccatggacatggaggcccagcttatggactgccagaatatgctggtggaaatagagcagaaggtggtggctttatcagaactgtcagtccacaatgagaacctgctgctggagggcaaagctcacaccaaggacgaggccgagcagctggctggaaagctgagaaggctcaaggggagcctgctggagctgcagagagccctgcatgataagcagctcaacatgcagggaacagcacaggagaaggaggagagcgatgttgacctaacagccacgcagagccccggcgtccaggaatggctggcccaagctcgcaccacatggacccagcagcggcagagcagtctccagcaacaaaaagagttagaacaggaattagccgagcagaagagtctccttcgctcagtagccagtcgtggagaggagattctaattcaacattcggcggcagagacctctggtgatgctggcgaaaaacctgatgtgttatcccaggagttggggatggaaggggagaaatcatccgctgaagaccagatgagaatgaaatgggaaagcctacatcaagaatttagtaccaagcagaaactactacagaatgttctggaacaggaacaagagcaagtgctttatagcaggccaaatcgactcttgtctggtgtgccactgtacaaaggggacgtgccaacccaagataaatctgcagttacatctttgctggatggactgaaccaagccttcgaggaggtttcatcccagagtggaggggcaaagaggcagagtatacacttggagcagaagttgtatgatggagtctcagccacctctacttggttggatgacgttgaagaacgtttatttgttgccacagcacttttaccagaagaaacagagacttgtctcttcaaccaagagattcttgccaaagacattaaggaaatgtctgaagaaatggataagaacaaaaacttgttttcccaagcttttccagagaatggtgataatcgagatgttattgaagatactttgggttgtcttttgggcaggttatccttgctagactcagtagtgaatcaacgatgtcatcagatgaaagaaagacttcagcaaatactaaatttccagaatgatctgaaagtgctgtttacatcactggctgacaacaaatacatcattctgcaaaaactggcaaatgtgtttgaacagcccgtagcagaacaaatagaggcaatacaacaggctgaagatggactcaaagaatttgatgcaggaatcattgaattaaagaggcgtggtgacaagctacaggtcgagcagccgtccatgcaagaactctccaagctccaggacatgtatgatgagctgatgatgatcattggctcccggaggagtggtctgaatcagaaccttacactcaagagtcagtatgagagggccctacaagatctggctgacctgctagaaactggtcaggagaagatggcaggagaccagaaaatcatcgtgtcttccaaagaggaaatccagcaactacttgacaaacataaggaatactttcagggcctggaatctcatatgatcttgactgaaacactcttcagaaagataatcagctttgcagtccaaaaggaaacccagttccatacagagctgatggctcaggcttctgctgtactgaaacgggctcacaagaggggtgtggagctggagtacattctagagacgtggtcccatctggatgaggaccagcaggagctcagcagacagctggaggtggtggaaagcagcatcccaagcgtgggtctggtggaggagaacgaggacaggcttattgaccgcataacactctaccagcatttaaaatctagccttaatgaataccagcccaaattatatcaagtattagatgatgggaaacgacttctgatatccatcagctgctcagatctagaaagccaactaaatcaacttggagagtgctggctaagtaacaccaataaaatgtctaaggaacttcacagactggaaacaatattgaaacactggaccagatatcaaagtgaatctgcagatctaattcactggttacaatctgcaaaagaccggctagaattttggactcagcaatctgtgacagtcccacaagagctggaaatggtccgtgatcatctaaatgctttcctggagttttctaaagaagtggatgcccaatcttccctgaaatcatctgttctgagtactggaaatcagctccttcgactaaaaaaggtggacacagccacgctgcgctctgagctgtcgcgcattgatagccagtggactgacctgctaaccaatatcccagccgtccaggagaagctccaccagctccagatggataaactgccttcccgccatgccatttctgaagtcatgagttggatttctctaatggaaaatgttattcagaaggatgaagataatattaaaaattccataggttacaaggcaattcatgaataccttcagaaatataagggttttaagatagacattaactgtaaacagctgacagtggattttgtgaaccagtccgtgctacaaatcagcagtcaggatgtggaaagtaagcgtagtgataagactgattttgctgagcaacttggagcaatgaataaaagttggcaaattctgcaaggtctagtaactgagaagatccagctgttggaaggcttattggaatcttggtcagaatatgaaaataatgtacaatgtctgaaaacatggtttgaaacccaggaaaagagactaaaacaacagcatcgaattggagatcaggcttctgttcaaaatgcactgaaagactgtcaggatctggaagatttgattaaagcaaaagaaaaagaagtagagaaaattgagcagaatggacttgctttgattcagaacaagaaagaagacgtctctagcattgtcatgagcacactgcgagagctcggccaaacctgggcaaatttagatcacatggttggacaattaaagatactgctgaaatcagtgcttgaccaatggagtagtcacaaagtggcctttgacaagataaacagttacctcatggaggccagatactctctttcccgattccgtctgctgactggctccttagaagctgtgcaagttcaggtggacaatcttcagaatctccaagatgatctggaaaaacaggaaaggagcttacagaaatttggctctatcaccaaccaattattaaaagagtgtcacccacccgtgacagaaactcttaccaatacactgaaagaagtcaacatgagatggaataacttgctggaagagattgctgagcagctacagtccagcaaggccctacttcagctttggcaaagatacaaggactactccaaacagtgtgcttcgacagttcagcagcaggaggatcgaaccaatgagctgttgaaggcagccacaaacaaggacattgccgatgatgaggttgccacatggattcaagattgcaacgacctcctcaaaggactgggcacagttaaagattccctcttttttctccatgagctgggagagcaactgaagcaacaagtggatgcttccgcagcatcagctattcaatcggatcaactctctttgagtcaacacttgtgtgccctggagcaagctctctgcaaacagcagacttcattacaggctggagttcttgattatgaaacctttgccaagagtttagaagctttggaggcctggatagtggaagctgaagaaatactacaagggcaggaccctagccactcatctgacctctccacaatccaggaaaggatggaagaacttaagggacagatgttaaaattcagcagcatggctccagatttagaccgtctaaatgagcttggatataggttacccttgaatgataaggaaatcaaaagaatgcagaatctgaaccgccattggtctctgatctcctctcagactacagaaagattcagcaagttgcagtcatttttgctacaacatcagactttcttggaaaaatgtgaaacatggatggaattcctagttcagacagaacaaaagttagcagtagagatttcaggaaattatcagcaccttttggaacagcagagagcacacgagttgtttcaagccgagatgttcagtcgtcagcagattttgcactcaatcattattgatgggcaacgtcttctagaacaaggtcaagttgatgacagggatgaattcaacctgaaattgacactcctcagtaatcaatggcagggagtgattcgcagggcccagcagaggcgggggatcattgacagccagattcgccagtggcagcgctatagggagatggcagaaaagcttcgtaaatggttggttgaagtgtcctacctccccatgagtggtctcggaagtgttcctataccactgcaacaagcaaggaccctctttgatgaagtgcagttcaaagaaaaagtgtttctgcggcaacaaggcagctacatcctgactgtggaggctggcaagcaactccttctctcggcggacagtggcgctgaggccgccttgcaggccgaactcgctgaaatccaagagaaatggaaatcagccagcatgcggctggaagaacagaagaaaaaactagccttcttgttgaaagactgggaaaaatgtgagaaaggaatagcagattccctggagaaactacgaactttcaaaaagaagctttcgcagtctctcccggatcaccatgaagagctccatgcagaacaaatgcgttgcaaggaattagaaaatgcagttgggagctggacagatgacttgacccagttgagcctgctgaaggacaccctctctgcctatatcagtgctgatgatatctccattcttaatgaacgcgtagagcttctgcaaaggcagtgggaagaactatgccaccagctctccttaaggcggcagcaaataggtgaaagattgaatgaatgggcagtcttcagtgaaaagaacaaggaactctgtgagtggttgactcaaatggaaagcaaagtttctcagaatggagacattctcattgaagaaatgatagagaagctcaagaaggattatcaagaggaaattgctattgctcaagagaacaaaatacagctccaacaaatgggagaacgacttgctaaagccagccatgaaagcaaagcatctgagattgaatacaagctgggaaaggtcaacgaccggtggcagcatctcctggacctcattgcagccagggtgaagaagctgaaggagaccctggtagccgtgcagcagcttgataagaacatgagcagcctgaggacctggctcgctcacatcgagtcagagctggccaagccaatagtctacgattcctgtaactcggaagaaatacagagaaagcttaatgagcagcaggagcttcagagagacatagagaagcacagtacaggtgttgcatctgtcctcaacctgtgtgaagtcctgctgcacgactgtgacgcctgtgccactgatgccgagtgtgactctatacagcaggctacgagaaacctggaccggcggtggagaaacatttgtgctatgtccatggaaaggaggctgaaaatcgaagagacgtggcgattgtggcagaaatttctggatgactattcacgttttgaagattggctgaagtcttcagaaaggacagctgcttttcccagctcttctggggtgatctatacagttgccaaggaagaactaaagaaatttgaggctttccagcgacaggtccacgagtgcctgacgcagctggaactgatcaacaagcagtaccgccgcctggccagggagaaccgcactgattcagcatgtagcctcaaacagatggttcacgaaggcaaccagagatgggacaacctgcaaaagcgtgtcacctccatcttgcgcagactcaagcattttattggccagcgtgaggagtttgagactgcgcgggacagcattctggtctggctcacagagatggatctgcagctcactaatattgaacatttttctgagtgtgatgttcaagctaaaataaagcaactcaaggccttccagcaggaaatttcactgaaccacaataagattgagcagataattgcccaaggagaacagctgatagaaaagagtgagcccttggatgcagcgatcatcgaggaggaactagatgagctccgacggtactgccaggaggtcttcgggcgtgtggaaagataccataagaaactgatccgcctgcctctcccagacgatgagcacgacctctcagacagggagctggagctggaagactctgcagctctgtcggacctgcactggcacgaccgctctgcagacagcctgctttctccacagccttcctccaatctctccctctcgctcgctcagcccctccggagcgagcggtcaggacgagacaccccggctagtgtggactccatccccctggagtgggatcacgactatgacctcagtcgggacctggagtctgcaatgtccagagctctgccctctgaggatgaagaaggtcaggatgacaaagatttctacctccggggagctgttggcttatcaggggaccacagtgccctagagtcacagatccgacaactgggcaaagccctggatgatagccgttttcagatacagcaaaccgaaaatatcattcgcagcaaaactcccacggggccggagctagacaccagctacaaaggctacatgaaactgctgggcgaatgcagtagcagtatagactccgtgaagagactggagcacaaactgaaggaggaagaggagagccttcctggctttgttaacctgcatagtaccgaaacccaaacggctggtgtgattgaccgatgggagcttctccaggcccaggcattgagcaaggagttgaggatgaagcagaacctccagaagtggcagcagtttaactcagacttgaacagcatctgggcctggctgggggacacggaggaggagttggaacagctccagcgtctggaactcagcactgacatccagaccatcgagctccagatcaaaaagctcaaggagctccagaaagctgtggaccaccgcaaagccatcatcctctccatcaatctctgcagccctgagttcacccaggctgacagcaaggagagccgggacctgcaggatcgcttgtcgcagatgaatgggcgctgggaccgagtgtgctctctgctggaggagtggcggggcctgctgcaggatgccctgatgcagtgccagggtttccatgaaatgagccatggtttgcttcttatgctggagaacattgacagaaggaaaaatgaaattgtccctattgattctaaccttgatgcagagatacttcaggaccatcacaaacagcttatgcaaataaagcatgagctgttggaatcccaactcagagtagcctctttgcaagacatgtcttgccaactactggtgaatgctgaaggaacagactgtttagaagccaaagaaaaagtccatgttattggaaatcggctcaaacttctcttgaaggaggtcagtcgtcatatcaaggaactggagaagttattagacgtgtcaagtagtcagcaggatttgtcttcctggtcttctgctgatgaactggacacctcagggtctgtgagtcccacatcaggaaggagcaccccaaacagacagaaaacgccacgaggcaagtgtagtctctcacagcctggaccctctgtcagcagtccacatagcaggtccacaaaaggtggctccgattcctccctttctgagccagggccaggtcggtccggccgcggcttcctgttcagagtcctccgagcagctcttccccttcagcttctcctgctcctcctcatcgggcttgcctgccttgtaccaatgtcagaggaagactacagctgtgccctctccaacaactttgcccggtcattccaccccatgctcagatacacgaatggccctcctccactctgaactaagcagatgccatctgcagaagtgctggtagcataaggaggatcgggtcataagcaatcccaaactaccaacaagaggaccttgatcttggcgaaagccctcggtgtggcagctttagccctcctccagatcacatgtgtgcaaattatggcttcagaggtggaagataaacagtgacgggggaacaaacagacaacaagaaggtttggaagaaatctggtttgagactctgaaccttagcactaaggagattgagtaaggacctccaaagttccccggactcatgaattctgggcccttggcccattctgtgcacagccaaggacttcagtagaccatctgggcagctttcccatggtgctgctccaaccatcagataaatgaccctcccaagcaccatgtcagtgtcgtacaatctaccaaccaaccagtgctgaagagattttagaaccttgtaacatacaatttttaagagcttatatggcagcttcctttttaccttgttttcctttggggcatgatgttttaacctttgctttagaagcacaagctgtaaatctaaaaggcacttttttttagaggtataaagaaaaactagatgtaataaataagatcatggaaggctttatgtgaaaaaagttgaatgttatagtaaaaaaaaaaagatatttatgtatgtacagtttgctaaagccaagttttgtttgtattgatttctttgcatttattatagatattataaaatagtt

SEQ ID NO: 6434 - protein, 3212 aa, Homo sapiens
MTEKLQYLTSVYCTEKMSQQVAELGRETEELRQMIKIRLQNLQDAAKDMKKFEAELKKLQAALEQAQATLTSPEVGRLSLKEQLSHRQHLLSEMESLKPKVQAVQLCQSALRIPEDVVASLPLCHAALRLQEEASRLQHTAIQQCNIMQAAVVQYEQYEQEMKHLQQLIEGAHREIEDKPVATSNIQELQAQISRHEELAQKIKGYQEQIASLNSKCKMLTMKAKHATMLLTVTEVEGLAEGTEDLDGELLPTPSAHPSVVMMTAGRCHTLLSPVTEESGEEGTNSEISSPPACRSPSPVANTDASVNQDIAYYQALSAERLQTDAAKIHPSTSASQEFYEPGLEPSATAKLGDLQRSWETLKNVISEKQRTLYEALERQQKYQDSLQSISTKMEAIELKLSESPEPGRSPESQMAEHQALMDEILMLQDEINELQSSLAEELVSESCEADPAEQLALQSTLTVLAERMSTIRMKASGKRQLLEEKLNDQLEEQRQEQALQRYRCEADELDSWLLSTKATLDTALSPPKEPMDMEAQLMDCQNMLVEIEQKVVALSELSVHNENLLLEGKAHTKDEAEQLAGKLRRLKGSLLELQRALHDKQLNMQGTAQEKEESDVDLTATQSPGVQEWLAQARTTWTQQRQSSLQQQKELEQELAEQKSLLRSVASRGEEILIQHSAAETSGDAGEKPDVLSQELGMEGEKSSAEDQMRMKWESLHQEFSTKQKLLQNVLEQEQEQVLYSRPNRLLSGVPLYKGDVPTQDKSAVTSLLDGLNQAFEEVSSQSGGAKRQSIHLEQKLYDGVSATSTWLDDVEERLFVATALLPEETETCLFNQEILAKDIKEMSEEMDKNKNLFSQAFPENGDNRDVIEDTLGCLLGRLSLLDSVVNQRCHQMKERLQQILNFQNDLKVLFTSLADNKYIILQKLANVFEQPVAEQIEAIQQAEDGLKEFDAGIIELKRRGDKLQVEQPSMQELSKLQDMYDELMMIIGSRRSGLNQNLTLKSQYERALQDLADLLETGQEKMAGDQKIIVSSKEEIQQLLDKHKEYFQGLESHMILTETLFRKIISFAVQKETQFHTELMAQASAVLKRAHKRGVELEYILETWSHLDEDQQELSRQLEVVESSIPSVGLVEENEDRLIDRITLYQHLKSSLNEYQPKLYQVLDDGKRLLISISCSDLESQLNQLGECWLSNTNKMSKELHRLETILKHWTRYQSESADLIHWLQSAKDRLEFWTQQSVTVPQELEMVRDHLNAFLEFSKEVDAQSSLKSSVLSTGNQLLRLKKVDTATLRSELSRIDSQWTDLLTNIPAVQEKLHQLQMDKLPSRHAISEVMSWISLMENVIQKDEDNIKNSIGYKAIHEYLQKYKGFKIDINCKQLTVDFVNQSVLQISSQDVESKRSDKTDFAEQLGAMNKSWQILQGLVTEKIQLLEGLLESWSEYENNVQCLKTWFETQEKRLKQQHRIGDQASVQNALKDCQDLEDLIKAKEKEVEKIEQNGLALIQNKKEDVSSIVMSTLRELGQTWANLDHMVGQLKILLKSVLDQWSSHKVAFDKINSYLMEARYSLSRFRLLTGSLEAVQVQVDNLQNLQDDLEKQERSLQKFGSITNQLLKECHPPVTETLTNTLKEVNMRWNNLLEEIAEQLQSSKALLQLWQRYKDYSKQCASTVQQQEDRTNELLKAATNKDIADDEVATWIQDCNDLLKGLGTVKDSLFFLHELGEQLKQQVDASAASAIQSDQLSLSQHLCALEQALCKQQTSLQAGVLDYETFAKSLEALEAWIVEAEEILQGQDPSHSSDLSTIQERMEELKGQMLKFSSMAPDLDRLNELGYRLPLNDKEIKRMQNLNRHWSLISSQTTERFSKLQSFLLQHQTFLEKCETWMEFLVQTEQKLAVEISGNYQHLLEQQRAHELFQAEMFSRQQILHSIIIDGQRLLEQGQVDDRDEFNLKLTLLSNQWQGVIRRAQQRRGIIDSQIRQWQRYREMAEKLRKWLVEVSYLPMSGLGSVPIPLQQARTLFDEVQFKEKVFLRQQGSYILTVEAGKQLLLSADSGAEAALQAELAEIQEKWKSASMRLEEQKKKLAFLLKDWEKCEKGIADSLEKLRTFKKKLSQSLPDHHEELHAEQMRCKELENAVGSWTDDLTQLSLLKDTLSAYISADDISILNERVELLQRQWEELCHQLSLRRQQIGERLNEWAVFSEKNKELCEWLTQMESKVSQNGDILIEEMIEKLKKDYQEEIAIAQENKIQLQQMGERLAKASHESKASEIEYKLGKVNDRWQHLLDLIAARVKKLKETLVAVQQLDKNMSSLRTWLAHIESELAKPIVYDSCNSEEIQRKLNEQQELQRDIEKHSTGVASVLNLCEVLLHDCDACATDAECDSIQQATRNLDRRWRNICAMSMERRLKIEETWRLWQKFLDDYSRFEDWLKSSERTAAFPSSSGVIYTVAKEELKKFEAFQRQVHECLTQLELINKQYRRLARENRTDSACSLKQMVHEGNQRWDNLQKRVTSILRRLKHFIGQREEFETARDSILVWLTEMDLQLTNIEHFSECDVQAKIKQLKAFQQEISLNHNKIEQIIAQGEQLIEKSEPLDAAIIEEELDELRRYCQEVFGRVERYHKKLIRLPLPDDEHDLSDRELELEDSAALSDLHWHDRSADSLLSPQPSSNLSLSLAQPLRSERSGRDTPASVDSIPLEWDHDYDLSRDLESAMSRALPSEDEEGQDDKDFYLRGAVGLSGDHSALESQIRQLGKALDDSRFQIQQTENIIRSKTPTGPELDTSYKGYMKLLGECSSSIDSVKRLEHKLKEEEESLPGFVNLHSTETQTAGVIDRWELLQAQALSKELRMKQNLQKWQQFNSDLNSIWAWLGDTEEELEQLQRLELSTDIQTIELQIKKLKELQKAVDHRKAIILSINLCSPEFTQADSKESRDLQDRLSQMNGRWDRVCSLLEEWRGLLQDALMQCQGFHEMSHGLLLMLENIDRRKNEIVPIDSNLDAEILQDHHKQLMQIKHELLESQLRVASLQDMSCQLLVNAEGTDCLEAKEKVHVIGNRLKLLLKEVSRHIKELEKLLDVSSSQQDLSSWSSADELDTSGSVSPTSGRSTPNRQKTPRGKCSLSQPGPSVSSPHSRSTKGGSDSSLSEPGPGRSGRGFLFRVLRAALPLQLLLLLLIGLACLVPMSEEDYSCALSNNFARSFHPMLRYTNGPPPL

SEQ ID NO: 6435 - DNA, 10838 bp, Homo sapiens
caaaaatcagtctgatctcgggaaacctggagaaatttattttctgtactctaatgttctttcattttggtgaccatcaaggtgctgggagaggaattagatggctgtaattcaaagttaatggaattagatgcagcagtacagaaattcttggaacagaatggccaactgggtaagccactggccaagaagataggaaaactgactgaacttcaccagcagaccattagacaagctgagaatcggctctccaagctcaatcaggcagcatcacatttagaagaatacaatgaaatgcttgaattaattttgaagtggattgaaaaagctaaagtcttggctcatggaactattgcatggaattctgcaagccagcttcgggaacaatatattttgcatcagaccctgctagaagaatccaaagaaattgacagtgagctggaagcaatgactgagaaattacagtacctcactagcgtgtactgtacagaaaaaatgtctcagcaagtggcagaactgggacgggagactgaggagttgcgacagatgatcaaaattcgtttgcagaacctccaagatgcagctaaggatatgaaaaaatttgaagcagagttgaaaaagttacaagctgccttggagcaagcccaggcaacactgacttctccagaagttggacgtctcagtctcaaggagcagctctctcatcggcagcatttgttgtctgagatggagtcactgaagccgaaggtgcaagcagtgcagctctgccagagtgccctccggatccccgaggatgtggttgccagcttacctctctgtcatgctgctctgcggctgcaggaagaggccagccggctgcagcacaccgccatccagcagtgtaacatcatgcaggcagctgtggtacaatatgaacaatatgagcaagaaatgaaacatctccagcaactgatagaaggagctcacagagagattgaggataaacctgttgccaccagtaacatacaggagctgcaggctcagatttctcggcatgaggagctggcgcagaaaattaagggctaccaggagcagatcgcttctttgaattccaagtgcaagatgctgacgatgaaagccaagcacgccaccatgctgctgacggtgaccgaggtcgaggggctggcggaagggacagaggacctggatggggagctcctccccacgccttcggcccacccctctgtggtcatgatgactgcaggtcgctgtcacactttgctgtcaccggtcactgaggagtctggggaggagggaaccaacagtgagatttcctctccacctgcctgtcgctccccttcacctgtggctaatacagatgcttctgttaaccaggacattgcatattaccaagccttgtctgctgagaggttgcagacagatgctgcaaaaattcaccccagcacatccgcatcccaggagttctatgaaccgggattggagccatccgctactgccaaactgggtgatttgcagcgttcttgggaaaccttaaagaatgtgatcagtgagaagcagcgcacactctatgaagctttggaacgccagcagaagtaccaggactccctccagtccatctctacgaagatggaggccattgagctgaaactcagtgagagcccagagcctggcaggagtccagaaagccagatggctgaacatcaggcattgatggatgagattctcatgctccaggatgaaatcaatgagctccagtcctctctcgcagaggagctggtatccgagtcttgtgaggccgaccctgcggagcagctggccttgcagtccacgctcactgtcttagccgagcgaatgtccaccatcaggatgaaagcctcggggaaacggcagcttttggaggagaagttgaatgatcagctggaggaacaaaggcaggaacaggccctgcagaggtatcgctgtgaagccgatgagctggacagctggctcttgagtaccaaggccactctggacactgcgctgagtccacccaaggagcccatggacatggaggcccagcttatggactgccagaatatgctggtggaaatagagcagaaggtggtggctttatcagaactgtcagtccacaatgagaacctgctgctggagggcaaagctcacaccaaggacgaggccgagcagctggctggaaagctgagaaggctcaaggggagcctgctggagctgcagagagccctgcatgataagcagctcaacatgcagggaacagcacaggagaaggaggagagcgatgttgacctaacagccacgcagagccccggcgtccaggaatggctggcccaagctcgcaccacatggacccagcagcggcagagcagtctccagcaacaaaaagagttagaacaggaattagccgagcagaagagtctccttcgctcagtagccagtcgtggagaggagattctaattcaacattcggcggcagagacctctggtgatgctggcgaaaaacctgatgtgttatcccaggagttggggatggaaggggagaaatcatccgctgaagaccagatgagaatgaaatgggaaagcctacatcaagaatttagtaccaagcagaaactactacagaatgttctggaacaggaacaagagcaagtgctttatagcaggccaaatcgactcttgtctggtgtgccactgtacaaaggggacgtgccaacccaagataaatctgcagttacatctttgctggatggactgaaccaagccttcgaggaggtttcatcccagagtggaggggcaaagaggcagagtatacacttggagcagaagttgtatgatggagtctcagccacctctacttggttggatgacgttgaagaacgtttatttgttgccacagcacttttaccagaagaaacagagacttgtctcttcaaccaagagattcttgccaaagacattaaggaaatgtctgaagaaatggataagaacaaaaacttgttttcccaagcttttccagagaatggtgataatcgagatgttattgaagatactttgggttgtcttttgggcaggttatccttgctagactcagtagtgaatcaacgatgtcatcagatgaaagaaagacttcagcaaatactaaatttccagaatgatctgaaagtgctgtttacatcactggctgacaacaaatacatcattctgcaaaaactggcaaatgtgtttgaacagcccgtagcagaacaaatagaggcaatacaacaggctgaagatggactcaaagaatttgatgcaggaatcattgaattaaagaggcgtggtgacaagctacaggtcgagcagccgtccatgcaagaactctccaagctccaggacatgtatgatgagctgatgatgatcattggctcccggaggagtggtctgaatcagaaccttacactcaagagtcagtatgagagggccctacaagatctggctgacctgctagaaactggtcaggagaagatggcaggagaccagaaaatcatcgtgtcttccaaagaggaaatccagcaactacttgacaaacataaggaatactttcagggcctggaatctcatatgatcttgactgaaacactcttcagaaagataatcagctttgcagtccaaaaggaaacccagttccatacagagctgatggctcaggcttctgctgtactgaaacgggctcacaagaggggtgtggagctggagtacattctagagacgtggtcccatctggatgaggaccagcaggagctcagcagacagctggaggtggtggaaagcagcatcccaagcgtgggtctggtggaggagaacgaggacaggcttattgaccgcataacactctaccagcatttaaaatctagccttaatgaataccagcccaaattatatcaagtattagatgatgggaaacgacttctgatatccatcagctgctcagatctagaaagccaactaaatcaacttggagagtgctggctaagtaacaccaataaaatgtctaaggaacttcacagactggaaacaatattgaaacactggaccagatatcaaagtgaatctgcagatctaattcactggttacaatctgcaaaagaccggctagaattttggactcagcaatctgtgacagtcccacaagagctggaaatggtccgtgatcatctaaatgctttcctggagttttctaaagaagtggatgcccaatcttccctgaaatcatctgttctgagtactggaaatcagctccttcgactaaaaaaggtggacacagccacgctgcgctctgagctgtcgcgcattgatagccagtggactgacctgctaaccaatatcccagccgtccaggagaagctccaccagctccagatggataaactgccttcccgccatgccatttctgaagtcatgagttggatttctctaatggaaaatgttattcagaaggatgaagataatattaaaaattccataggttacaaggcaattcatgaataccttcagaaatataagggttttaagatagacattaactgtaaacagctgacagtggattttgtgaaccagtccgtgctacaaatcagcagtcaggatgtggaaagtaagcgtagtgataagactgattttgctgagcaacttggagcaatgaataaaagttggcaaattctgcaaggtctagtaactgagaagatccagctgttggaaggcttattggaatcttggtcagaatatgaaaataatgtacaatgtctgaaaacatggtttgaaacccaggaaaagagactaaaacaacagcatcgaattggagatcaggcttctgttcaaaatgcactgaaagactgtcaggatctggaagatttgattaaagcaaaagaaaaagaagtagagaaaattgagcagaatggacttgctttgattcagaacaagaaagaagacgtctctagcattgtcatgagcacactgcgagagctcggccaaacctgggcaaatttagatcacatggttggacaattaaagatactgctgaaatcagtgcttgaccaatggagtagtcacaaagtggcctttgacaagataaacagttacctcatggaggccagatactctctttcccgattccgtctgctgactggctccttagaagctgtgcaagttcaggtggacaatcttcagaatctccaagatgatctggaaaaacaggaaaggagcttacagaaatttggctctatcaccaaccaattattaaaagagtgtcacccacccgtgacagaaactcttaccaatacactgaaagaagtcaacatgagatggaataacttgctggaagagattgctgagcagctacagtccagcaaggccctacttcagctttggcaaagatacaaggactactccaaacagtgtgcttcgacagttcagcagcaggaggatcgaaccaatgagctgttgaaggcagccacaaacaaggacattgccgatgatgaggttgccacatggattcaagattgcaacgacctcctcaaaggactgggcacagttaaagattccctcttttttctccatgagctgggagagcaactgaagcaacaagtggatgcttccgcagcatcagctattcaatcggatcaactctctttgagtcaacacttgtgtgccctggagcaagctctctgcaaacagcagacttcattacaggctggagttcttgattatgaaacctttgccaagagtttagaagctttggaggcctggatagtggaagctgaagaaatactacaagggcaggaccctagccactcatctgacctctccacaatccaggaaaggatggaagaacttaagggacagatgttaaaattcagcagcatggctccagatttagaccgtctaaatgagcttggatataggttacccttgaatgataaggaaatcaaaagaatgcagaatctgaaccgccattggtctctgatctcctctcagactacagaaagattcagcaagttgcagtcatttttgctacaacatcagactttcttggaaaaatgtgaaacatggatggaattcctagttcagacagaacaaaagttagcagtagagatttcaggaaattatcagcaccttttggaacagcagagagcacacgagttgtttcaagccgagatgttcagtcgtcagcagattttgcactcaatcattattgatgggcaacgtcttctagaacaaggtcaagttgatgacagggatgaattcaacctgaaattgacactcctcagtaatcaatggcagggagtgattcgcagggcccagcagaggcgggggatcattgacagccagattcgccagtggcagcgctatagggagatggcagaaaagcttcgtaaatggttggttgaagtgtcctacctccccatgagtggtctcggaagtgttcctataccactgcaacaagcaaggaccctctttgatgaagtgcagttcaaagaaaaagtgtttctgcggcaacaaggcagctacatcctgactgtggaggctggcaagcaactccttctctcggcggacagtggcgctgaggccgccttgcaggccgaactcgctgaaatccaagagaaatggaaatcagccagcatgcggctggaagaacagaagaaaaaactagccttcttgttgaaagactgggaaaaatgtgagaaaggaatagcagattccctggagaaactacgaactttcaaaaagaagctttcgcagtctctcccggatcaccatgaagagctccatgcagaacaaatgcgttgcaaggaattagaaaatgcagttgggagctggacagatgacttgacccagttgagcctgctgaaggacaccctctctgcctatatcagtgctgatgatatctccattcttaatgaacgcgtagagcttctgcaaaggcagtgggaagaactatgccaccagctctccttaaggcggcagcaaataggtgaaagattgaatgaatgggcagtcttcagtgaaaagaacaaggaactctgtgagtggttgactcaaatggaaagcaaagtttctcagaatggagacattctcattgaagaaatgatagagaagctcaagaaggattatcaagaggaaattgctattgctcaagagaacaaaatacagctccaacaaatgggagaacgacttgctaaagccagccatgaaagcaaagcatctgagattgaatacaagctgggaaaggtcaacgaccggtggcagcatctcctggacctcattgcagccagggtgaagaagctgaaggagaccctggtagccgtgcagcagcttgataagaacatgagcagcctgaggacctggctcgctcacatcgagtcagagctggccaagccaatagtctacgattcctgtaactcggaagaaatacagagaaagcttaatgagcagcaggagcttcagagagacatagagaagcacagtacaggtgttgcatctgtcctcaacctgtgtgaagtcctgctgcacgactgtgacgcctgtgccactgatgccgagtgtgactctatacagcaggctacgagaaacctggaccggcggtggagaaacatttgtgctatgtccatggaaaggaggctgaaaatcgaagagacgtggcgattgtggcagaaatttctggatgactattcacgttttgaagattggctgaagtcttcagaaaggacagctgcttttcccagctcttctggggtgatctatacagttgccaaggaagaactaaagaaatttgaggctttccagcgacaggtccacgagtgcctgacgcagctggaactgatcaacaagcagtaccgccgcctggccagggagaaccgcactgattcagcatgtagcctcaaacagatggttcacgaaggcaaccagagatgggacaacctgcaaaagcgtgtcacctccatcttgcgcagactcaagcattttattggccagcgtgaggagtttgagactgcgcgggacagcattctggtctggctcacagagatggatctgcagctcactaatattgaacatttttctgagtgtgatgttcaagctaaaataaagcaactcaaggccttccagcaggaaatttcactgaaccacaataagattgagcagataattgcccaaggagaacagctgatagaaaagagtgagcccttggatgcagcgatcatcgaggaggaactagatgagctccgacggtactgccaggaggtcttcgggcgtgtggaaagataccataagaaactgatccgcctgcctctcccagacgatgagcacgacctctcagacagggagctggagctggaagactctgcagctctgtcggacctgcactggcacgaccgctctgcagacagcctgctttctccacagccttcctccaatctctccctctcgctcgctcagcccctccggagcgagcggtcaggacgagacaccccggctagtgtggactccatccccctggagtgggatcacgactatgacctcagtcgggacctggagtctgcaatgtccagagctctgccctctgaggatgaagaaggtcaggatgacaaagatttctacctccggggagctgttggcttatcaggggaccacagtgccctagagtcacagatccgacaactgggcaaagccctggatgatagccgttttcagatacagcaaaccgaaaatatcattcgcagcaaaactcccacggggccggagctagacaccagctacaaaggctacatgaaactgctgggcgaatgcagtagcagtatagactccgtgaagagactggagcacaaactgaaggaggaagaggagagccttcctggctttgttaacctgcatagtaccgaaacccaaacggctggtgtgattgaccgatgggagcttctccaggcccaggcattgagcaaggagttgaggatgaagcagaacctccagaagtggcagcagtttaactcagacttgaacagcatctgggcctggctgggggacacggaggaggagttggaacagctccagcgtctggaactcagcactgacatccagaccatcgagctccagatcaaaaagctcaaggagctccagaaagctgtggaccaccgcaaagccatcatcctctccatcaatctctgcagccctgagttcacccaggctgacagcaaggagagccgggacctgcaggatcgcttgtcgcagatgaatgggcgctgggaccgagtgtgctctctgctggaggagtggcggggcctgctgcaggatgccctgatgcagtgccagggtttccatgaaatgagccatggtttgcttcttatgctggagaacattgacagaaggaaaaatgaaattgtccctattgattctaaccttgatgcagagatacttcaggaccatcacaaacagcttatgcaaataaagcatgagctgttggaatcccaactcagagtagcctctttgcaagacatgtcttgccaactactggtgaatgctgaaggaacagactgtttagaagccaaagaaaaagtccatgttattggaaatcggctcaaacttctcttgaaggaggtcagtcgtcatatcaaggaactggagaagttattagacgtgtcaagtagtcagcaggatttgtcttcctggtcttctgctgatgaactggacacctcagggtctgtgagtcccacatcaggaaggagcaccccaaacagacagaaaacgccacgaggcaagtgtagtctctcacagcctggaccctctgtcagcagtccacatagcaggtccacaaaaggtggctccgattcctccctttctgagccagggccaggtcggtccggccgcggcttcctgttcagagtcctccgagcagctcttccccttcagcttctcctgctcctcctcatcgggcttgcctgccttgtaccaatgtcagaggaagactacagctgtgccctctccaacaactttgcccggtcattccaccccatgctcagatacacgaatggccctcctccactctgaactaagcagatgccatctgcagaagtgctggtagcataaggaggatcgggtcataagcaatcccaaactaccaacaagaggaccttgatcttggcgaaagccctcggtgtggcagctttagccctcctccagatcacatgtgtgcaaattatggcttcagaggtggaagataaacagtgacgggggaacaaacagacaacaagaaggtttggaagaaatctggtttgagactctgaaccttagcactaaggagattgagtaaggacctccaaagttccccggactcatgaattctgggcccttggcccattctgtgcacagccaaggacttcagtagaccatctgggcagctttcccatggtgctgctccaaccatcagataaatgaccctcccaagcaccatgtcagtgtcgtacaatctaccaaccaaccagtgctgaagagattttagaaccttgtaacatacaatttttaagagcttatatggcagcttcctttttaccttgttttcctttggggcatgatgttttaacctttgctttagaagcacaagctgtaaatctaaaaggcacttttttttagaggtataaagaaaaactagatgtaataaataagatcatggaaggctttatgtgaaaaaagttgaatgttatagtaaaaaaaaaaagatatttatgtatgtacagtttgctaaagccaagttttgtttgtattgatttctttgcatttattatagatattataaaatagtt

SEQ ID NO: 6436 - protein, 3321 aa, Homo sapiens
MELDAAVQKFLEQNGQLGKPLAKKIGKLTELHQQTIRQAENRLSKLNQAASHLEEYNEMLELILKWIEKAKVLAHGTIAWNSASQLREQYILHQTLLEESKEIDSELEAMTEKLQYLTSVYCTEKMSQQVAELGRETEELRQMIKIRLQNLQDAAKDMKKFEAELKKLQAALEQAQATLTSPEVGRLSLKEQLSHRQHLLSEMESLKPKVQAVQLCQSALRIPEDVVASLPLCHAALRLQEEASRLQHTAIQQCNIMQAAVVQYEQYEQEMKHLQQLIEGAHREIEDKPVATSNIQELQAQISRHEELAQKIKGYQEQIASLNSKCKMLTMKAKHATMLLTVTEVEGLAEGTEDLDGELLPTPSAHPSVVMMTAGRCHTLLSPVTEESGEEGTNSEISSPPACRSPSPVANTDASVNQDIAYYQALSAERLQTDAAKIHPSTSASQEFYEPGLEPSATAKLGDLQRSWETLKNVISEKQRTLYEALERQQKYQDSLQSISTKMEAIELKLSESPEPGRSPESQMAEHQALMDEILMLQDEINELQSSLAEELVSESCEADPAEQLALQSTLTVLAERMSTIRMKASGKRQLLEEKLNDQLEEQRQEQALQRYRCEADELDSWLLSTKATLDTALSPPKEPMDMEAQLMDCQNMLVEIEQKVVALSELSVHNENLLLEGKAHTKDEAEQLAGKLRRLKGSLLELQRALHDKQLNMQGTAQEKEESDVDLTATQSPGVQEWLAQARTTWTQQRQSSLQQQKELEQELAEQKSLLRSVASRGEEILIQHSAAETSGDAGEKPDVLSQELGMEGEKSSAEDQMRMKWESLHQEFSTKQKLLQNVLEQEQEQVLYSRPNRLLSGVPLYKGDVPTQDKSAVTSLLDGLNQAFEEVSSQSGGAKRQSIHLEQKLYDGVSATSTWLDDVEERLFVATALLPEETETCLFNQEILAKDIKEMSEEMDKNKNLFSQAFPENGDNRDVIEDTLGCLLGRLSLLDSVVNQRCHQMKERLQQILNFQNDLKVLFTSLADNKYIILQKLANVFEQPVAEQIEAIQQAEDGLKEFDAGIIELKRRGDKLQVEQPSMQELSKLQDMYDELMMIIGSRRSGLNQNLTLKSQYERALQDLADLLETGQEKMAGDQKIIVSSKEEIQQLLDKHKEYFQGLESHMILTETLFRKIISFAVQKETQFHTELMAQASAVLKRAHKRGVELEYILETWSHLDEDQQELSRQLEVVESSIPSVGLVEENEDRLIDRITLYQHLKSSLNEYQPKLYQVLDDGKRLLISISCSDLESQLNQLGECWLSNTNKMSKELHRLETILKHWTRYQSESADLIHWLQSAKDRLEFWTQQSVTVPQELEMVRDHLNAFLEFSKEVDAQSSLKSSVLSTGNQLLRLKKVDTATLRSELSRIDSQWTDLLTNIPAVQEKLHQLQMDKLPSRHAISEVMSWISLMENVIQKDEDNIKNSIGYKAIHEYLQKYKGFKIDINCKQLTVDFVNQSVLQISSQDVESKRSDKTDFAEQLGAMNKSWQILQGLVTEKIQLLEGLLESWSEYENNVQCLKTWFETQEKRLKQQHRIGDQASVQNALKDCQDLEDLIKAKEKEVEKIEQNGLALIQNKKEDVSSIVMSTLRELGQTWANLDHMVGQLKILLKSVLDQWSSHKVAFDKINSYLMEARYSLSRFRLLTGSLEAVQVQVDNLQNLQDDLEKQERSLQKFGSITNQLLKECHPPVTETLTNTLKEVNMRWNNLLEEIAEQLQSSKALLQLWQRYKDYSKQCASTVQQQEDRTNELLKAATNKDIADDEVATWIQDCNDLLKGLGTVKDSLFFLHELGEQLKQQVDASAASAIQSDQLSLSQHLCALEQALCKQQTSLQAGVLDYETFAKSLEALEAWIVEAEEILQGQDPSHSSDLSTIQERMEELKGQMLKFSSMAPDLDRLNELGYRLPLNDKEIKRMQNLNRHWSLISSQTTERFSKLQSFLLQHQTFLEKCETWMEFLVQTEQKLAVEISGNYQHLLEQQRAHELFQAEMFSRQQILHSIIIDGQRLLEQGQVDDRDEFNLKLTLLSNQWQGVIRRAQQRRGIIDSQIRQWQRYREMAEKLRKWLVEVSYLPMSGLGSVPIPLQQARTLFDEVQFKEKVFLRQQGSYILTVEAGKQLLLSADSGAEAALQAELAEIQEKWKSASMRLEEQKKKLAFLLKDWEKCEKGIADSLEKLRTFKKKLSQSLPDHHEELHAEQMRCKELENAVGSWTDDLTQLSLLKDTLSAYISADDISILNERVELLQRQWEELCHQLSLRRQQIGERLNEWAVFSEKNKELCEWLTQMESKVSQNGDILIEEMIEKLKKDYQEEIAIAQENKIQLQQMGERLAKASHESKASEIEYKLGKVNDRWQHLLDLIAARVKKLKETLVAVQQLDKNMSSLRTWLAHIESELAKPIVYDSCNSEEIQRKLNEQQELQRDIEKHSTGVASVLNLCEVLLHDCDACATDAECDSIQQATRNLDRRWRNICAMSMERRLKIEETWRLWQKFLDDYSRFEDWLKSSERTAAFPSSSGVIYTVAKEELKKFEAFQRQVHECLTQLELINKQYRRLARENRTDSACSLKQMVHEGNQRWDNLQKRVTSILRRLKHFIGQREEFETARDSILVWLTEMDLQLTNIEHFSECDVQAKIKQLKAFQQEISLNHNKIEQIIAQGEQLIEKSEPLDAAIIEEELDELRRYCQEVFGRVERYHKKLIRLPLPDDEHDLSDRELELEDSAALSDLHWHDRSADSLLSPQPSSNLSLSLAQPLRSERSGRDTPASVDSIPLEWDHDYDLSRDLESAMSRALPSEDEEGQDDKDFYLRGAVGLSGDHSALESQIRQLGKALDDSRFQIQQTENIIRSKTPTGPELDTSYKGYMKLLGECSSSIDSVKRLEHKLKEEEESLPGFVNLHSTETQTAGVIDRWELLQAQALSKELRMKQNLQKWQQFNSDLNSIWAWLGDTEEELEQLQRLELSTDIQTIELQIKKLKELQKAVDHRKAIILSINLCSPEFTQADSKESRDLQDRLSQMNGRWDRVCSLLEEWRGLLQDALMQCQGFHEMSHGLLLMLENIDRRKNEIVPIDSNLDAEILQDHHKQLMQIKHELLESQLRVASLQDMSCQLLVNAEGTDCLEAKEKVHVIGNRLKLLLKEVSRHIKELEKLLDVSSSQQDLSSWSSADELDTSGSVSPTSGRSTPNRQKTPRGKCSLSQPGPSVSSPHSRSTKGGSDSSLSEPGPGRSGRGFLFRVLRAALPLQLLLLLLIGLACLVPMSEEDYSCALSNNFARSFHPMLRYTNGPPPL

SEQ ID NO: 6437 - DNA, 1838 bp, Homo sapiens
atagtagaattattcattataatatttggctttgacaaaaatcagtctgatctcgggaaacctggagaaatttattttctgtactctaatgttctttcattttggtgaccatcaaggtgctgggagaggaattagatggctgtaattcaaagttaatggaattagatgcagcagtacagaaattcttggaacagaatggccaactgggtaagccactggccaagaagataggaaaactgactgaacttcaccagcagaccattagacaagctgagaatcggctctccaagctcaatcaggcagcatcacatttagaagaatacaatgaaatgcttgaattaattttgaagtggattgaaaaagctaaagtcttggctcatggaactattgcatggaattctgcaagccagcttcgggaacaatatattttgcatcagaccctgctagaagaatccaaagaaattgacagtgagctggaagcaatgactgagaaattacagtacctcactagcgtgtactgtacagaaaaaatgtctcagcaagtggcagaactgggacgggagactgaggagttgcgacagatgatcaaaattcgtttgcagaacctccaagatgcagctaaggatatgaaaaaatttgaagcagagttgaaaaagttacaagctgccttggagcaagcccaggcaacactgacttctccagaagttggacgtctcagtctcaaggagcagctctctcatcggcagcatttgttgtctgagatggagtcactgaagccgaaggtgcaagcagtgcagctctgccagagtgccctccggatccccgaggatgtggttgccagcttacctctctgtcatgctgctctgcggctgcaggaagaggccagccggctgcagcacaccgccatccagcagtgtaacatcatgcaggcagctgtggtacaatatgaacaatatgagcaagaaatgaaacatctccagcaactgatagaaggagctcacagagagattgaggataaacctgttgccaccagtaacatacaggagctgcaggctcagatacacgaatggccctcctccactctgaactaagcagatgccatctgcagaagtgctggtagcataaggaggatcgggtcataagcaatcccaaactaccaacaagaggaccttgatcttggcgaaagccctcggtgtggcagctttagccctcctccagatcacatgtgtgcaaattatggcttcagaggtggaagataaacagtgacgggggaacaaacagacaacaagaaggtttggaagaaatctggtttgagactctgaaccttagcactaaggagattgagtaaggacctccaaagttccccggactcatgaattctgggcccttggcccattctgtgcacagccaaggacttcagtagaccatctgggcagctttcccatggtgctgctccaaccatcagataaatgaccctcccaagcaccatgtcagtgtcgtacaatctaccaaccaaccagtgctgaagagattttagaaccttgtaacatacaatttttaagagcttatatggcagcttcctttttaccttgttttcctttggggcatgatgttttaacctttgctttagaagcacaagctgtaaatctaaaaggcacttttttttagaggtataaagaaaaactagatgtaataaataagatcatggaaggctttatgtgaaaaaagttgaatgttatagtaaaaaaaaaaagatatttatgtatgtacagtttgctaaagccaagttttgtttgtattgatttctttgcatttattatagatattataaaatagtt

SEQ ID NO: 6438 - protein, 311 aa, Homo sapiens
MELDAAVQKFLEQNGQLGKPLAKKIGKLTELHQQTIRQAENRLSKLNQAASHLEEYNEMLELILKWIEKAKVLAHGTIAWNSASQLREQYILHQTLLEESKEIDSELEAMTEKLQYLTSVYCTEKMSQQVAELGRETEELRQMIKIRLQNLQDAAKDMKKFEAELKKLQAALEQAQATLTSPEVGRLSLKEQLSHRQHLLSEMESLKPKVQAVQLCQSALRIPEDVVASLPLCHAALRLQEEASRLQHTAIQQCNIMQAAVVQYEQYEQEMKHLQQLIEGAHREIEDKPVATSNIQELQAQIHEWPSSTLN

SEQ ID NO: 6439 - DNA, 3823 bp, Homo sapiens
aaggtaaagccactagagagaaactgaaagaaaacattcttaagataaattgaattgacattttctctctaaaatatgatttatagaccacagataggaattaagagtttcctgataattttggcttcatattattttaaaggattatcaagaggaaattgctattgctcaagagaacaaaatacagctccaacaaatgggagaacgacttgctaaagccagccatgaaagcaaagcatctgagattgaatacaagctgggaaaggtcaacgaccggtggcagcatctcctggacctcattgcagccagggtgaagaagctgaaggagaccctggtagccgtgcagcagcttgataagaacatgagcagcctgaggacctggctcgctcacatcgagtcagagctggccaagccaatagtctacgattcctgtaactcggaagaaatacagagaaagcttaatgagcagcaggagcttcagagagacatagagaagcacagtacaggtgttgcatctgtcctcaacctgtgtgaagtcctgctgcacgactgtgacgcctgtgccactgatgccgagtgtgactctatacagcaggctacgagaaacctggaccggcggtggagaaacatttgtgctatgtccatggaaaggaggctgaaaatcgaagagacgtggcgattgtggcagaaatttctggatgactattcacgttttgaagattggctgaagtcttcagaaaggacagctgcttttcccagctcttctggggtgatctatacagttgccaaggaagaactaaagaaatttgaggctttccagcgacaggtccacgagtgcctgacgcagctggaactgatcaacaagcagtaccgccgcctggccagggagaaccgcactgattcagcatgtagcctcaaacagatggttcacgaaggcaaccagagatgggacaacctgcaaaagcgtgtcacctccatcttgcgcagactcaagcattttattggccagcgtgaggagtttgagactgcgcgggacagcattctggtctggctcacagagatggatctgcagctcactaatattgaacatttttctgagtgtgatgttcaagctaaaataaagcaactcaaggccttccagcaggaaatttcactgaaccacaataagattgagcagataattgcccaaggagaacagctgatagaaaagagtgagcccttggatgcagcgatcatcgaggaggaactagatgagctccgacggtactgccaggaggtcttcgggcgtgtggaaagataccataagaaactgatccgcctgcctctcccagacgatgagcacgacctctcagacagggagctggagctggaagactctgcagctctgtcggacctgcactggcacgaccgctctgcagacagcctgctttctccacagccttcctccaatctctccctctcgctcgctcagcccctccggagcgagcggtcaggacgagacaccccggctagtgtggactccatccccctggagtgggatcacgactatgacctcagtcgggacctggagtctgcaatgtccagagctctgccctctgaggatgaagaaggtcaggatgacaaagatttctacctccggggagctgttggcttatcagatgtaatgatccccgaaagccctgaggcctatgtaaaactcacagaaaatgcaatcaaaaatacctccggggaccacagtgccctagagtcacagatccgacaactgggcaaagccctggatgatagccgttttcagatacagcaaaccgaaaatatcattcgcagcaaaactcccacggggccggagctagacaccagctacaaaggctacatgaaactgctgggcgaatgcagtagcagtatagactccgtgaagagactggagcacaaactgaaggaggaagaggagagccttcctggctttgttaacctgcatagtaccgaaacccaaacggctggtgtgattgaccgatgggagcttctccaggcccaggcattgagcaaggagttgaggatgaagcagaacctccagaagtggcagcagtttaactcagacttgaacagcatctgggcctggctgggggacacggaggaggagttggaacagctccagcgtctggaactcagcactgacatccagaccatcgagctccagatcaaaaagctcaaggagctccagaaagctgtggaccaccgcaaagccatcatcctctccatcaatctctgcagccctgagttcacccaggctgacagcaaggagagccgggacctgcaggatcgcttgtcgcagatgaatgggcgctgggaccgagtgtgctctctgctggaggagtggcggggcctgctgcaggatgccctgatgcagtgccagggtttccatgaaatgagccatggtttgcttcttatgctggagaacattgacagaaggaaaaatgaaattgtccctattgattctaaccttgatgcagagatacttcaggaccatcacaaacagcttatgcaaataaagcatgagctgttggaatcccaactcagagtagcctctttgcaagacatgtcttgccaactactggtgaatgctgaaggaacagactgtttagaagccaaagaaaaagtccatgttattggaaatcggctcaaacttctcttgaaggaggtcagtcgtcatatcaaggaactggagaagttattagacgtgtcaagtagtcagcaggatttgtcttcctggtcttctgctgatgaactggacacctcagggtctgtgagtcccacatcaggaaggagcaccccaaacagacagaaaacgccacgaggcaagtgtagtctctcacagcctggaccctctgtcagcagtccacatagcaggtccacaaaaggtggctccgattcctccctttctgagccagggccaggtcggtccggccgcggcttcctgttcagagtcctccgagcagctcttccccttcagcttctcctgctcctcctcatcgggcttgcctgccttgtaccaatgtcagaggaagactacagctgtgccctctccaacaactttgcccggtcattccaccccatgctcagatacacgaatggccctcctccactctgaactaagcagatgccatctgcagaagtgctggtagcataaggaggatcgggtcataagcaatcccaaactaccaacaagaggaccttgatcttggcgaaagccctcggtgtggcagctttagccctcctccagatcacatgtgtgcaaattatggcttcagaggtggaagataaacagtgacgggggaacaaacagacaacaagaaggtttggaagaaatctggtttgagactctgaaccttagcactaaggagattgagtaaggacctccaaagttccccggactcatgaattctgggcccttggcccattctgtgcacagccaaggacttcagtagaccatctgggcagctttcccatggtgctgctccaaccatcagataaatgaccctcccaagcaccatgtcagtgtcgtacaatctaccaaccaaccagtgctgaagagattttagaaccttgtaacatacaatttttaagagcttatatggcagcttcctttttaccttgttttcctttggggcatgatgttttaacctttgctttagaagcacaagctgtaaatctaaaaggcacttttttttagaggtataaagaaaaactagatgtaataaataagatcatggaaggctttatgtgaaaaaagttgaatgttatagtaaaaaaaaaaagatatttatgt

SEQ ID NO: 6440 - protein, 982 aa, Homo sapiens; identical to SEQ ID NO: 6432

SEQ ID NO: 6441 - DNA, 5769 bp, Homo sapiens
ctgaaatcagtgcttgaccaatggagtagtcacaaagtggcctttgacaagataaacagttacctcatggaggccagatactctctttcccgattccgtctgctgactggctccttagaagctgtgcaagttcaggtggacaatcttcagaatctccaagatgatctggaaaaacaggaaaggagcttacagaaatttggctctatcaccaaccaattattaaaagagtgtcacccacccgtgacagaaactcttaccaatacactgaaagaagtcaacatgagatggaataacttgctggaagagattgctgagcagctacagtccagcaaggccctacttcagctttggcaaagatacaaggactactccaaacagtgtgcttcgacagttcagcagcaggaggatcgaaccaatgagctgttgaaggcagccacaaacaaggacattgccgatgatgaggttgccacatggattcaagattgcaacgacctcctcaaaggactgggcacagttaaagattccctcttttttctccatgagctgggagagcaactgaagcaacaagtggatgcttccgcagcatcagctattcaatcggatcaactctctttgagtcaacacttgtgtgccctggagcaagctctctgcaaacagcagacttcattacaggctggagttcttgattatgaaacctttgccaagagtttagaagctttggaggcctggatagtggaagctgaagaaatactacaagggcaggaccctagccactcatctgacctctccacaatccaggaaaggatggaagaacttaagggacagatgttaaaattcagcagcatggctccagatttagaccgtctaaatgagcttggatataggttacccttgaatgataaggaaatcaaaagaatgcagaatctgaaccgccattggtctctgatctcctctcagactacagaaagattcagcaagttgcagtcatttttgctacaacatcagactttcttggaaaaatgtgaaacatggatggaattcctagttcagacagaacaaaagttagcagtagagatttcaggaaattatcagcaccttttggaacagcagagagcacacgagttgtttcaagccgagatgttcagtcgtcagcagattttgcactcaatcattattgatgggcaacgtcttctagaacaaggtcaagttgatgacagggatgaattcaacctgaaattgacactcctcagtaatcaatggcagggagtgattcgcagggcccagcagaggcgggggatcattgacagccagattcgccagtggcagcgctatagggagatggcagaaaagcttcgtaaatggttggttgaagtgtcctacctccccatgagtggtctcggaagtgttcctataccactgcaacaagcaaggaccctctttgatgaagtgcagttcaaagaaaaagtgtttctgcggcaacaaggcagctacatcctgactgtggaggctggcaagcaactccttctctcggcggacagtggcgctgaggccgccttgcaggccgaactcgctgaaatccaagagaaatggaaatcagccagcatgcggctggaagaacagaagaaaaaactagccttcttgttgaaagactgggaaaaatgtgagaaaggaatagcagattccctggagaaactacgaactttcaaaaagaagctttcgcagtctctcccggatcaccatgaagagctccatgcagaacaaatgcgttgcaaggaattagaaaatgcagttgggagctggacagatgacttgacccagttgagcctgctgaaggacaccctctctgcctatatcagtgctgatgatatctccattcttaatgaacgcgtagagcttctgcaaaggcagtgggaagaactatgccaccagctctccttaaggcggcagcaaataggtgaaagattgaatgaatgggcagtcttcagtgaaaagaacaaggaactctgtgagtggttgactcaaatggaaagcaaagtttctcagaatggagacattctcattgaagaaatgatagagaagctcaagaaggattatcaagaggaaattgctattgctcaagagaacaaaatacagctccaacaaatgggagaacgacttgctaaagccagccatgaaagcaaagcatctgagattgaatacaagctgggaaaggtcaacgaccggtggcagcatctcctggacctcattgcagccagggtgaagaagctgaaggagaccctggtagccgtgcagcagcttgataagaacatgagcagcctgaggacctggctcgctcacatcgagtcagagctggccaagccaatagtctacgattcctgtaactcggaagaaatacagagaaagcttaatgagcagcaggagcttcagagagacatagagaagcacagtacaggtgttgcatctgtcctcaacctgtgtgaagtcctgctgcacgactgtgacgcctgtgccactgatgccgagtgtgactctatacagcaggctacgagaaacctggaccggcggtggagaaacatttgtgctatgtccatggaaaggaggctgaaaatcgaagagacgtggcgattgtggcagaaatttctggatgactattcacgttttgaagattggctgaagtcttcagaaaggacagctgcttttcccagctcttctggggtgatctatacagttgccaaggaagaactaaagaaatttgaggctttccagcgacaggtccacgagtgcctgacgcagctggaactgatcaacaagcagtaccgccgcctggccagggagaaccgcactgattcagcatgtagcctcaaacagatggttcacgaaggcaaccagagatgggacaacctgcaaaagcgtgtcacctccatcttgcgcagactcaagcattttattggccagcgtgaggagtttgagactgcgcgggacagcattctggtctggctcacagagatggatctgcagctcactaatattgaacatttttctgagtgtgatgttcaagctaaaataaagcaactcaaggccttccagcaggaaatttcactgaaccacaataagattgagcagataattgcccaaggagaacagctgatagaaaagagtgagcccttggatgcagcgatcatcgaggaggaactagatgagctccgacggtactgccaggaggtcttcgggcgtgtggaaagataccataagaaactgatccgcctgcctctcccagacgatgagcacgacctctcagacagggagctggagctggaagactctgcagctctgtcggacctgcactggcacgaccgctctgcagacagcctgctttctccacagccttcctccaatctctccctctcgctcgctcagcccctccggagcgagcggtcaggacgagacaccccggctagtgtggactccatccccctggagtgggatcacgactatgacctcagtcgggacctggagtctgcaatgtccagagctctgccctctgaggatgaagaaggtcaggatgacaaagatttctacctccggggagctgttggcttatcagatgtaatgatccccgaaagccctgaggcctatgtaaaactcacagaaaatgcaatcaaaaatacctccggggaccacagtgccctagagtcacagatccgacaactgggcaaagccctggatgatagccgttttcagatacagcaaaccgaaaatatcattcgcagcaaaactcccacggggccggagctagacaccagctacaaaggctacatgaaactgctgggcgaatgcagtagcagtatagactccgtgaagagactggagcacaaactgaaggaggaagaggagagccttcctggctttgttaacctgcatagtaccgaaacccaaacggctggtgtgattgaccgatgggagcttctccaggcccaggcattgagcaaggagttgaggatgaagcagaacctccagaagtggcagcagtttaactcagacttgaacagcatctgggcctggctgggggacacggaggaggagttggaacagctccagcgtctggaactcagcactgacatccagaccatcgagctccagatcaaaaagctcaaggagctccagaaagctgtggaccaccgcaaagccatcatcctctccatcaatctctgcagccctgagttcacccaggctgacagcaaggagagccgggacctgcaggatcgcttgtcgcagatgaatgggcgctgggaccgagtgtgctctctgctggaggagtggcggggcctgctgcaggatgccctgatgcagtgccagggtttccatgaaatgagccatggtttgcttcttatgctggagaacattgacagaaggaaaaatgaaattgtccctattgattctaaccttgatgcagagatacttcaggaccatcacaaacagcttatgcaaataaagcatgagctgttggaatcccaactcagagtagcctctttgcaagacatgtcttgccaactactggtgaatgctgaaggaacagactgtttagaagccaaagaaaaagtccatgttattggaaatcggctcaaacttctcttgaaggaggtcagtcgtcatatcaaggaactggagaagttattagacgtgtcaagtagtcagcaggatttgtcttcctggtcttctgctgatgaactggacacctcagggtctgtgagtcccacatcaggaaggagcaccccaaacagacagaaaacgccacgaggcaagtgtagtctctcacagcctggaccctctgtcagcagtccacatagcaggtccacaaaaggtggctccgattcctccctttctgagccagggccaggtcggtccggccgcggcttcctgttcagagtcctccgagcagctcttccccttcagcttctcctgctcctcctcatcgggcttgcctgccttgtaccaatgtcagaggaagactacagctgtgccctctccaacaactttgcccggtcattccaccccatgctcagatacacgaatggccctcctccactctgaactaagcagatgccatctgcagaagtgctggtagcataaggaggatcgggtcataagcaatcccaaactaccaacaagaggaccttgatcttggcgaaagccctcggtgtggcagctttagccctcctccagatcacatgtgtgcaaattatggcttcagaggtggaagataaacagtgacgggggaacaaacagacaacaagaaggtttggaagaaatctggtttgagactctgaaccttagcactaaggagattgagtaaggacctccaaagttccccggactcatgaattctgggcccttggcccattctgtgcacagccaaggacttcagtagaccatctgggcagctttcccatggtgctgctccaaccatcagataaatgaccctcccaagcaccatgtcagtgtcgtacaatctaccaaccaaccagtgctgaagagattttagaaccttgtaacatacaatttttaagagcttatatggcagcttcctttttaccttgttttcctttggggcatgatgttttaacctttgctttagaagcacaagctgtaaatctaaaaggcacttttttttagaggtataaagaaaaactagatgtaataaataagatcatggaaggctttatgtgaaaaaagttgaatgttatagtaaaaaaaaaaagatatttatgt

SEQ ID NO: 6442 - protein, 1674 aa, Homo sapiens
MEARYSLSRFRLLTGSLEAVQVQVDNLQNLQDDLEKQERSLQKFGSITNQLLKECHPPVTETLTNTLKEVNMRWNNLLEEIAEQLQSSKALLQLWQRYKDYSKQCASTVQQQEDRTNELLKAATNKDIADDEVATWIQDCNDLLKGLGTVKDSLFFLHELGEQLKQQVDASAASAIQSDQLSLSQHLCALEQALCKQQTSLQAGVLDYETFAKSLEALEAWIVEAEEILQGQDPSHSSDLSTIQERMEELKGQMLKFSSMAPDLDRLNELGYRLPLNDKEIKRMQNLNRHWSLISSQTTERFSKLQSFLLQHQTFLEKCETWMEFLVQTEQKLAVEISGNYQHLLEQQRAHELFQAEMFSRQQILHSIIIDGQRLLEQGQVDDRDEFNLKLTLLSNQWQGVIRRAQQRRGIIDSQIRQWQRYREMAEKLRKWLVEVSYLPMSGLGSVPIPLQQARTLFDEVQFKEKVFLRQQGSYILTVEAGKQLLLSADSGAEAALQAELAEIQEKWKSASMRLEEQKKKLAFLLKDWEKCEKGIADSLEKLRTFKKKLSQSLPDHHEELHAEQMRCKELENAVGSWTDDLTQLSLLKDTLSAYISADDISILNERVELLQRQWEELCHQLSLRRQQIGERLNEWAVFSEKNKELCEWLTQMESKVSQNGDILIEEMIEKLKKDYQEEIAIAQENKIQLQQMGERLAKASHESKASEIEYKLGKVNDRWQHLLDLIAARVKKLKETLVAVQQLDKNMSSLRTWLAHIESELAKPIVYDSCNSEEIQRKLNEQQELQRDIEKHSTGVASVLNLCEVLLHDCDACATDAECDSIQQATRNLDRRWRNICAMSMERRLKIEETWRLWQKFLDDYSRFEDWLKSSERTAAFPSSSGVIYTVAKEELKKFEAFQRQVHECLTQLELINKQYRRLARENRTDSACSLKQMVHEGNQRWDNLQKRVTSILRRLKHFIGQREEFETARDSILVWLTEMDLQLTNIEHFSECDVQAKIKQLKAFQQEISLNHNKIEQIIAQGEQLIEKSEPLDAAIIEEELDELRRYCQEVFGRVERYHKKLIRLPLPDDEHDLSDRELELEDSAALSDLHWHDRSADSLLSPQPSSNLSLSLAQPLRSERSGRDTPASVDSIPLEWDHDYDLSRDLESAMSRALPSEDEEGQDDKDFYLRGAVGLSDVMIPESPEAYVKLTENAIKNTSGDHSALESQIRQLGKALDDSRFQIQQTENIIRSKTPTGPELDTSYKGYMKLLGECSSSIDSVKRLEHKLKEEEESLPGFVNLHSTETQTAGVIDRWELLQAQALSKELRMKQNLQKWQQFNSDLNSIWAWLGDTEEELEQLQRLELSTDIQTIELQIKKLKELQKAVDHRKAIILSINLCSPEFTQADSKESRDLQDRLSQMNGRWDRVCSLLEEWRGLLQDALMQCQGFHEMSHGLLLMLENIDRRKNEIVPIDSNLDAEILQDHHKQLMQIKHELLESQLRVASLQDMSCQLLVNAEGTDCLEAKEKVHVIGNRLKLLLKEVSRHIKELEKLLDVSSSQQDLSSWSSADELDTSGSVSPTSGRSTPNRQKTPRGKCSLSQPGPSVSSPHSRSTKGGSDSSLSEPGPGRSGRGFLFRVLRAALPLQLLLLLLIGLACLVPMSEEDYSCALSNNFARSFHPMLRYTNGPPPL

SEQ ID NO: 6443 - DNA, 10656 bp, Homo sapiens
tgttctcacgagggggcagcttgggcttgaccgagcaggagcttcatggtcccacacgtagtatgacatgtgacctctgcacattgtttacagttcctaaactgtgatttctttttctgtgaaatagttataatagtaagtggctaccaagtagaaagtggtcatggggggtgaaggttaaacacaataacggacacacagaacttacacagggcattttatgccaagctatattgaatatctatatccctctacctgcccgtcaatgtcatgaatattgacaattcactctagaccctgctagaagaatccaaagaaattgacagtgagctggaagcaatgactgagaaattacagtacctcactagcgtgtactgtacagaaaaaatgtctcagcaagtggcagaactgggacgggagactgaggagttgcgacagatgatcaaaattcgtttgcagaacctccaagatgcagctaaggatatgaaaaaatttgaagcagagttgaaaaagttacaagctgccttggagcaagcccaggcaacactgacttctccagaagttggacgtctcagtctcaaggagcagctctctcatcggcagcatttgttgtctgagatggagtcactgaagccgaaggtgcaagcagtgcagctctgccagagtgccctccggatccccgaggatgtggttgccagcttacctctctgtcatgctgctctgcggctgcaggaagaggccagccggctgcagcacaccgccatccagcagtgtaacatcatgcaggcagctgtggtacaatatgaacaatatgagcaagaaatgaaacatctccagcaactgatagaaggagctcacagagagattgaggataaacctgttgccaccagtaacatacaggagctgcaggctcagatttctcggcatgaggagctggcgcagaaaattaagggctaccaggagcagatcgcttctttgaattccaagtgcaagatgctgacgatgaaagccaagcacgccaccatgctgctgacggtgaccgaggtcgaggggctggcggaagggacagaggacctggatggggagctcctccccacgccttcggcccacccctctgtggtcatgatgactgcaggtcgctgtcacactttgctgtcaccggtcactgaggagtctggggaggagggaaccaacagtgagatttcctctccacctgcctgtcgctccccttcacctgtggctaatacagatgcttctgttaaccaggacattgcatattaccaagccttgtctgctgagaggttgcagacagatgctgcaaaaattcaccccagcacatccgcatcccaggagttctatgaaccgggattggagccatccgctactgccaaactgggtgatttgcagcgttcttgggaaaccttaaagaatgtgatcagtgagaagcagcgcacactctatgaagctttggaacgccagcagaagtaccaggactccctccagtccatctctacgaagatggaggccattgagctgaaactcagtgagagcccagagcctggcaggagtccagaaagccagatggctgaacatcaggcattgatggatgagattctcatgctccaggatgaaatcaatgagctccagtcctctctcgcagaggagctggtatccgagtcttgtgaggccgaccctgcggagcagctggccttgcagtccacgctcactgtcttagccgagcgaatgtccaccatcaggatgaaagcctcggggaaacggcagcttttggaggagaagttgaatgatcagctggaggaacaaaggcaggaacaggccctgcagaggtatcgctgtgaagccgatgagctggacagctggctcttgagtaccaaggccactctggacactgcgctgagtccacccaaggagcccatggacatggaggcccagcttatggactgccagaatatgctggtggaaatagagcagaaggtggtggctttatcagaactgtcagtccacaatgagaacctgctgctggagggcaaagctcacaccaaggacgaggccgagcagctggctggaaagctgagaaggctcaaggggagcctgctggagctgcagagagccctgcatgataagcagctcaacatgcagggaacagcacaggagaaggaggagagcgatgttgacctaacagccacgcagagccccggcgtccaggaatggctggcccaagctcgcaccacatggacccagcagcggcagagcagtctccagcaacaaaaagagttagaacaggaattagccgagcagaagagtctccttcgctcagtagccagtcgtggagaggagattctaattcaacattcggcggcagagacctctggtgatgctggcgaaaaacctgatgtgttatcccaggagttggggatggaaggggagaaatcatccgctgaagaccagatgagaatgaaatgggaaagcctacatcaagaatttagtaccaagcagaaactactacagaatgttctggaacaggaacaagagcaagtgctttatagcaggccaaatcgactcttgtctggtgtgccactgtacaaaggggacgtgccaacccaagataaatctgcagttacatctttgctggatggactgaaccaagccttcgaggaggtttcatcccagagtggaggggcaaagaggcagagtatacacttggagcagaagttgtatgatggagtctcagccacctctacttggttggatgacgttgaagaacgtttatttgttgccacagcacttttaccagaagaaacagagacttgtctcttcaaccaagagattcttgccaaagacattaaggaaatgtctgaagaaatggataagaacaaaaacttgttttcccaagcttttccagagaatggtgataatcgagatgttattgaagatactttgggttgtcttttgggcaggttatccttgctagactcagtagtgaatcaacgatgtcatcagatgaaagaaagacttcagcaaatactaaatttccagaatgatctgaaagtgctgtttacatcactggctgacaacaaatacatcattctgcaaaaactggcaaatgtgtttgaacagcccgtagcagaacaaatagaggcaatacaacaggctgaagatggactcaaagaatttgatgcaggaatcattgaattaaagaggcgtggtgacaagctacaggtcgagcagccgtccatgcaagaactctccaagctccaggacatgtatgatgagctgatgatgatcattggctcccggaggagtggtctgaatcagaaccttacactcaagagtcagtatgagagggccctacaagatctggctgacctgctagaaactggtcaggagaagatggcaggagaccagaaaatcatcgtgtcttccaaagaggaaatccagcaactacttgacaaacataaggaatactttcagggcctggaatctcatatgatcttgactgaaacactcttcagaaagataatcagctttgcagtccaaaaggaaacccagttccatacagagctgatggctcaggcttctgctgtactgaaacgggctcacaagaggggtgtggagctggagtacattctagagacgtggtcccatctggatgaggaccagcaggagctcagcagacagctggaggtggtggaaagcagcatcccaagcgtgggtctggtggaggagaacgaggacaggcttattgaccgcataacactctaccagcatttaaaatctagccttaatgaataccagcccaaattatatcaagtattagatgatgggaaacgacttctgatatccatcagctgctcagatctagaaagccaactaaatcaacttggagagtgctggctaagtaacaccaataaaatgtctaaggaacttcacagactggaaacaatattgaaacactggaccagatatcaaagtgaatctgcagatctaattcactggttacaatctgcaaaagaccggctagaattttggactcagcaatctgtgacagtcccacaagagctggaaatggtccgtgatcatctaaatgctttcctggagttttctaaagaagtggatgcccaatcttccctgaaatcatctgttctgagtactggaaatcagctccttcgactaaaaaaggtggacacagccacgctgcgctctgagctgtcgcgcattgatagccagtggactgacctgctaaccaatatcccagccgtccaggagaagctccaccagctccagatggataaactgccttcccgccatgccatttctgaagtcatgagttggatttctctaatggaaaatgttattcagaaggatgaagataatattaaaaattccataggttacaaggcaattcatgaataccttcagaaatataagggttttaagatagacattaactgtaaacagctgacagtggattttgtgaaccagtccgtgctacaaatcagcagtcaggatgtggaaagtaagcgtagtgataagactgattttgctgagcaacttggagcaatgaataaaagttggcaaattctgcaaggtctagtaactgagaagatccagctgttggaaggcttattggaatcttggtcagaatatgaaaataatgtacaatgtctgaaaacatggtttgaaacccaggaaaagagactaaaacaacagcatcgaattggagatcaggcttctgttcaaaatgcactgaaagactgtcaggatctggaagatttgattaaagcaaaagaaaaagaagtagagaaaattgagcagaatggacttgctttgattcagaacaagaaagaagacgtctctagcattgtcatgagcacactgcgagagctcggccaaacctgggcaaatttagatcacatggttggacaattaaagatactgctgaaatcagtgcttgaccaatggagtagtcacaaagtggcctttgacaagataaacagttacctcatggaggccagatactctctttcccgattccgtctgctgactggctccttagaagctgtgcaagttcaggtggacaatcttcagaatctccaagatgatctggaaaaacaggaaaggagcttacagaaatttggctctatcaccaaccaattattaaaagagtgtcacccacccgtgacagaaactcttaccaatacactgaaagaagtcaacatgagatggaataacttgctggaagagattgctgagcagctacagtccagcaaggccctacttcagctttggcaaagatacaaggactactccaaacagtgtgcttcgacagttcagcagcaggaggatcgaaccaatgagctgttgaaggcagccacaaacaaggacattgccgatgatgaggttgccacatggattcaagattgcaacgacctcctcaaaggactgggcacagttaaagattccctcttttttctccatgagctgggagagcaactgaagcaacaagtggatgcttccgcagcatcagctattcaatcggatcaactctctttgagtcaacacttgtgtgccctggagcaagctctctgcaaacagcagacttcattacaggctggagttcttgattatgaaacctttgccaagagtttagaagctttggaggcctggatagtggaagctgaagaaatactacaagggcaggaccctagccactcatctgacctctccacaatccaggaaaggatggaagaacttaagggacagatgttaaaattcagcagcatggctccagatttagaccgtctaaatgagcttggatataggttacccttgaatgataaggaaatcaaaagaatgcagaatctgaaccgccattggtctctgatctcctctcagactacagaaagattcagcaagttgcagtcatttttgctacaacatcagactttcttggaaaaatgtgaaacatggatggaattcctagttcagacagaacaaaagttagcagtagagatttcaggaaattatcagcaccttttggaacagcagagagcacacgagttgtttcaagccgagatgttcagtcgtcagcagattttgcactcaatcattattgatgggcaacgtcttctagaacaaggtcaagttgatgacagggatgaattcaacctgaaattgacactcctcagtaatcaatggcagggagtgattcgcagggcccagcagaggcgggggatcattgacagccagattcgccagtggcagcgctatagggagatggcagaaaagcttcgtaaatggttggttgaagtgtcctacctccccatgagtggtctcggaagtgttcctataccactgcaacaagcaaggaccctctttgatgaagtgcagttcaaagaaaaagtgtttctgcggcaacaaggcagctacatcctgactgtggaggctggcaagcaactccttctctcggcggacagtggcgctgaggccgccttgcaggccgaactcgctgaaatccaagagaaatggaaatcagccagcatgcggctggaagaacagaagaaaaaactagccttcttgttgaaagactgggaaaaatgtgagaaaggaatagcagattccctggagaaactacgaactttcaaaaagaagctttcgcagtctctcccggatcaccatgaagagctccatgcagaacaaatgcgttgcaaggaattagaaaatgcagttgggagctggacagatgacttgacccagttgagcctgctgaaggacaccctctctgcctatatcagtgctgatgatatctccattcttaatgaacgcgtagagcttctgcaaaggcagtgggaagaactatgccaccagctctccttaaggcggcagcaaataggtgaaagattgaatgaatgggcagtcttcagtgaaaagaacaaggaactctgtgagtggttgactcaaatggaaagcaaagtttctcagaatggagacattctcattgaagaaatgatagagaagctcaagaaggattatcaagaggaaattgctattgctcaagagaacaaaatacagctccaacaaatgggagaacgacttgctaaagccagccatgaaagcaaagcatctgagattgaatacaagctgggaaaggtcaacgaccggtggcagcatctcctggacctcattgcagccagggtgaagaagctgaaggagaccctggtagccgtgcagcagcttgataagaacatgagcagcctgaggacctggctcgctcacatcgagtcagagctggccaagccaatagtctacgattcctgtaactcggaagaaatacagagaaagcttaatgagcagcaggagcttcagagagacatagagaagcacagtacaggtgttgcatctgtcctcaacctgtgtgaagtcctgctgcacgactgtgacgcctgtgccactgatgccgagtgtgactctatacagcaggctacgagaaacctggaccggcggtggagaaacatttgtgctatgtccatggaaaggaggctgaaaatcgaagagacgtggcgattgtggcagaaatttctggatgactattcacgttttgaagattggctgaagtcttcagaaaggacagctgcttttcccagctcttctggggtgatctatacagttgccaaggaagaactaaagaaatttgaggctttccagcgacaggtccacgagtgcctgacgcagctggaactgatcaacaagcagtaccgccgcctggccagggagaaccgcactgattcagcatgtagcctcaaacagatggttcacgaaggcaaccagagatgggacaacctgcaaaagcgtgtcacctccatcttgcgcagactcaagcattttattggccagcgtgaggagtttgagactgcgcgggacagcattctggtctggctcacagagatggatctgcagctcactaatattgaacatttttctgagtgtgatgttcaagctaaaataaagcaactcaaggccttccagcaggaaatttcactgaaccacaataagattgagcagataattgcccaaggagaacagctgatagaaaagagtgagcccttggatgcagcgatcatcgaggaggaactagatgagctccgacggtactgccaggaggtcttcgggcgtgtggaaagataccataagaaactgatccgcctgcctctcccagacgatgagcacgacctctcagacagggagctggagctggaagactctgcagctctgtcggacctgcactggcacgaccgctctgcagacagcctgctttctccacagccttcctccaatctctccctctcgctcgctcagcccctccggagcgagcggtcaggacgagacaccccggctagtgtggactccatccccctggagtgggatcacgactatgacctcagtcgggacctggagtctgcaatgtccagagctctgccctctgaggatgaagaaggtcaggatgacaaagatttctacctccggggagctgttggcttatcaggggaccacagtgccctagagtcacagatccgacaactgggcaaagccctggatgatagccgttttcagatacagcaaaccgaaaatatcattcgcagcaaaactcccacggggccggagctagacaccagctacaaaggctacatgaaactgctgggcgaatgcagtagcagtatagactccgtgaagagactggagcacaaactgaaggaggaagaggagagccttcctggctttgttaacctgcatagtaccgaaacccaaacggctggtgtgattgaccgatgggagcttctccaggcccaggcattgagcaaggagttgaggatgaagcagaacctccagaagtggcagcagtttaactcagacttgaacagcatctgggcctggctgggggacacggaggaggagttggaacagctccagcgtctggaactcagcactgacatccagaccatcgagctccagatcaaaaagctcaaggagctccagaaagctgtggaccaccgcaaagccatcatcctctccatcaatctctgcagccctgagttcacccaggctgacagcaaggagagccgggacctgcaggatcgcttgtcgcagatgaatgggcgctgggaccgagtgtgctctctgctggaggagtggcggggcctgctgcaggatgccctgatgcagtgccagggtttccatgaaatgagccatggtttgcttcttatgctggagaacattgacagaaggaaaaatgaaattgtccctattgattctaaccttgatgcagagatacttcaggaccatcacaaacagcttatgcaaataaagcatgagctgttggaatcccaactcagagtagcctctttgcaagacatgtcttgccaactactggtgaatgctgaaggaacagactgtttagaagccaaagaaaaagtccatgttattggaaatcggctcaaacttctcttgaaggaggtcagtcgtcatatcaaggaactggagaagttattagacgtgtcaagtagtcagcaggatttgtcttcctggtcttctgctgatgaactggacacctcagggtctgtgagtcccacatcaggaaggagcaccccaaacagacagaaaacgccacgaggcaagtgtagtctctcacagcctggaccctctgtcagcagtccacatagcaggtccacaaaaggtggctccgattcctccctttctgagccagggccaggtcggtccggccgcggcttcctgttcagagtcctccgagcagctcttccccttcagcttctcctgctcctcctcatcgggcttgcctgccttgtaccaatgtcagaggaagactacagctgtgccctctccaacaactttgcccggtcattccaccccatgctcagatacacgaatggccctcctccactctgaactaagcagatgccatctgcagaagtgctggtagcataaggaggatcgggtcataagcaatcccaaactaccaacaagaggaccttgatcttggcgaaagccctcggtgtggcagctttagccctcctccagatcacatgtgtgcaaattatggcttcagaggtggaagataaacagtgacgggggaacaaacagacaacaagaaggtttggaagaaatctggtttgagactctgaaccttagcactaaggagattgagtaaggacctccaaagttccccggactcatgaattctgggcccttggcccattctgtgcacagccaaggacttcagtagaccatctgggcagctttcccatggtgctgctccaaccatcagataaatgaccctcccaagcaccatgtcagtgtcgtacaatctaccaaccaaccagtgctgaagagattttagaaccttgtaacatacaatttttaagagcttatatggcagcttcctttttaccttgttttcctttggggcatgatgttttaacctttgctttagaagcacaagctgtaaatctaaaaggcacttttttttagaggtataaagaaaaactagatgtaataaataagatcatggaaggctttatgtgaaaaaagttgaatgttatagtaaaaaaaaaaagatatttatgt

SEQ ID NO: 6444 - protein, 3212 aa, Homo sapiens; identical to SEQ ID NO: 6434

SEQ ID NO: 6445 - DNA, 10764 bp, Homo sapiens
caaaaatcagtctgatctcgggaaacctggagaaatttattttctgtactctaatgttctttcattttggtgaccatcaaggtgctgggagaggaattagatggctgtaattcaaagttaatggaattagatgcagcagtacagaaattcttggaacagaatggccaactgggtaagccactggccaagaagataggaaaactgactgaacttcaccagcagaccattagacaagctgagaatcggctctccaagctcaatcaggcagcatcacatttagaagaatacaatgaaatgcttgaattaattttgaagtggattgaaaaagctaaagtcttggctcatggaactattgcatggaattctgcaagccagcttcgggaacaatatattttgcatcagaccctgctagaagaatccaaagaaattgacagtgagctggaagcaatgactgagaaattacagtacctcactagcgtgtactgtacagaaaaaatgtctcagcaagtggcagaactgggacgggagactgaggagttgcgacagatgatcaaaattcgtttgcagaacctccaagatgcagctaaggatatgaaaaaatttgaagcagagttgaaaaagttacaagctgccttggagcaagcccaggcaacactgacttctccagaagttggacgtctcagtctcaaggagcagctctctcatcggcagcatttgttgtctgagatggagtcactgaagccgaaggtgcaagcagtgcagctctgccagagtgccctccggatccccgaggatgtggttgccagcttacctctctgtcatgctgctctgcggctgcaggaagaggccagccggctgcagcacaccgccatccagcagtgtaacatcatgcaggcagctgtggtacaatatgaacaatatgagcaagaaatgaaacatctccagcaactgatagaaggagctcacagagagattgaggataaacctgttgccaccagtaacatacaggagctgcaggctcagatttctcggcatgaggagctggcgcagaaaattaagggctaccaggagcagatcgcttctttgaattccaagtgcaagatgctgacgatgaaagccaagcacgccaccatgctgctgacggtgaccgaggtcgaggggctggcggaagggacagaggacctggatggggagctcctccccacgccttcggcccacccctctgtggtcatgatgactgcaggtcgctgtcacactttgctgtcaccggtcactgaggagtctggggaggagggaaccaacagtgagatttcctctccacctgcctgtcgctccccttcacctgtggctaatacagatgcttctgttaaccaggacattgcatattaccaagccttgtctgctgagaggttgcagacagatgctgcaaaaattcaccccagcacatccgcatcccaggagttctatgaaccgggattggagccatccgctactgccaaactgggtgatttgcagcgttcttgggaaaccttaaagaatgtgatcagtgagaagcagcgcacactctatgaagctttggaacgccagcagaagtaccaggactccctccagtccatctctacgaagatggaggccattgagctgaaactcagtgagagcccagagcctggcaggagtccagaaagccagatggctgaacatcaggcattgatggatgagattctcatgctccaggatgaaatcaatgagctccagtcctctctcgcagaggagctggtatccgagtcttgtgaggccgaccctgcggagcagctggccttgcagtccacgctcactgtcttagccgagcgaatgtccaccatcaggatgaaagcctcggggaaacggcagcttttggaggagaagttgaatgatcagctggaggaacaaaggcaggaacaggccctgcagaggtatcgctgtgaagccgatgagctggacagctggctcttgagtaccaaggccactctggacactgcgctgagtccacccaaggagcccatggacatggaggcccagcttatggactgccagaatatgctggtggaaatagagcagaaggtggtggctttatcagaactgtcagtccacaatgagaacctgctgctggagggcaaagctcacaccaaggacgaggccgagcagctggctggaaagctgagaaggctcaaggggagcctgctggagctgcagagagccctgcatgataagcagctcaacatgcagggaacagcacaggagaaggaggagagcgatgttgacctaacagccacgcagagccccggcgtccaggaatggctggcccaagctcgcaccacatggacccagcagcggcagagcagtctccagcaacaaaaagagttagaacaggaattagccgagcagaagagtctccttcgctcagtagccagtcgtggagaggagattctaattcaacattcggcggcagagacctctggtgatgctggcgaaaaacctgatgtgttatcccaggagttggggatggaaggggagaaatcatccgctgaagaccagatgagaatgaaatgggaaagcctacatcaagaatttagtaccaagcagaaactactacagaatgttctggaacaggaacaagagcaagtgctttatagcaggccaaatcgactcttgtctggtgtgccactgtacaaaggggacgtgccaacccaagataaatctgcagttacatctttgctggatggactgaaccaagccttcgaggaggtttcatcccagagtggaggggcaaagaggcagagtatacacttggagcagaagttgtatgatggagtctcagccacctctacttggttggatgacgttgaagaacgtttatttgttgccacagcacttttaccagaagaaacagagacttgtctcttcaaccaagagattcttgccaaagacattaaggaaatgtctgaagaaatggataagaacaaaaacttgttttcccaagcttttccagagaatggtgataatcgagatgttattgaagatactttgggttgtcttttgggcaggttatccttgctagactcagtagtgaatcaacgatgtcatcagatgaaagaaagacttcagcaaatactaaatttccagaatgatctgaaagtgctgtttacatcactggctgacaacaaatacatcattctgcaaaaactggcaaatgtgtttgaacagcccgtagcagaacaaatagaggcaatacaacaggctgaagatggactcaaagaatttgatgcaggaatcattgaattaaagaggcgtggtgacaagctacaggtcgagcagccgtccatgcaagaactctccaagctccaggacatgtatgatgagctgatgatgatcattggctcccggaggagtggtctgaatcagaaccttacactcaagagtcagtatgagagggccctacaagatctggctgacctgctagaaactggtcaggagaagatggcaggagaccagaaaatcatcgtgtcttccaaagaggaaatccagcaactacttgacaaacataaggaatactttcagggcctggaatctcatatgatcttgactgaaacactcttcagaaagataatcagctttgcagtccaaaaggaaacccagttccatacagagctgatggctcaggcttctgctgtactgaaacgggctcacaagaggggtgtggagctggagtacattctagagacgtggtcccatctggatgaggaccagcaggagctcagcagacagctggaggtggtggaaagcagcatcccaagcgtgggtctggtggaggagaacgaggacaggcttattgaccgcataacactctaccagcatttaaaatctagccttaatgaataccagcccaaattatatcaagtattagatgatgggaaacgacttctgatatccatcagctgctcagatctagaaagccaactaaatcaacttggagagtgctggctaagtaacaccaataaaatgtctaaggaacttcacagactggaaacaatattgaaacactggaccagatatcaaagtgaatctgcagatctaattcactggttacaatctgcaaaagaccggctagaattttggactcagcaatctgtgacagtcccacaagagctggaaatggtccgtgatcatctaaatgctttcctggagttttctaaagaagtggatgcccaatcttccctgaaatcatctgttctgagtactggaaatcagctccttcgactaaaaaaggtggacacagccacgctgcgctctgagctgtcgcgcattgatagccagtggactgacctgctaaccaatatcccagccgtccaggagaagctccaccagctccagatggataaactgccttcccgccatgccatttctgaagtcatgagttggatttctctaatggaaaatgttattcagaaggatgaagataatattaaaaattccataggttacaaggcaattcatgaataccttcagaaatataagggttttaagatagacattaactgtaaacagctgacagtggattttgtgaaccagtccgtgctacaaatcagcagtcaggatgtggaaagtaagcgtagtgataagactgattttgctgagcaacttggagcaatgaataaaagttggcaaattctgcaaggtctagtaactgagaagatccagctgttggaaggcttattggaatcttggtcagaatatgaaaataatgtacaatgtctgaaaacatggtttgaaacccaggaaaagagactaaaacaacagcatcgaattggagatcaggcttctgttcaaaatgcactgaaagactgtcaggatctggaagatttgattaaagcaaaagaaaaagaagtagagaaaattgagcagaatggacttgctttgattcagaacaagaaagaagacgtctctagcattgtcatgagcacactgcgagagctcggccaaacctgggcaaatttagatcacatggttggacaattaaagatactgctgaaatcagtgcttgaccaatggagtagtcacaaagtggcctttgacaagataaacagttacctcatggaggccagatactctctttcccgattccgtctgctgactggctccttagaagctgtgcaagttcaggtggacaatcttcagaatctccaagatgatctggaaaaacaggaaaggagcttacagaaatttggctctatcaccaaccaattattaaaagagtgtcacccacccgtgacagaaactcttaccaatacactgaaagaagtcaacatgagatggaataacttgctggaagagattgctgagcagctacagtccagcaaggccctacttcagctttggcaaagatacaaggactactccaaacagtgtgcttcgacagttcagcagcaggaggatcgaaccaatgagctgttgaaggcagccacaaacaaggacattgccgatgatgaggttgccacatggattcaagattgcaacgacctcctcaaaggactgggcacagttaaagattccctcttttttctccatgagctgggagagcaactgaagcaacaagtggatgcttccgcagcatcagctattcaatcggatcaactctctttgagtcaacacttgtgtgccctggagcaagctctctgcaaacagcagacttcattacaggctggagttcttgattatgaaacctttgccaagagtttagaagctttggaggcctggatagtggaagctgaagaaatactacaagggcaggaccctagccactcatctgacctctccacaatccaggaaaggatggaagaacttaagggacagatgttaaaattcagcagcatggctccagatttagaccgtctaaatgagcttggatataggttacccttgaatgataaggaaatcaaaagaatgcagaatctgaaccgccattggtctctgatctcctctcagactacagaaagattcagcaagttgcagtcatttttgctacaacatcagactttcttggaaaaatgtgaaacatggatggaattcctagttcagacagaacaaaagttagcagtagagatttcaggaaattatcagcaccttttggaacagcagagagcacacgagttgtttcaagccgagatgttcagtcgtcagcagattttgcactcaatcattattgatgggcaacgtcttctagaacaaggtcaagttgatgacagggatgaattcaacctgaaattgacactcctcagtaatcaatggcagggagtgattcgcagggcccagcagaggcgggggatcattgacagccagattcgccagtggcagcgctatagggagatggcagaaaagcttcgtaaatggttggttgaagtgtcctacctccccatgagtggtctcggaagtgttcctataccactgcaacaagcaaggaccctctttgatgaagtgcagttcaaagaaaaagtgtttctgcggcaacaaggcagctacatcctgactgtggaggctggcaagcaactccttctctcggcggacagtggcgctgaggccgccttgcaggccgaactcgctgaaatccaagagaaatggaaatcagccagcatgcggctggaagaacagaagaaaaaactagccttcttgttgaaagactgggaaaaatgtgagaaaggaatagcagattccctggagaaactacgaactttcaaaaagaagctttcgcagtctctcccggatcaccatgaagagctccatgcagaacaaatgcgttgcaaggaattagaaaatgcagttgggagctggacagatgacttgacccagttgagcctgctgaaggacaccctctctgcctatatcagtgctgatgatatctccattcttaatgaacgcgtagagcttctgcaaaggcagtgggaagaactatgccaccagctctccttaaggcggcagcaaataggtgaaagattgaatgaatgggcagtcttcagtgaaaagaacaaggaactctgtgagtggttgactcaaatggaaagcaaagtttctcagaatggagacattctcattgaagaaatgatagagaagctcaagaaggattatcaagaggaaattgctattgctcaagagaacaaaatacagctccaacaaatgggagaacgacttgctaaagccagccatgaaagcaaagcatctgagattgaatacaagctgggaaaggtcaacgaccggtggcagcatctcctggacctcattgcagccagggtgaagaagctgaaggagaccctggtagccgtgcagcagcttgataagaacatgagcagcctgaggacctggctcgctcacatcgagtcagagctggccaagccaatagtctacgattcctgtaactcggaagaaatacagagaaagcttaatgagcagcaggagcttcagagagacatagagaagcacagtacaggtgttgcatctgtcctcaacctgtgtgaagtcctgctgcacgactgtgacgcctgtgccactgatgccgagtgtgactctatacagcaggctacgagaaacctggaccggcggtggagaaacatttgtgctatgtccatggaaaggaggctgaaaatcgaagagacgtggcgattgtggcagaaatttctggatgactattcacgttttgaagattggctgaagtcttcagaaaggacagctgcttttcccagctcttctggggtgatctatacagttgccaaggaagaactaaagaaatttgaggctttccagcgacaggtccacgagtgcctgacgcagctggaactgatcaacaagcagtaccgccgcctggccagggagaaccgcactgattcagcatgtagcctcaaacagatggttcacgaaggcaaccagagatgggacaacctgcaaaagcgtgtcacctccatcttgcgcagactcaagcattttattggccagcgtgaggagtttgagactgcgcgggacagcattctggtctggctcacagagatggatctgcagctcactaatattgaacatttttctgagtgtgatgttcaagctaaaataaagcaactcaaggccttccagcaggaaatttcactgaaccacaataagattgagcagataattgcccaaggagaacagctgatagaaaagagtgagcccttggatgcagcgatcatcgaggaggaactagatgagctccgacggtactgccaggaggtcttcgggcgtgtggaaagataccataagaaactgatccgcctgcctctcccagacgatgagcacgacctctcagacagggagctggagctggaagactctgcagctctgtcggacctgcactggcacgaccgctctgcagacagcctgctttctccacagccttcctccaatctctccctctcgctcgctcagcccctccggagcgagcggtcaggacgagacaccccggctagtgtggactccatccccctggagtgggatcacgactatgacctcagtcgggacctggagtctgcaatgtccagagctctgccctctgaggatgaagaaggtcaggatgacaaagatttctacctccggggagctgttggcttatcaggggaccacagtgccctagagtcacagatccgacaactgggcaaagccctggatgatagccgttttcagatacagcaaaccgaaaatatcattcgcagcaaaactcccacggggccggagctagacaccagctacaaaggctacatgaaactgctgggcgaatgcagtagcagtatagactccgtgaagagactggagcacaaactgaaggaggaagaggagagccttcctggctttgttaacctgcatagtaccgaaacccaaacggctggtgtgattgaccgatgggagcttctccaggcccaggcattgagcaaggagttgaggatgaagcagaacctccagaagtggcagcagtttaactcagacttgaacagcatctgggcctggctgggggacacggaggaggagttggaacagctccagcgtctggaactcagcactgacatccagaccatcgagctccagatcaaaaagctcaaggagctccagaaagctgtggaccaccgcaaagccatcatcctctccatcaatctctgcagccctgagttcacccaggctgacagcaaggagagccgggacctgcaggatcgcttgtcgcagatgaatgggcgctgggaccgagtgtgctctctgctggaggagtggcggggcctgctgcaggatgccctgatgcagtgccagggtttccatgaaatgagccatggtttgcttcttatgctggagaacattgacagaaggaaaaatgaaattgtccctattgattctaaccttgatgcagagatacttcaggaccatcacaaacagcttatgcaaataaagcatgagctgttggaatcccaactcagagtagcctctttgcaagacatgtcttgccaactactggtgaatgctgaaggaacagactgtttagaagccaaagaaaaagtccatgttattggaaatcggctcaaacttctcttgaaggaggtcagtcgtcatatcaaggaactggagaagttattagacgtgtcaagtagtcagcaggatttgtcttcctggtcttctgctgatgaactggacacctcagggtctgtgagtcccacatcaggaaggagcaccccaaacagacagaaaacgccacgaggcaagtgtagtctctcacagcctggaccctctgtcagcagtccacatagcaggtccacaaaaggtggctccgattcctccctttctgagccagggccaggtcggtccggccgcggcttcctgttcagagtcctccgagcagctcttccccttcagcttctcctgctcctcctcatcgggcttgcctgccttgtaccaatgtcagaggaagactacagctgtgccctctccaacaactttgcccggtcattccaccccatgctcagatacacgaatggccctcctccactctgaactaagcagatgccatctgcagaagtgctggtagcataaggaggatcgggtcataagcaatcccaaactaccaacaagaggaccttgatcttggcgaaagccctcggtgtggcagctttagccctcctccagatcacatgtgtgcaaattatggcttcagaggtggaagataaacagtgacgggggaacaaacagacaacaagaaggtttggaagaaatctggtttgagactctgaaccttagcactaaggagattgagtaaggacctccaaagttccccggactcatgaattctgggcccttggcccattctgtgcacagccaaggacttcagtagaccatctgggcagctttcccatggtgctgctccaaccatcagataaatgaccctcccaagcaccatgtcagtgtcgtacaatctaccaaccaaccagtgctgaagagattttagaaccttgtaacatacaatttttaagagcttatatggcagcttcctttttaccttgttttcctttggggcatgatgttttaacctttgctttagaagcacaagctgtaaatctaaaaggcacttttttttagaggtataaagaaaaactagatgtaataaataagatcatggaaggctttatgtgaaaaaagttgaatgttatagtaaaaaaaaaaagatatttatgt

SEQ ID NO: 6446 - protein, 3321 aa, Homo sapiens; identical to SEQ ID NO: 6436

SEQ ID NO: 6447 - DNA, 1927 bp, Homo sapiens
acggtccagtcgccagggggcgcgctagccggcgccgcggatccccgaactgcgcggcccgactcgagtccgccatattggatgccgcagccgctgctgccagcgcttcctcctctgtcttcgccgagcggggctggttcctgcggcccgagcggcggggaggtgaaacaggagcccgtcggaggaaggggcagaagggagtggagagtgtaggggaaggggctagagggagggggaccgaaacggagcggggcagagaagagaaggcgccgcggcccagcccctcccccgcccgccgccgacccgccccggcagcgcctctgttccctagaacggcgctccccccgccctagcggccatgccggtgccgctctgccgctgagggagcccttccccgccagcgcgtgcccttccactccgccccgaggtcgcagcggcccgctctcccgccagcgccccctcctcgcggccacgcagcagcccgcgtctcgctctccccacccagtgcagtggccgccgcctcttccgccgccgggctcggggcctccgcagcgacaacatggaggccgtgaagaccttcaatagcgagttgtattccctgaatgactataaaccacccatttcgaaagcgaaaatgacccaaattactaaggcagccatcaaagctattaagttctataaacatgtggtacagagtgttgagaagtttattcagaaatgtaaaccagaatacaaagtacctggactttatgttattgactccattgtgcgacaatcccgacatcagtttggtcaagaaaaggatgtgtttgcacccagatttagtaataacatcattagcactttccagaatttatatcgttgccctggggatgacaagagtaaaatagtgagagtactaaacttatggcagaagaataatgtatttaagagtgagattattcagccccttttggatatggcagccgggattccgcctccagttgtcacacctgttttggccagcactaccactgctatgagcaatactccaggaactcctgtgacacctgttactccggccaatgtggtccaaggcttacctgatccgtgggtatctcagataacaaatacagatacacttgcggctgtagctcagatcttgcaaagtcctcaaggccagcagcttcaacaattaatacaaaccttacagatacaacaacagaagccccagccttccattctgcaggccctagatgctggtcttgttgttcagttgcaagctcttacggcacaacttacagctgcagctgcagctgccaacactcttactcccttagaacagggagtctcctttaacaagaagttgatggataggtttgattttggggaagactctgagcatagtgaagaacccaaaaaggaaattccagcttcacaactttctcacgtttcagaatctgtgaacaattccatttttcatcagatagcagaacaactacaacagcaaaacctagaacatctcagacagcagctcttggagcagcaacagcctcaaaaggccactcctcaggatagtcaggaaggaacctttgggtcagagcattcagcgtcaccatcacaagggagtagtcagcagcattttcttgaacctgaagtcaatttggatgattccatagatattcagcaacaggatatggatatagatgaagggcaagatggagtggaagaggaggtctttgaacaagaagctaagaaagtggcggttcgctcaagatcaagaacacattcacgatctcgttcaagatcaccaagaaaacgaaggtctaggtcacggtctggctctagaaagcgtaaacacagaaagcgatcacgctcccgctcaagagaaagaaagaggaaatcatcacggtcgtattcaagtgaaaggagagccagagaaagggag

SEQ ID NO: 6448 - protein, 455 aa, Homo sapiens
MEAVKTFNSELYSLNDYKPPISKAKMTQITKAAIKAIKFYKHVVQSVEKFIQKCKPEYKVPGLYVIDSIVRQSRHQFGQEKDVFAPRFSNNIISTFQNLYRCPGDDKSKIVRVLNLWQKNNVFKSEIIQPLLDMAAGIPPPVVTPVLASTTTAMSNTPGTPVTPVTPANVVQGLPDPWVSQITNTDTLAAVAQILQSPQGQQLQQLIQTLQIQQQKPQPSILQALDAGLVVQLQALTAQLTAAAAAANTLTPLEQGVSFNKKLMDRFDFGEDSEHSEEPKKEIPASQLSHVSESVNNSIFHQIAEQLQQQNLEHLRQQLLEQQQPQKATPQDSQEGTFGSEHSASPSQGSSQQHFLEPEVNLDDSIDIQQQDMDIDEGQDGVEEEVFEQEAKKVAVRSRSRTHSRSRSRSPRKRRSRSRSGSRKRKHRKRSRSRSRERKRKSSRSYSSERRARER

SEQ ID NO: 6449 - DNA, 5041 bp, Homo sapiens
acggtccagtcgccagggggcgcgctagccggcgccgcggatccccgaactgcgcggcccgactcgagtccgccatattggatgccgcagccgctgctgccagcgcttcctcctctgtcttcgccgagcggggctggttcctgcggcccgagcggcggggaggtgaaacaggagcccgtcggaggaaggggcagaagggagtggagagtgtaggggaaggggctagagggagggggaccgaaacggagcggggcagagaagagaaggcgccgcggcccagcccctcccccgcccgccgccgacccgccccggcagcgcctctgttccctagaacggcgctccccccgccctagcggccatgccggtgccgctctgccgctgagggagcccttccccgccagcgcgtgcccttccactccgccccgaggtcgcagcggcccgctctcccgccagcgccccctcctcgcggccacgcagcagcccgcgtctcgctctccccacccagtgcagtggccgccgcctcttccgccgccgggctcggggcctccgcagcgacaacatggaggccgtgaagaccttcaatagcgagttgtattccctgaatgactataaaccacccatttcgaaagcgaaaatgacccaaattactaaggcagccatcaaagctattaagttctataaacatgtggtacagagtgttgagaagtttattcagaaatgtaaaccagaatacaaagtacctggactttatgttattgactccattgtgcgacaatcccgacatcagtttggtcaagaaaaggatgtgtttgcacccagatttagtaataacatcattagcactttccagaatttatatcgttgccctggggatgacaagagtaaaatagtgagagtactaaacttatggcagaagaataatgtatttaagagtgagattattcagccccttttggatatggcagccgggattccgcctccagttgtcacacctgttttggccagcactaccactgctatgagcaatactccaggaactcctgtgacacctgttactccggccaatgtggtccaaggcttacctgatccgtgggtatctcagataacaaatacagatacacttgcggctgtagctcagatcttgcaaagtcctcaaggccagcagcttcaacaattaatacaaaccttacagatacaacaacagaagccccagccttccattctgcaggccctagatgctggtcttgttgttcagttgcaagctcttacggcacaacttacagctgcagctgcagctgccaacactcttactcccttagaacagggagtctcctttaacaagaagttgatggataggtttgattttggggaagactctgagcatagtgaagaacccaaaaaggaaattccagcttcacaactttctcacgtttcagaatctgtgaacaattccatttttcatcagatagcagaacaactacaacagcaaaacctagaacatctcagacagcagctcttggagcagcaacagcctcaaaaggccactcctcaggatagtcaggaaggaacctttgggtcagagcattcagcgtcaccatcacaagggagtagtcagcagcattttcttgaacctgaagtcaatttggatgattccatagatattcagcaacaggatatggatatagatgaagggcaagatggagtggaagaggaggtctttgaacaagaagctaagaaagtggcggttcgctcaagatcaagaacacattcacgatctcgttcaagatcaccaagaaaacgaaggtctaggtcacggtctggctctagaaagcgtaaacacagaaagcgatcacgctcccgctcaagagaaagaaagaggaaatcatcacggtcgtattcaagtgaaaggagagccagagaaagggagaaagaacgacagaaaaagggattacctccaattagatctaaaacactaagtgtatgtagtactactctctgggttgggcaagtggacaagaaggcaacacagcaagacttaaccaacctgtttgaagagtttggacagattgaatccattaatatgattcctccccggggctgtgcttatgtctgcatggttcatcgacaagatgcatttcgagctcttcagaaactcagttctggatcatataaaattgggtccaaggtcattaagatcgcttgggctttaaacaaaggtgtaaaaacagaatacaaacaattctgggatgtggatcttggagttacatatataccatgggaaaaagttaaagtggatgacttggaaggttttgcagaaggaggcatgattgatcaggagactgtaaatactgagtgggaaactgtgaaaagctcagaacctgttaaagagacggtccagacaactcagagcccaactccagttgaaaaggagacagtggtcacaacccaggcagaggttttccctcctcctgttgctatgttgcagattccagtggcgccagccgtgcctacagttagtttagtcccaccagcatttcctgtgtcgatgccggttcctcctcctggattcagtccaatccctccacctccttttttaagagcaagttttaacccttcacaaccaccacctggtttcatgccgcctccagttcccccacctgttgtgccaccccctacgattccaccagtagtaccaacatctttagtgcagccgtcattatccatgacaccggaaactgtgaaagatgttggatttggtagccttgttataccaggcggttctgttgccagcaatcttgctacttccgctctgccagctggaaatgtttttaatgctccaactaaacaggcagagcctgaagaaaaagtacctcatcttatagaccaccagatttcttctggtgaaaacaccagatcagtgattccaaatgatatttcaagtaatgctgcaattttaggaggacagccgccaaatgtgacaagcaattctggaattctgggagtccaaagaccaaatgtatcaagtaattctgaaattcttggggtccggccatctaatgtttccagtagttctgggattattgcagcccaaccaccaaatattctaaataactctggaatattgggaatacagccacccagtgtgtcaaatagttctggacttttgggagtgctacccccaaatatacctaacaattctggacttgtaggagtacagccaccaaatgttccaaatactcctggacttctgggaacacagccaccagctggacctcaaaacttaccccctttaagtatccctaatcaaaggatgcccacaatgccaatgttagacattcgtccgggactaataccacaggcacctgggccaagattccctttaatacagcctggaattccaccccaacggggaatcccacccccatcggtacttgattcagctcttcatccaccaccccgtggaccttttcctccaggagatatttttagtcaaccagaaagaccttttttagctcctggaagacaaagcgtagacaatgttactaacccagaaaaaaggataccacttgggaatgataacattcaacaggaaggagatagagattaccggtttcctcctatagaaaccagggaaagcattagtagacctccccctgtggatgttagagatgtggttgggcggcctatagatccaagagaaggtcctggacggcctccactagatggtagggatcattttggaagacctcctgtagatataagagagaatcttgtgaggccaggtatagatcatcttggtcgaagagaccactttggctttaatccagagaagccctgggggcatagaggagattttgatgagagagagcatcgggttctaccggtctatggtggtccaaaaggcttacatgaagaaagaggtagatttcggtctggaaactatcgatttgatcctagaagtggtccttggaaccgaggatttggacaagaagttcacagagattttgatgaccgcagaagaccctgggagaggcaaagggatagggatgacagagattttgatttctgcagagaaatgaatggaaatcgtcttggacgagacagaattcaaaacacttgggttccccctcctcatgctcgggtttttgattattttgaaggggccacttctcaacgaaaaggtgataatgtgcctcaggttaatggtgaaaatacagagagacatgctcagccaccacctataccagtacagaatgatcctgaactttatgaaaaactgacatcttcaaatgaaataaacaaggagaagagtgacacagttgctgatatagaaagtgaaccagtggtagaaagcacagaaactgaggggacataatcatcactcagtaggtaaaagataccttttgtaaagttgtcatctctctgtaatagataatggctgactggaccatagttgttcacttttgtctgccagaattaagttaatctgatgttcatgttcacctttctcttaaaataattgtacaactgacttgtatagacattgttcttaatatgaacatggtaggtaaactttttttttatttttttctgataaaatacaaatgttggccccagattcttttaacgtcaaggaaatgaataacagcttgtcagagacttcctatggaagaaagaattttttagatactatcattaggttggatatggtaatagatatatttcagaatagcaagtggtggtatatcttatccatatctttaggctgctgcagaattttaaggttatagataaagctgtgatattttatgcaaagactggctctaggtatttgaggagcacaatacagagattttaaaaagtgattttgtaaaatctacactacggtctctgtttctccaaagtaagtgtttgtgatttgttcctcatactgcagtgagtaaaaaagaaacaagaaaacaacaacataaatattaaagtacgtttcaatgttgggtgaattttgtttttagatgccaataaaacttatttgtttgataac

SEQ ID NO: 6450 - protein, 1271 aa, Homo sapiens; identical to SEQ ID NO: 812

SEQ ID NO: 6451 - DNA, 5404 bp, Homo sapiens
acggtccagtcgccagggggcgcgctagccggcgccgcggatccccgaactgcgcggcccgactcgagtccgccatattggatgccgcagccgctgctgccagcgcttcctcctctgtcttcgccgagcggggctggttcctgcggcccgagcggcggggaggtgaaacaggagcccgtcggaggaaggggcagaagggagtggagagtgtaggggaaggggctagagggagggggaccgaaacggagcggggcagagaagagaaggcgccgcggcccagcccctcccccgcccgccgccgacccgccccggcagcgcctctgttccctagaacggcgctccccccgccctagcggccatgccggtgccgctctgccgctgagggagcccttccccgccagcgcgtgcccttccactccgccccgaggtcgcagcggcccgctctcccgccagcgccccctcctcgcggccacgcagcagcccgcgtctcgctctccccacccagtgcagtggccgccgcctcttccgccgccgggctcggggcctccgcagcgacaacatggaggccgtgaagaccttcaatagcgagttgtattccctgaatgactataaaccacccatttcgaaagcgaaaatgacccaaattactaaggcagccatcaaagctattaagttctataaacatgtggtacagagtgttgagaagtttattcagaaatgtaaaccagaatacaaagtacctggactttatgttattgactccattgtgcgacaatcccgacatcagtttggtcaagaaaaggatgtgtttgcacccagatttagtaataacatcattagcactttccagaatttatatcgttgccctggggatgacaagagtaaaatagtgagagtactaaacttatggcagaagaataatgtatttaagagtgagattattcagccccttttggatatggcagccgggattccgcctccagttgtcacacctgttttggccagcactaccactgctatgagcaatactccaggaactcctgtgacacctgttactccggccaatgtggtccaaggcttacctgatccgtgggtatctcagataacaaatacagatacacttgcggctgtagctcagatcttgcaaagtcctcaaggccagcagcttcaacaattaatacaaaccttacagatacaacaacagaagccccagccttccattctgcaggccctagatgctggtcttgttgttcagttgcaagctcttacggcacaacttacagctgcagctgcagctgccaacactcttactcccttagaacagggagtctcctttaacaagaagttgatggataggtttgattttggggaagactctgagcatagtgaagaacccaaaaaggaaattccagcttcacaactttctcacgtttcagaatctgtgaacaattccatttttcatcagatagcagaacaactacaacagcaaaacctagaacatctcagacagcagctcttggagcagcaacagcctcaaaaggccactcctcaggatagtcaggaaggaacctttgggtcagagcattcagcgtcaccatcacaagggagtagtcagcagcattttcttgaacctgaagtcaatttggatgattccatagatattcagcaacaggatatggatatagatgaagggcaagatggagtggaagaggaggtctttgaacaagaagctaagaaagtggcggttcgctcaagatcaagaacacattcacgatctcgttcaagatcaccaagaaaacgaaggtctaggtcacggtctggctctagaaagcgtaaacacagaaagcgatcacgctcccgctcaagagaaagaaagaggaaatcatcacggtcgtattcaagtgaaaggagagccagagaaagggagaaagaacgacagaaaaagggattacctccaattagatctaaaacactaagtgtatgtagtactactctctgggttgggcaagtggacaagaaggcaacacagcaagacttaaccaacctgtttgaagagtttggacagattgaatccattaatatgattcctccccggggctgtgcttatgtctgcatggttcatcgacaagatgcatttcgagctcttcagaaactcagttctggatcatataaaattgggtccaaggtcattaagatcgcttgggctttaaacaaaggtgtaaaaacagaatacaaacaattctgggatgtggatcttggagttacatatataccatgggaaaaagttaaagtggatgacttggaaggttttgcagaaggaggcatgattgatcaggagactgtaaatactgagtgggaaactgtgaaaagctcagaacctgttaaagagacggtccagacaactcagagcccaactccagttgaaaaggagacagtggtcacaacccaggcagaggttttccctcctcctgttgctatgttgcagattccagtggcgccagccgtgcctacagttagtttagtcccaccagcatttcctgtgtcgatgccggttcctcctcctggattcagtccaatccctccacctccttttttaagagcaagttttaacccttcacaaccaccacctggtttcatgccgcctccagttcccccacctgttgtgccaccccctacgattccaccagtagtaccaacatctttagtgcagccgtcattatccatgacaccggaaactgtgaaagatgttggatttggtagccttgttataccaggcggttctgttgccagcaatcttgctacttccgctctgccagctggaaatgtttttaatgctccaactaaacaggcagagcctgaagaaaaagtacctcatcttatagaccaccagatttcttctggtgaaaacaccagatcagtgattccaaatgatatttcaagtaatgctgcaattttaggaggacagccgccaaatgtgacaagcaattctggaattctgggagtccaaagaccaaatgtatcaagtaattctgaaattcttggggtccggccatctaatgtttccagtagttctgggattattgcagcccaaccaccaaatattctaaataactctggaatattgggaatacagccacccagtgtgtcaaatagttctggacttttgggagtgctacccccaaatatacctaacaattctggacttgtaggagtacagccaccaaatgttccaaatactcctggacttctgggaacacagccaccagctggacctcaaaacttaccccctttaagtatccctaatcaaaggatgcccacaatgccaatgttagacattcgtccgggactaataccacaggcacctgggccaagattccctttaatacagcctggaattccaccccaacggggaatcccacccccatcggtacttgattcagctcttcatccaccaccccgtggaccttttcctccaggagatatttttagtcaaccagaaagaccttttttagctcctggaagacaaagcgtagacaatgttactaacccagaaaaaaggataccacttgggaatgataacattcaacaggaaggagatagagattaccggtttcctcctatagaaaccagggaaagcattagtagacctccccctgtggatgttagagatgtggttgggcggcctatagatccaagagaaggtcctggacggcctccactagatggtagggatcattttggaagacctcctgtagatataagagagaatcttgtgaggccaggtatagatcatcttggtcgaagagaccactttggctttaatccagagaagccctgggggcatagaggagattttgatgagagagagcatcgggttctaccggtctatggtggtccaaaaggcttacatgaagaaagaggtagatttcggtctggaaactatcgatttgatcctagaagtggtccttggaaccgaggatttggacaagaagttcacagagattttgatgaccgcagaagaccctgggagaggcaaagggatagggatgacagagattttgatttctgcagagaaatgaatggaaatcgtcttggacgagacagaattcaaaacacttgggttccccctcctcatgctcgggtttttgattattttgaaggggccacttctcaacgaaaaggtgataatgtgcctcaggttaatggtgaaaatacagagagacatgctcagccaccacctataccagtacagaatgatcctgaactttatgaaaaactgacatcttcaaatgaaataaacaaggagaagagtgacacagttgctgatatagaaagtgaaccagtggtagaaagcacagaaactgaggggacataatcatcactcagtaggtaaaagataccttttgtaaagttgtcatctctctgtaatagataatggctgactggaccatagttgttcacttttgtctgccagaattaagttaatctgatgttcatgttcacctttctcttaaaataattgtacaactgacttgtatagacattgttcttaatatgaacatggtaggtaaactttttttttatttttttctgataaaatacaaatgttggccccagattcttttaacgtcaaggaaatgaataacagcttgtcagagacttcctatggaagaaagaattttttagatactatcattaggttggatatggtaatagatatatttcagaatagcaagtggtggtatatcttatccatatctttaggctgctgcagaattttaaggttatagataaagctgtgatattttatgcaaagactggctctaggtatttgaggagcacaatacagagattttaaaaagtgattttgtaaaatctacactacggtctctgtttctccaaagtaagtgtttgtgatttgttcctcatactgcagtgagtaaaaaagaaacaagaaaacaacaacataaatattaaagtacgtttcaatgttgggtgaattttgtttttagatgccaataaaacttatttgtttgataacagtgttctaggaattgtatttttttaacctataaattcttaaaaccttgaattattattagcatgtgcttattttttgcaaaagctttctatcataacaacaatgaactatgtggtggaaaaagcatgtactttgatataaaaatcatgcagcctcctcagtatgtgtataatatctgtgtatgtttattgtggaagtcgtgtagtttttttctgtttctctgtatgtccgtcttcatgcacatacagagaaaatagaaagttgaaaaagtttagataataaaatattcttttaaatctggtagaatattggagaaatctggctaattaacatgggttatagttaaagctcttggtcttgatg

SEQ ID NO: 6452 - protein, 1271 aa, Homo sapiens; identical to SEQ ID NO: 812

SEQ ID NO: 6453 - DNA, 4720 bp, Homo sapiens
ggcgccgcggatccccgaactgcgcggcccgactcgagtccgccatattggatgccgcagccgctgctgccagcgcttcctcctctgtcttcgccgagcggggctggttcctgcggcccgagcggcggggagcgccccctcctcgcggccacgcagcagcccgcgtctcgctctccccacccagtgcagtggccgccgcctcttccgccgccgggctcggggcctccgcagcgacaacatggaggccgtgaagaccttcaatagcgagttgtattccctgaatgactataaaccacccatttcgaaagcgaaaatgacccaaattactaaggcagccatcaaagctattaagttctataaacatgtggtacagagtgttgagaagtttattcagaaatgtaaaccagaatacaaagtacctggactttatgttattgactccattgtgcgacaatcccgacatcagtttggtcaagaaaaggatgtgtttgcacccagatttagtaataacatcattagcactttccagaatttatatcgttgccctggggatgacaagagtaaaatagtgagagtactaaacttatggcagaagaataatgtatttaagagtgagattattcagccccttttggatatggcagccgggattccgcctccagttgtcacacctgttttggccagcactaccactgctatgagcaatactccaggaactcctgtgacacctgttactccggccaatgtggtccaaggcttacctgatccgtgggtatctcagataacaaatacagatacacttgcggctgtagctcagatcttgcaaagtcctcaaggccagcagcttcaacaattaatacaaaccttacagatacaacaacagaagccccagccttccattctgcaggccctagatgctggtcttgttgttcagttgcaagctcttacggcacaacttacagctgcagctgcagctgccaacactcttactcccttagaacagggagtctcctttaacaagaagttgatggataggtttgattttggggaagactctgagcatagtgaagaacccaaaaaggaaattccagcttcacaactttctcacgtttcagaatctgtgaacaattccatttttcatcagatagcagaacaactacaacagcaaaacctagaacatctcagacagcagctcttggagcagcaacagcctcaaaaggccactcctcaggatagtcaggaaggaacctttgggtcagagcattcagcgtcaccatcacaagggagtagtcagcagcattttcttgaacctgaagtcaatttggatgattccatagatattcagcaacaggatatggatatagatgaagggcaagatggagtggaagaggaggtctttgaacaagaagctaagaaagtggcggttcgctcaagatcaagaacacattcacgatctcgttcaagatcaccaagaaaacgaaggtctaggtcacggtctggctctagaaagcgtaaacacagaaagcgatcacgctcccgctcaagagaaagaaagaggaaatcatcacggtcgtattcaagtgaaaggagagccagagaaagggagaaagaacgacagaaaaagggattacctccaattagatctaaaacactaagtgtatgtagtactactctctgggttgggcaagtggacaagaaggcaacacagcaagacttaaccaacctgtttgaagagtttggacagattgaatccattaatatgattcctccccggggctgtgcttatgtctgcatggttcatcgacaagatgcatttcgagctcttcagaaactcagttctggatcatataaaattgggtccaaggtcattaagatcgcttgggctttaaacaaaggtgtaaaaacagaatacaaacaattctgggatgtggatcttggagttacatatataccatgggaaaaagttaaagtggatgacttggaaggttttgcagaaggaggcatgattgatcaggagactgtaaatactgagtgggaaactgtgaaaagctcagaacctgttaaagagacggtccagacaactcagagcccaactccagttgaaaaggagacagtggtcacaacccaggcagaggttttccctcctcctgttgctatgttgcagattccagtggcgccagccgtgcctacagttagtttagtcccaccagcatttcctgtgtcgatgccggttcctcctcctggattcagtccaatccctccacctccttttttaagagcaagttttaacccttcacaaccaccacctggtttcatgccgcctccagttcccccacctgttgtgccaccccctacgattccaccagtagtaccaacatctttagtgcagccgtcattatccatgacaccggaaactgtgaaagatgttggatttggtagccttgttataccaggcggttctgttgccagcaatcttgctacttccgctctgccagctggaaatgtttttaatgctccaactaaacaggcagagcctgaagaaaaagtacctcatcttatagaccaccagatttcttctggtgaaaacaccagatcagtgattccaaatgatatttcaagtaatgctgcaattttaggaggacagccgccaaatgtgacaagcaattctggaattctgggagtccaaagaccaaatgtatcaagtaattctgaaattcttggggtccggccatctaatgtttccagtagttctgggattattgcagcccaaccaccaaatattctaaataactctggaatattgggaatacagccacccagtgtgtcaaatagttctggacttttgggagtgctacccccaaatatacctaacaattctggacttgtaggagtacagccaccaaatgttccaaatactcctggacttctgggaacacagccaccagctggacctcaaaacttaccccctttaagtatccctaatcaaaggatgcccacaatgccaatgttagacattcgtccgggactaataccacaggcacctgggccaagattccctttaatacagcctggaattccaccccaacggggaatcccacccccatcggtacttgattcagctcttcatccaccaccccgtggaccttttcctccaggagatatttttagtcaaccagaaagaccttttttagctcctggaagacaaagcgtagacaatgttactaacccagaaaaaaggataccacttgggaatgataacattcaacaggaaggagatagagattaccggtttcctcctatagaaaccagggaaagcattagtagacctccccctgtggatgttagagatgtggttgggcggcctatagatccaagagaaggtcctggacggcctccactagatggtagggatcattttggaagacctcctgtagatataagagagaatcttgtgaggccaggtatagatcatcttggtcgaagagaccactttggctttaatccagagaagccctgggggcatagaggagattttgatgagagagagcatcgggttctaccggtctatggtggtccaaaaggcttacatgaagaaagaggtagatttcggtctggaaactatcgatttgatcctagaagtggtccttggaaccgaggatttggacaagaagttcacagagattttgatgaccgcagaagaccctgggagaggcaaagggatagggatgacagagattttgatttctgcagagaaatgaatggaaatcgtcttggacgagacagaattcaaaacacttgggttccccctcctcatgctcgggtttttgattattttgaaggggccacttctcaacgaaaaggtgataatgtgcctcaggttaatggtgaaaatacagagagacatgctcagccaccacctataccagtacagaatgatcctgaactttatgaaaaactgacatcttcaaatgaaataaacaaggagaagagtgacacagttgctgatatagaaagtgaaccagtggtagaaagcacagaaactgaggggacataatcatcactcagtaggtaaaagataccttttgtaaagttgtcatctctctgtaatagataatggctgactggaccatagttgttcacttttgtctgccagaattaagttaatctgatgttcatgttcacctttctcttaaaataattgtacaactgacttgtatagacattgttcttaatatgaacatggtaggtaaactttttttttatttttttctgataaaatacaaatgttggccccagattcttttaacgtcaaggaaatgaataacagcttgtcagagacttcctatggaagaaagaattttttagatactatcattaggttggatatggtaatagatatatttcagaatagcaagtggtggtatatcttatccatatctttaggctgctgcagaattttaaggttatagataaagctgtgatattttatgcaaagactggctctaggtatttgaggagcacaatacagagattttaaaaagtgattttgtaaaatctacactacggtctctgtttctccaaagtaagtgtttgtgatttgttcctcatactgcagtgagtaaaaaagaaacaagaaaacaacaacataaatattaaagtacgtttcaatgttgggtgaattttgtttttagatgccaataaaacttatttgtttgataac

SEQ ID NO: 6454 - protein, 1271 aa, Homo sapiens; identical to SEQ ID NO: 812

SEQ ID NO: 6455 - DNA, 5083 bp, Homo sapiens
ggcgccgcggatccccgaactgcgcggcccgactcgagtccgccatattggatgccgcagccgctgctgccagcgcttcctcctctgtcttcgccgagcggggctggttcctgcggcccgagcggcggggagcgccccctcctcgcggccacgcagcagcccgcgtctcgctctccccacccagtgcagtggccgccgcctcttccgccgccgggctcggggcctccgcagcgacaacatggaggccgtgaagaccttcaatagcgagttgtattccctgaatgactataaaccacccatttcgaaagcgaaaatgacccaaattactaaggcagccatcaaagctattaagttctataaacatgtggtacagagtgttgagaagtttattcagaaatgtaaaccagaatacaaagtacctggactttatgttattgactccattgtgcgacaatcccgacatcagtttggtcaagaaaaggatgtgtttgcacccagatttagtaataacatcattagcactttccagaatttatatcgttgccctggggatgacaagagtaaaatagtgagagtactaaacttatggcagaagaataatgtatttaagagtgagattattcagccccttttggatatggcagccgggattccgcctccagttgtcacacctgttttggccagcactaccactgctatgagcaatactccaggaactcctgtgacacctgttactccggccaatgtggtccaaggcttacctgatccgtgggtatctcagataacaaatacagatacacttgcggctgtagctcagatcttgcaaagtcctcaaggccagcagcttcaacaattaatacaaaccttacagatacaacaacagaagccccagccttccattctgcaggccctagatgctggtcttgttgttcagttgcaagctcttacggcacaacttacagctgcagctgcagctgccaacactcttactcccttagaacagggagtctcctttaacaagaagttgatggataggtttgattttggggaagactctgagcatagtgaagaacccaaaaaggaaattccagcttcacaactttctcacgtttcagaatctgtgaacaattccatttttcatcagatagcagaacaactacaacagcaaaacctagaacatctcagacagcagctcttggagcagcaacagcctcaaaaggccactcctcaggatagtcaggaaggaacctttgggtcagagcattcagcgtcaccatcacaagggagtagtcagcagcattttcttgaacctgaagtcaatttggatgattccatagatattcagcaacaggatatggatatagatgaagggcaagatggagtggaagaggaggtctttgaacaagaagctaagaaagtggcggttcgctcaagatcaagaacacattcacgatctcgttcaagatcaccaagaaaacgaaggtctaggtcacggtctggctctagaaagcgtaaacacagaaagcgatcacgctcccgctcaagagaaagaaagaggaaatcatcacggtcgtattcaagtgaaaggagagccagagaaagggagaaagaacgacagaaaaagggattacctccaattagatctaaaacactaagtgtatgtagtactactctctgggttgggcaagtggacaagaaggcaacacagcaagacttaaccaacctgtttgaagagtttggacagattgaatccattaatatgattcctccccggggctgtgcttatgtctgcatggttcatcgacaagatgcatttcgagctcttcagaaactcagttctggatcatataaaattgggtccaaggtcattaagatcgcttgggctttaaacaaaggtgtaaaaacagaatacaaacaattctgggatgtggatcttggagttacatatataccatgggaaaaagttaaagtggatgacttggaaggttttgcagaaggaggcatgattgatcaggagactgtaaatactgagtgggaaactgtgaaaagctcagaacctgttaaagagacggtccagacaactcagagcccaactccagttgaaaaggagacagtggtcacaacccaggcagaggttttccctcctcctgttgctatgttgcagattccagtggcgccagccgtgcctacagttagtttagtcccaccagcatttcctgtgtcgatgccggttcctcctcctggattcagtccaatccctccacctccttttttaagagcaagttttaacccttcacaaccaccacctggtttcatgccgcctccagttcccccacctgttgtgccaccccctacgattccaccagtagtaccaacatctttagtgcagccgtcattatccatgacaccggaaactgtgaaagatgttggatttggtagccttgttataccaggcggttctgttgccagcaatcttgctacttccgctctgccagctggaaatgtttttaatgctccaactaaacaggcagagcctgaagaaaaagtacctcatcttatagaccaccagatttcttctggtgaaaacaccagatcagtgattccaaatgatatttcaagtaatgctgcaattttaggaggacagccgccaaatgtgacaagcaattctggaattctgggagtccaaagaccaaatgtatcaagtaattctgaaattcttggggtccggccatctaatgtttccagtagttctgggattattgcagcccaaccaccaaatattctaaataactctggaatattgggaatacagccacccagtgtgtcaaatagttctggacttttgggagtgctacccccaaatatacctaacaattctggacttgtaggagtacagccaccaaatgttccaaatactcctggacttctgggaacacagccaccagctggacctcaaaacttaccccctttaagtatccctaatcaaaggatgcccacaatgccaatgttagacattcgtccgggactaataccacaggcacctgggccaagattccctttaatacagcctggaattccaccccaacggggaatcccacccccatcggtacttgattcagctcttcatccaccaccccgtggaccttttcctccaggagatatttttagtcaaccagaaagaccttttttagctcctggaagacaaagcgtagacaatgttactaacccagaaaaaaggataccacttgggaatgataacattcaacaggaaggagatagagattaccggtttcctcctatagaaaccagggaaagcattagtagacctccccctgtggatgttagagatgtggttgggcggcctatagatccaagagaaggtcctggacggcctccactagatggtagggatcattttggaagacctcctgtagatataagagagaatcttgtgaggccaggtatagatcatcttggtcgaagagaccactttggctttaatccagagaagccctgggggcatagaggagattttgatgagagagagcatcgggttctaccggtctatggtggtccaaaaggcttacatgaagaaagaggtagatttcggtctggaaactatcgatttgatcctagaagtggtccttggaaccgaggatttggacaagaagttcacagagattttgatgaccgcagaagaccctgggagaggcaaagggatagggatgacagagattttgatttctgcagagaaatgaatggaaatcgtcttggacgagacagaattcaaaacacttgggttccccctcctcatgctcgggtttttgattattttgaaggggccacttctcaacgaaaaggtgataatgtgcctcaggttaatggtgaaaatacagagagacatgctcagccaccacctataccagtacagaatgatcctgaactttatgaaaaactgacatcttcaaatgaaataaacaaggagaagagtgacacagttgctgatatagaaagtgaaccagtggtagaaagcacagaaactgaggggacataatcatcactcagtaggtaaaagataccttttgtaaagttgtcatctctctgtaatagataatggctgactggaccatagttgttcacttttgtctgccagaattaagttaatctgatgttcatgttcacctttctcttaaaataattgtacaactgacttgtatagacattgttcttaatatgaacatggtaggtaaactttttttttatttttttctgataaaatacaaatgttggccccagattcttttaacgtcaaggaaatgaataacagcttgtcagagacttcctatggaagaaagaattttttagatactatcattaggttggatatggtaatagatatatttcagaatagcaagtggtggtatatcttatccatatctttaggctgctgcagaattttaaggttatagataaagctgtgatattttatgcaaagactggctctaggtatttgaggagcacaatacagagattttaaaaagtgattttgtaaaatctacactacggtctctgtttctccaaagtaagtgtttgtgatttgttcctcatactgcagtgagtaaaaaagaaacaagaaaacaacaacataaatattaaagtacgtttcaatgttgggtgaattttgtttttagatgccaataaaacttatttgtttgataacagtgttctaggaattgtatttttttaacctataaattcttaaaaccttgaattattattagcatgtgcttattttttgcaaaagctttctatcataacaacaatgaactatgtggtggaaaaagcatgtactttgatataaaaatcatgcagcctcctcagtatgtgtataatatctgtgtatgtttattgtggaagtcgtgtagtttttttctgtttctctgtatgtccgtcttcatgcacatacagagaaaatagaaagttgaaaaagtttagataataaaatattcttttaaatctggtagaatattggagaaatctggctaattaacatgggttatagttaaagctcttggtcttgatg

SEQ ID NO: 6456 - protein, 1271 aa, Homo sapiens; identical to SEQ ID NO: 812

SEQ ID NO: 6457 - DNA, 692 bp, Homo sapiens
attcatgtgagaggcaatctctattacaaggacatcggtgtgcaggcatttttcaataatttgccatacaactctatctgagcatcatcagacgcactacattgaaagaatcccggattttatgcaaagctatcttcattgggttttattttgctgctttttttcctggaggaggggcccggtggaaggaggttgacagctgcagaggcagtgactcagtgaaaagtggagagttccagagtcccagatgaagttttgcagaaaaagaacacctgttaccaaaagtgccacgccatcacataaaatgcctcatcagaatgtatcagccactgcagctctgagaggctgatggagcacgacctcataaaaggcttgaaatgaagcttaaagtaaatccctgttggtggaagaggacccaacttggaagtcagccaccatgttgtgaggaagcccaagccacatggaagggtcgctgcaggtgtgccagcccagagtctcagctgaggcctcagaagacagccaacatctactgtgatgacgcccagatcataccagtccccagaggtcaagttatctcaacctacaggtcgttccagatgataacccagtaattttgcaacaaaggcaagccagctcctatgttctgcttatatgcctgacccacagagtccacgagcataatgcaatatttg

SEQ ID NO: 6458 - protein, 77 aa, Homo sapiens
MKLKVNPCWWKRTQLGSQPPCCEEAQATWKGRCRCASPESQLRPQKTANIYCDDAQIIPVPRGQVISTYRSFQMITQ

SEQ ID NO: 6459 - DNA, 3265 bp, Homo sapiens
agggaagaacctggctgagacgcacctgcaactgtttggagctggtgaccttgggcccagcacaccctcgctgctggtggacacagcccctcacaagcagctgcgaggccctcgggcagtggcatgggcgccgtcgcttcctgctaaccccacatcctcatttcccacgcttctccttccaccttccatgatcactgggacctactgcctcaggaaccgcctcagagggacagagggaagcagaccacccttttcttcagagagttcatggcccagggagggaacgctggctggggacgatcacaaagcctctctggtgcccggccagcgacagggaccctcggggctgcggggggagaggacgcccctgccctggccgcacagggttgggttagaggtgagctggggccggagaagccacgggagccatgtggcgccttctcaggaggtgctcccgcagcttcgcctcctctcgtcttccgtgcgcagggagggaccagcccagtgacagctgggagcaaaactggtcacctcccctcgggctctgggcaactgtcaacctgcagctttgagtctctccccctggaatcttctatctggggtatgataatgttattacatacgttggttatttacagcacaacatgaaaaggcaatttgtaaggactggtccgtctaatcggggcgaatcaccagtcttctgaggcatcgtattgagtttagtttccgactgattgctaaatgccttcacgctgcgtggatattgcccagctctgcctcccttgctgcaggtgccctgtggatgctgagcttccacggaggggctgctgccccctctgcccccacagctcagctcgagttcaccagtggggaaggccgagggcctgtggaacgagggctccgttcccccaccgcaaggagtgaacggcaccgaggttcccgccgccgagccgcagcgctgtgcaagcccccgatgggcgacggacaccaggccccagcccaacgcgcttcctttggctcctcctgaactggggggggggcctcgcacccgccttgccagggccctggcatctgtctcactggcctttctcacctggtattccagtgaggagggtgcttcagttttactccctttgagaggcaagatcttctcaacccacaagaagaggcgaccaggtcctgggtgactgtcgaataagcctggtccaactgggaacaagtcttctgggccctaatttcccacatggtgttcttgtctgacaaaatcacagccttccacgttcaagaatcttcattcatctctctctttcagcgaatgttccctaagctctcccatcactgagcactgctgccaacagcccagctgcatgctaccactttggtttgatggagagaagggctcagaacctcgtgcaagtgggaggcaagcacaagtacaaaggcatcttccggagccaaggtgggggcgcagagggcctgtctcagtgagatcccactgtcttccagggtttgccaccgcagcagtaagccctggagtggccccacaccctaagatccacgggggaaaaggtggatgtctcagcatgggtttgtaacattgttctcttaaataagcagaggatgcagaattaggagcaagcattccgaggggtggccagctgtggcttccgaggggcacctgacctcccatctgccttctgagcaccagctgccccaggtgaggtgtgtggagttccacagctacgatgagccgtcgccatggagaacagcagctcacgattgctttgatttaaattgaattaaggtgaaaatgaatcagggcataactctcttctttcagccagacgtctttctgaaccggtgtatatatgacttaaaaaagtcacgagggttttgggcccagggatcaggcaggaaggaaaggcagtgccgtgcaaggaggggtgggttagaaattgtatccagaaccgctgtggcttgtactgaaggaagaaacttcgtagttctgcttctatttctaccacaacaccaaggaaggtgtgtggggtggggagcaggtacacacaggtccttggtattaccagtggtccaggattgtataattccgcttattctacccatcccacagcctgaccctgactcaagtcctgcagccccttggtgccctgagccccctcccctgcctgttcctaagcaatcaatcaccctaagaccccgttctaggtttcagcagatgatgacgagttaatcagacaaataagccatggggtaggcaggggttgtgggtgctgcttcctggtccctctggcaaaccagaagggagctgcctccctgcggtccccaccctgtctccaagcttcccagcagagccccacatccagcaactgggcccagctttaaccagacggaggagcagcctgacgtcctgccagccccagagacagatgtgggcacaggaagggaaggcagggaggagaggaagccaataaaaagtgttagcatccgtcagggtgaccctttgcagaacctgcgtcagcctgaggacgcagggaaaggctgcgcgggagaagccgctgttagcatctgccagggtgaccctttacagaaactgcgtcagcctgaggacgcagggacaggctgtgcggagaagccgctgttagcatccgtcagggtgaccctttacagaaactgcgtcagcctgaggacgcagggacaggctgtgcggagaagccgctggcctttgccgcttgaaagctgggtccctgcggcctcctcaccccagggctccctcagagaaattctcatagaacccctaagcaatacgcggggaaagaacggatgccacccggaagcatgccgaggaagagtccattcatgggaacttccagagccggtcacagaggccagatccacgatcaggtgcatggcaggggcttgtccgcaggaccggaaccttgtggaagatactacattcaacacagacgtactgtgtgcctcctgcgtgtgaggcctggtgctcatggcgcgtgtccttgcatgcaaaattctactcttcatcttgacgtttctagacattcagctgttcctcaggaaacgatttaccttccctctgccttttctgtaaaatgcatggactgaggaattactaatgcataacactttgtttgctggataccaagtagacgcactcttaccatatacagggctgtatctaggcagccagttattagaataaaaacagaatactatgttcatccgctcagat

SEQ ID NO: 6460 - protein, 99 aa, Homo sapiens
MPPGSMPRKSPFMGTSRAGHRGQIHDQVHGRGLSAGPEPCGRYYIQHRRTVCLLRVRPGAHGACPCMQNSTLHLDVSRHSAVPQETIYLPSAFSVKCMD

SEQ ID NO: 6461 - DNA, 377 bp, Homo sapiens
tccaaacacagtctctgctgctctccacgcacggcaatgggaaggcagccctttcccctccatcactccggggagctcacgtgcggacggggtcctctgtagcatctttaaattggaggtacctcactccggattctattaaaatcgtaatctctagaagatggattcagcaaatgccaggcgtggagccatgaatgtttccataagaaacaagaaaaatagaaagaatgtgtgttagccagacgacaccttgatggcacccctgccacctccccagccctcctcagtggcaaagtgatttagctcagttgggcttctccaaaatggaaatagtcacttgtttgagcaaataaatgtaatgaaagttgttccggaaa

SEQ ID NO: 6462 - protein, 46 aa, Homo sapiens
PNTVSAALHARQWEGSPFPSITPGSSRADGVLCSIFKLEVPHSGFY

SEQ ID NO: 6463 - DNA, 3773 bp, Homo sapiens
gcgatccattgagaggagggtttggaaaagtggctcctttgtgacagctctcgccagattggggggctgctgatttgcatctcattagccatgcgggcggccggctgaatataagggcggcaggcgccggcgagagccagatcctctgcgcgcacccgcggagacccgacccggccgagggcagagcgcaggggaacccgggcagccgcggcgcagagcctcctcccacggcccggcccctccggtcctgcgcgtgtgtactggatggcattggctggattcatcggaaagacgcggatctttgctgtgacaccggagatcggagcccggagtgctcccggaacgaccgccgccgccgagtgacaccgggccgcgatccgcaggggccgccgcgcacacccgccgccgccgaccgtcccctcagcgcgcgccgctggccccggattatcgccttgcccgtgggatttccagaccgcggctttctaatcggctcgggaggaagctctgcagctctcttgggaattaagctcaatctctggactctctctctttctctttctccccctccctctcctgcgaagaagctcaagacaaaaccaggaagccggcgaccctcacctcctcgggggctgggaggaaggaggaaaacgaaagtcgccgccgccgcgctgtcccccgagagctgcctttcctcgggcatccctggggctgccgcgggacctcgcagggcggatataaagaaccgcggccttgggaagaggcggagaccggcttttaaagaaagaagtcctgggtcctgcggtctggggcgaggcaagggcgcttttctgcccacgctccccgtggcccatcgatcccccgcgcgtccgccgctgttctaaggagagaagtgggggccccccaggctcgcgcgtggagcgaagcagcatgggcagtcggtgcgcgctggccctggcggtgctctcggccttgctgtgtcaggtctggagctctggggtgttcgaactgaagctgcaggagttcgtcaacaagaaggggctgctggggaaccgcaactgctgccgcgggggcgcggggccaccgccgtgcgcctgccggaccttcttccgcgtgtgcctcaagcactaccaggccagcgtgtcccccgagccgccctgcacctacggcagcgccgtcacccccgtgctgggcgtcgactccttcagtctgcccgacggcgggggcgccgactccgcgttcagcaaccccatccgcttccccttcggcttcacctggccgggcaccttctctctgattattgaagctctccacacagattctcctgatgacctcgcaacagaaaacccagaaagactcatcagccgcctggccacccagaggcacctgacggtgggcgaggagtggtcccaggacctgcacagcagcggccgcacggacctcaagtactcctaccgcttcgtgtgtgacgaacactactacggagagggctgctccgttttctgccgtccccgggacgatgccttcggccacttcacctgtggggagcgtggggagaaagtgtgcaaccctggctggaaagggccctactgcacagagccgatctgcctgcctggatgtgatgagcagcatggattttgtgacaaaccaggggaatgcaagtgcagagtgggctggcagggccggtactgtgacgagtgtatccgctatccaggctgtctccatggcacctgccagcagccctggcagtgcaactgccaggaaggctgggggggccttttctgcaaccaggacctgaactactgcacacaccataagccctgcaagaatggagccacctgcaccaacacgggccaggggagctacacttgctcttgccggcctgggtacacaggtgccacctgcgagctggggattgacgagtgtgaccccagcccttgtaagaacggagggagctgcacggatctcgagaacagctactcctgtacctgcccacccggcttctacggcaaaatctgtgaattgagtgccatgacctgtgcggacggcccttgctttaacgggggtcggtgctcagacagccccgatggagggtacagctgccgctgccccgtgggctactccggcttcaactgtgagaagaaaattgactactgcagctcttcaccctgttctaatggtgccaagtgtgtggacctcggtgatgcctacctgtgccgctgccaggccggcttctcggggaggcactgtgacgacaacgtggacgactgcgcctcctccccgtgcgccaacgggggcacctgccgggatggcgtgaacgacttctcctgcacctgcccgcctggctacacgggcaggaactgcagtgcccccgtcagcaggtgcgagcacgcaccctgccacaatggggccacctgccacgagaggggccaccgctatgtgtgcgagtgtgcccgaggctacgggggtcccaactgccagttcctgctccccgagctgcccccgggcccagcggtggtggacctcactgagaagctagagggccagggcgggccattcccctgggtggccgtgtgcgccggggtcatccttgtcctcatgctgctgctgggctgtgccgctgtggtggtctgcgtccggctgaggctgcagaagcaccggcccccagccgacccctgccggggggagacggagaccatgaacaacctggccaactgccagcgtgagaaggacatctcagtcagcatcatcggggccacgcagatcaagaacaccaacaagaaggcggacttccacggggaccacagcgccgacaagaatggcttcaaggcccgctacccagcggtggactataacctcgtgcaggacctcaagggtgacgacaccgccgtcagggacgcgcacagcaagcgtgacaccaagtgccagccccagggctcctcaggggaggagaaggggaccccgaccacactcaggggtggagaagcatctgaaagaaaaaggccggactcgggctgttcaacttcaaaagacaccaagtaccagtcggtgtacgtcatatccgaggagaaggatgagtgcgtcatagcaactgaggtgtaaaatggaagtgagatggcaagactcccgtttctcttaaaataagtaaaattccaaggatatatgccccaacgaatgctgctgaagaggagggaggcctcgtggactgctgctgagaaaccgagttcagaccgagcaggttctcctcctgaggtcctcgacgcctgccgacagcctgtcgcggcccggccgcctgcggcactgccttccgtgacgtcgccgttgcactatggacagttgctcttaagagaatatatatttaaatgggtgaactgaattacgcataagaagcatgcactgcctgagtgtatattttggattcttatgagccagtcttttcttgaattagaaacacaaacactgcctttattgtcctttttgatacgaagatgtgctttttctagatggaaaagatgtgtgttattttttggatttgtaaaaatatttttcatgatatctgtaaagcttgagtattttgtgatgttcgttttttataatttaaattttggtaaatatgtacaaaggcacttcgggtctatgtgactatatttttttgtatataaatgtatttatggaatattgtgcaaatgttatttgagttttttactgttttgttaatgaagaaattcctttttaaaatatttttccaaaataaattttatgaatgacaaccagaa

SEQ ID NO: 6464 - protein, 723 aa, Homo sapiens; identical to SEQ ID NO: 822

SEQ ID NO: 6465 - DNA, 723 bp, Homo sapiens
aacggctatgagaatttacagatagtagtttaaaaagagttggcacaggaaatgatagtatagttcaatggttctcaaatgttgcctcatcctagaatcactcagggagtgatttttgagatgctgacactggtgctgccctaacacccaagaagccagaacctctggtggggcccaggcccaggctgcagctcccaaggtgacccagtgttctgctaatctggagaaccagaggctcactggtgctgcgggaagatggtttctagggtgagaatgtccactgcaaagccagcaacagtcaacgtccatctgagtcttctgcttttctgcaaccagggtaagccttctctccctgaggcagcctgctccctccagagcagccctggacttccctggctgtttgatcactggaaaaataaagtcttcctgcatttgatgtcgagcttcctatctcctacttttcctgtccccacccttcacagacctgaactactgcacacaccataagccctgcaagaatggagccacctgcaccaacacgggccaggggagctacacttgctcttgccggcctgggtacacaggtgccacctgcgagctggggattgacgagtgtgaccccagcccttgtaagaacggagggagctgcacggtgagtcggaggctccatggcatctcacccggaagctggggtgccctggtgttgaatggagtgtgtgggct

SEQ ID NO: 6466 - protein, 83 aa, Homo sapiens
MVSRVRMSTAKPATVNVHLSLLLFCNQGKPSLPEAACSLQSSPGLPWLFDHWKNKVFLHLMSSFLSPTFPVPTLHRPELLHTP

SEQ ID NO: 6467 - DNA, 2377 bp, Homo sapiens
gcgatccattgagaggagggtttggaaaagtggctcctttgtgacagctctcgccagattggggggctgctgatttgcatctcattagccatgcgggcggccggctgaatataagggcggcaggcgccggcgagagccagatcctctgcgcgcacccgcggagacccgacccggccgagggcagagcgcaggggaacccgggcagccgcggcgcagagcctcctcccacggcccggcccctccggtcctgcgcgtgtgtactggatggcattggctggattcatcggaaagacgcggatctttgctgtgacaccggagatcggagcccggagtgctcccggaacgaccgccgccgccgagtgacaccgggccgcgatccgcaggggccgccgcgcacacccgccgccgccgaccgtcccctcagcgcgcgccgctggccccggattatcgccttgcccgtgggatttccagaccgcggctttctaatcggctcgggaggaagctctgcagctctcttgggaattaagctcaatctctggactctctctctttctctttctccccctccctctcctgcgaagaagctcaagacaaaaccaggaagccggcgaccctcacctcctcgggggctgggaggaaggaggaaaacgaaagtcgccgccgccgcgctgtcccccgagagctgcctttcctcgggcatccctggggctgccgcgggacctcgcagggcggatataaagaaccgcggccttgggaagaggcggagaccggcttttaaagaaagaagtcctgggtcctgcggtctggggcgaggcaagggcgcttttctgcccacgctccccgtggcccatcgatcccccgcgcgtccgccgctgttctaaggagagaagtgggggccccccaggctcgcgcgtggagcgaagcagcatgggcagtcggtgcgcgctggccctggcggtgctctcggccttgctgtgtcaggtctggagctctggggtgttcgaactgaagctgcaggagttcgtcaacaagaaggggctgctggggaaccgcaactgctgccgcgggggcgcggggccaccgccgtgcgcctgccggaccttcttccgcgtgtgcctcaagcactaccaggccagcgtgtcccccgagccgccctgcacctacggcagcgccgtcacccccgtgctgggcgtcgactccttcagtctgcccgacggcgggggcgccgactccgcgttcagcaaccccatccgcttccccttcggcttcacctggccggtgagtgccgcacctgcgcgcgccgggccggccctgaagctgggcgggctgcaggacgcgctgggatcccgccttgggcgctcggtggcgggacctcggggaccccgcgaggcgcaggtgggcgctgcgatctgcctagcggcggccccaggactccagcccagcagcgcggacacctcgccccggggccccgcggcctgcaggaggggaccgcgctggggcgaggaggagaggccgagcgcgcccgggagatttccgtatccggcctctgtgccaggtctccagtcagaggcgccccttcacgtgggaaggttctggtttcccgactcctagacgcgttggtggcgcgattacccgcgcagcgcgaccgctaccacccggagcgtgcccatcccccaagaaaaatgacaagggccctcgggcctcttccaccccatcctgcctgcattctctctctctctctaattaaaaaaacaacgtaatatcctgtagtacaggctgaaaaaacacgtcaggaaaccactctttaaaaagttcttccatttccttagggaaggtgagagcaggcaggaggtgcgtggagaccctctccagacacgctgccccagacctgcagccttcaggcctctgttgctgacctggctgttaggaatgactgctttttgccgttttcttttcgttacctttctgggttgtctaacgtcttctcccctctctcccagggcaccttctctctgattattgaagctctccacacagattctcctgatgacctcgcaacaggtaaaaacaaaacccaaaccccaaaactgctttccccagttaatagcattggactttgcccacccatcccccagccaaacccggacagctttcattctgcacgtgccccagaaagttcagggtggagcagcttgggcctccttcccgtgctgaatgtctcggcccacccccgctctgtcccgagtcacagggttctcgttcagaaccaaccaggagcatcttctccccgtagaaaacccagaaagactcatcagccgcctggccacccagaggcacctgacggtgggcgaggagtggtcccaggacctgcacagca

SEQ ID NO: 6468 - protein, 227 aa, Homo sapiens [sequence omitted]

SEQ ID NO: 6469 - DNA, 3913 bp, Homo sapiens
gagcggaagcggaagtgaacgaggcggctgtggcggtggctgaggcggctgggcctagggtgcagcgggcgcgtctgcggctggtgttggcgcatctctagatcctttcccggagttcagttatgggtgtgagaggtttgcaaggatttgtgggaagtacctgcccacatatatgtacagtagtaaatttcaaagaactggcagagcaccaccgaagcaagtatcctggatgtacccctaccattgtggttgatgccatgtgttgtctcagatattggtatactccagaatcttggatctgcggtggccagtggcgagaatacttttctgctttgcgagattttgttaaaacttttacggcagctgggatcaagttgatattcttctttgatggcatggtggagcaggataagagagatgaatgggtgaaacgaaggctcaagaacaacagggagatatccaggatttttcattacatcaagtcacacaaggagcagccaggcagaaatatgttcttcatcccctcagggctagctgtgtttacacgatttgctctaaagacactgggccaggaaactttgtgttctttgcaggaagcagattatgaggtagcttcctatggcctccagcataactgtcttgggattctgggggaagacactgattacctaatctatgacacttgtccctacttttcaattagcgagctctgcctagagagcctggacaccgtcatgctctgcagagagaagctctgtgagagtctgggcctctgtgtggccgaccttcctcttctggcctgcctccttggcaacgacataatcccagagggcatgtttgaaagctttaggtacaaatgcttatcgtcctacacctctgtaaaagagaactttgacaaaaaaggtaacatcatattagctgtgtcagaccatatatcgaaagttctttacttgtatcaaggtgagaaaaaattagaagagatattacctctgggaccaaacaaagctcttttttataaaggaatggcatcatatcttttaccaggacaaaaatctccatggtttttccaaaaacccaaaggtgtaataactttggacaaacaagtaatatccacgagttcagacgccgaatccagggaagaagttcccatgtgttcagatgctgaatccaggcaagaagttcccatgtgtacaggccctgaatccaggcgagaagttcccgtgtatacagattctgaacccaggcaagaagttcccatgtgttcagaccctgaacccaggcaagaagttcccacgtgtacaggccctgaatccaggcgagaagttcccatgtgttcagaccctgaacccaggcaagaagttcccatgtgtacaggccctgaagccaggcaagaagttcccatgtatacagactctgaacccaggcaagaagttcccatgtatacagactctgaacccaggcaagaagttcccatgtatacaggctctgaacccaggcaagaagttcccatgtatacaggccctgaatccaggcaagaagttcccatgtatacaggccctgaatccaggcaagaagttttaatacggacagaccctgaatctaggcaagaaattatgtgtacaggccatgaatccaaacaggaagttcccatatgtacagatcctatatccaagcaagaagactccatgtgtacacacgctgaaatcaatcaaaaattacctgtagcaacagattttgaatttaagctagaagctctcatgtgtacaaaccctgaaattaaacaagaagaccccacaaatgtggggcctgaagtaaagcaacaagtaaccatggtttcagacactgaaatcttaaaggttgctagaacacatcacgtccaagcagaaagctacctggtgtacaacatcatgagcagtggagagattgaatgcagcaacaccctagaagatgagcttgaccaggccttacccagccaggccttcatttaccgtcccattcgacagcgggtctactcactcttactggaggactgtcaagatgtcaccagcacctgcctagctgtcaaggagtggtttgtgtatcctgggaacccactgaggcacccggacctcgtcaggccgctgcagatgaccattccagggggaacgcctagtttgaaaatattatggctgaaccaagagccagaaatacaggttcggcgcttggacacactcctagcctgtttcaatctttcctcctcaagagaagagctgcaggctgtcgaaagcccatttcaagctttgtgctgcctcttgatctacctctttgtccaggtggacacgctttgcctggaggatttgcatgcgtttattgcgcaggccttgtgcctccaaggaaaatccacctcgcagcttgtaaatctacagcctgattacatcaaccccagagccgtgcagctgggctcccttctcgtccgcggcctcaccactctggttttagtcaacagcgcatgtggcttcccctggaagacgagtgatttcatgccctggaatgtatttgacgggaagctttttcatcagaagtacttgcaatctgaaaagggttatgctgtggaggttcttttagaacaaaatagatctcggctcaccaaattccacaacctgaaggcagtcgtctgcaaggcctgcatgaaggagaacagacgcatcactggccgagcccactggggctcacaccacgcaggtgggaaagggccaggtgcctctagaagccccacaagcgtagaccctaactgcttcctgagttttgttgataaatgaattctaagaagaggctgatataattggatgaacagaatagaatttaaatgatagggccgggtgcggtggctcacgcctgtaatctcagcactttgggaggccgaggcaggcagatcacttgaggtcaggaattcaagaccagcctggcccacatggtgaaaccccgtctctactaaaaatacaaaaatgaaccgggcgtgttggcgggcgcctgtaatcccagctacttgggaggctgaggaaggaggatcacctccgcctcccgagttcaagcgattctcttgcctcagcctcccgagcagctgggactacaggcttgtgccaccacgcccggctaatttttgtatttttagtacagaaggggtttcaccatgttggccaggattgtctcaatctcttgacctcgtgatccgctggttttcaaaaaccaatttggtagatgaaaaatctatctcattgattgaatgctgctttgtctgtcagtgaagttagatatcttattagtttattttgttaatgagactttttaattattctttcatgccctccttcagttcatgtttacacctgtaactactgcagtcccattatttttcttgatggaataggagaactcagcccagattcttatccacccagactatctctaggagaactacttggtgtcagccttgcaaataccattctcagaggtttcgtgtcatggggggagtagccgcctcagatgcacccagatcccaccaggtgtcgtgcgtagcaccccatgaagggagagcagccagggtgtgtggagccatgtccaaccatgagagggaaggctgctttttctactgttcccaatccttttctccatcttttgactttctgccaccaactatagatagacagagattgagacccccaaaacaaagttgatttattgcaaaataaatgtgtgatactctctcacattgcctgtttccttacctggttggcagtaggtcctcagaagtttgcgccgtggctgggcacacacctgtaatctgagcactttggcaggctgaggtgggagaatcacttaaggccaggagtttgacactggcctgagaaacatagcgagaccctgtctttacaaa

SEQ ID NO: 6470 - protein, 891 aa, Homo sapiens
MGVRGLQGFVGSTCPHICTVVNFKELAEHHRSKYPGCTPTIVVDAMCCLRYWYTPESWICGGQWREYFSALRDFVKTFTAAGIKLIFFFDGMVEQDKRDEWVKRRLKNNREISRIFHYIKSHKEQPGRNMFFIPSGLAVFTRFALKTLGQETLCSLQEADYEVASYGLQHNCLGILGEDTDYLIYDTCPYFSISELCLESLDTVMLCREKLCESLGLCVADLPLLACLLGNDIIPEGMFESFRYKCLSSYTSVKENFDKKGNIILAVSDHISKVLYLYQGEKKLEEILPLGPNKALFYKGMASYLLPGQKSPWFFQKPKGVITLDKQVISTSSDAESREEVPMCSDAESRQEVPMCTGPESRREVPVYTDSEPRQEVPMCSDPEPRQEVPTCTGPESRREVPMCSDPEPRQEVPMCTGPEARQEVPMYTDSEPRQEVPMYTDSEPRQEVPMYTGSEPRQEVPMYTGPESRQEVPMYTGPESRQEVLIRTDPESRQEIMCTGHESKQEVPICTDPISKQEDSMCTHAEINQKLPVATDFEFKLEALMCTNPEIKQEDPTNVGPEVKQQVTMVSDTEILKVARTHHVQAESYLVYNIMSSGEIECSNTLEDELDQALPSQAFIYRPIRQRVYSLLLEDCQDVTSTCLAVKEWFVYPGNPLRHPDLVRPLQMTIPGGTPSLKILWLNQEPEIQVRRLDTLLACFNLSSSREELQAVESPFQALCCLLIYLFVQVDTLCLEDLHAFIAQALCLQGKSTSQLVNLQPDYINPRAVQLGSLLVRGLTTLVLVNSACGFPWKTSDFMPWNVFDGKLFHQKYLQSEKGYAVEVLLEQNRSRLTKFHNLKAVVCKACMKENRRITGRAHWGSHHAGGKGPGASRSPTSVDPNCFLSFVDK

SEQ ID NO: 6471 - DNA, 3180 bp, Homo sapiens
agcggaagtgaacgaggcggctgtggcggtggctgaggcggctgggcctagggtgcagcgggcgcgtctgcggctggtgttggcgcatctctagatcctttcccggagttcagttatgggtgtgagaggtttgcaaggatttgtgggaagtacctgcccacatatatgtacagtagtaaatttcaaagaactggcagagcaccaccgaagcaagtatcctggatgtacccctaccattgtggttgatgccatgtgttgtctcagatattggtatactccagaatcttggatctgcggtggccagtggcgagaatacttttctgctttgcgagattttgttaaaacttttacggcagctgggatcaagttgatattcttctttgatggcatggtggagcaggataagagagatgaatgggtgaaacgaaggctcaagaacaacagggagatatccaggatttttcattacatcaagtcacacaaggagcagccaggcagaaatatgttcttcatcccctcagggctagctgtgtttacacgatttgctctaaagacactgggccaggaaactttgtgttctttgcaggaagcagattatgaggtagcttcctatggcctccagcataactgtcttgggattctgggggaagacactgattacctaatctatgacacttgtccctacttttcaattagcgagctctgcctagagagcctggacaccgtcatgctctgcagagagaagctctgtgagagtctgggcctctgtgtggccgaccttcctcttctggcctgcctccttggcaacgacataatcccagagggcatgtttgaaagctttaggtacaaatgcttatcgtcctacacctctgtaaaagagaactttgacaaaaaaggtaacatcatattagctgtgtcagaccatatatcgaaagttctttacttgtatcaaggtgagaaaaaattagaagagatattacctctgggaccaaacaaagctcttttttataaaggaatggcatcatatcttttaccaggacaaaaatctccatggtttttccaaaaacccaaaggtgtaataactttggacaaacaagtaatatccacgagttcagacgccgaatccagggaagaagttcccatgtgttcagatgctgaatccaggcaagaagttcccatgtgtacaggccctgaatccaggcgagaagttcccgtgtatacagattctgaacccaggcaagaagttcccatgtgttcagaccctgaacccaggcaagaagttcccacgtgtacaggccctgaatccaggcgagaagttcccatgtgttcagaccctgaacccaggcaagaagttcccatgtgtacaggccctgaagccaggcaagaagttcccatgtatacagactctgaacccaggcaagaagttcccatgtatacagactctgaacccaggcaagaagttcccatgtatacaggctctgaacccaggcaagaagttcccatgtatacaggccctgaatccaggcaagaagttcccatgtatacaggccctgaatccaggcaagaagttttaatacggacagaccctgaatctaggcaagaaattatgtgtacaggccatgaatccaaacaggaagttcccatatgtacagatcctatatccaagcaagaagactccatgtgtacacacgctgaaatcaatcaaaaattacctgtagcaacagattttgaatttaagctagaagctctcatgtgtacaaaccctgaaattaaacaagaagaccccacaaatgtggggcctgaagtaaagcaacaagtaaccatggtttcagacactgaaatcttaaaggttgctagaacacatcacgtccaagcagaaagctacctggtgtacaacatcatgagcagtggagagattgaatgcagcaacaccctagaagatgagcttgaccaggccttacccagccaggccttcatttaccgtcccattcgacagcgggtctactcactcttactggaggactgtcaagatgtcaccagcacctgcctagctgtcaaggagtggtttgtgtatcctgggaacccactgaggcacccggacctcgtcaggccgctgcagatgaccattccagggggaacgcctagtttgaaaatattatggctgaaccaagagccagaaatacaggttcggcgcttggacacactcctagcctgtttcaatctttcctcctcaagagaagagctgcaggctgtcgaaagcccatttcaagctttgtgctgcctcttgatctacctctttgtccaggtggacacgctttgcctggaggatttgcatgcgtttattgcgcaggccttgtgcctccaaggaaaatccacctcgcagcttgtaaatctacagcctgattacatcaaccccagagccgtgcagctgggctcccttctcgtccgcggcctcaccactctggttttagtcaacagcgcatgtggcttcccctggaagacgagtgatttcatgccctggaatgtatttgacgggaagctttttcatcagaagtacttgcaatctgaaaagggttatgctgtggaggttcttttagaacaaaatagatctcggctcaccaaattccacaacctgaaggcagtcgtctgcaaggcctgcatgaaggagaacagacgcatcactggccgagcccactggggctcacaccacgcagggaggtggggaagacagggctccagctaccacaggacgggctctgggtatagccgttccagtcagggacagccgtggagagaccagggaccaggaagcagacagtatgagcatgaccagtggagaaggtactagtcaacctccagaaagagtatggagagaaaaagaggcacacctggacgcagagccctgccagcgccctcctctgctgttgcagctgcaaggagaccatgcctgtgggagccaggcctcgcttgcatgaagaaggaacgatgcctttttcaatggtgtctccctcccattgtgcagaagagcttttgttggcttctctcccgagcttgtgcctgattctgtggcccaaaacaatcattgttaacatcttcatgtgtttcattctgatctttcattcatatatatgatgcctagctaatttcattttaaaataaatgggaatctgttgtattctg

SEQ ID NO: 6472 - protein, 910 aa, Homo sapiens; identical to SEQ ID NO: 824

SEQ ID NO: 6473 - DNA, 3245 bp, Homo sapiens
agcggaagtgaacgaggcggctgtggcggtggctgaggcggctgggcctagggtgcagcgggcgcgtctgcggctggtgttggcgcatctctagatcctttcccggagttcagttatgggtgtgagaggtttgcaaggatttgtgggaagtacctgcccacatatatgtacagtagtaaatttcaaagaactggcagagcaccaccgaagcaagtatcctggatgtacccctaccattgtggttgatgccatgtgttgtctcagatattggtatactccagaatcttggatctgcggtggccagtggcgagaatacttttctgctttgcgagattttgttaaaacttttacggcagctgggatcaagttgatattcttctttgatggcatggtggagcaggataagagagatgaatgggtgaaacgaaggctcaagaacaacagggagatatccaggatttttcattacatcaagtcacacaaggagcagccaggcagaaatatgttcttcatcccctcagggctagctgtgtttacacgatttgctctaaagacactgggccaggaaactttgtgttctttgcaggaagcagattatgaggtagcttcctatggcctccagcataactgtcttgggattctgggggaagacactgattacctaatctatgacacttgtccctacttttcaattagcgagctctgcctagagagcctggacaccgtcatgctctgcagagagaagctctgtgagagtctgggcctctgtgtggccgaccttcctcttctggcctgcctccttggcaacgacataatcccagagggcatgtttgaaagctttaggtacaaatgcttatcgtcctacacctctgtaaaagagaactttgacaaaaaaggtaacatcatattagctgtgtcagaccatatatcgaaagttctttacttgtatcaaggtgagaaaaaattagaagagatattacctctgggaccaaacaaagctcttttttataaaggaatggcatcatatcttttaccaggacaaaaatctccatggtttttccaaaaacccaaaggtgtaataactttggacaaacaagtaatatccacgagttcagacgccgaatccagggaagaagttcccatgtgttcagatgctgaatccaggcaagaagttcccatgtgtacaggccctgaatccaggcgagaagttcccgtgtatacagattctgaacccaggcaagaagttcccatgtgttcagaccctgaacccaggcaagaagttcccacgtgtacaggccctgaatccaggcgagaagttcccatgtgttcagaccctgaacccaggcaagaagttcccatgtgtacaggccctgaagccaggcaagaagttcccatgtatacagactctgaacccaggcaagaagttcccatgtatacagactctgaacccaggcaagaagttcccatgtatacaggctctgaacccaggcaagaagttcccatgtatacaggccctgaatccaggcaagaagttcccatgtatacaggccctgaatccaggcaagaagttttaatacggacagaccctgaatctaggcaagaaattatgtgtacaggccatgaatccaaacaggaagttcccatatgtacagatcctatatccaagcaagaagactccatgtgtacacacgctgaaatcaatcaaaaattacctgtagcaacagattttgaatttaagctagaagctctcatgtgtacaaaccctgaaattaaacaagaagaccccacaaatgtggggcctgaagtaaagcaacaagtaaccatggtttcagacactgaaatcttaaaggttgctagaacacatcacgtccaagcagaaagctacctggtgtacaacatcatgagcagtggagagattgaatgcagcaacaccctagaagatgagcttgaccaggccttacccagccaggccttcatttaccgtcccattcgacagcgggtctactcactcttactggaggactgtcaagatgtcaccagcacctgcctagctgtcaaggagtggtttgtgtatcctgggaacccactgaggcacccggacctcgtcaggccgctgcagatgaccattccagggggaacgcctagtttgaaaatattatggctgaaccaagagccagaaatacaggttcggcgcttggacacactcctagcctgtttcaatctttcctcctcaagagaagagctgcaggctgtcgaaagcccatttcaagctttgtgctgcctcttgatctacctctttgtccaggtggacacgctttgcctggaggatttgcatgcgtttattgcgcaggccttgtgcctccaaggaaaatccacctcgcagcttgtaaatctacagcctgattacatcaaccccagagccgtgcagctgggctcccttctcgtccgcggcctcaccactctggttttagtcaacagcgcatgtggcttcccctggaagacgagtgatttcatgccctggaatgtatttgacgggaagctttttcatcagaagtacttgcaatctgaaaagggttatgctgtggaggttcttttagaacaaaatagatctcggctcaccaaattccacaacctgaaggcagtcgtctgcaaggcctgcatgaaggagaacagacgcatcactggccgagcccactggggctcacaccacgcagggaggtggggaagacagggctccagctaccacaggacgggctctgggtatagccgttccagtcagggacagccgtggagagaccagggaccaggaagcagacagtatgagcatgaccagtggagaaggtactagtcaacctccagaaagagtatggagagaaaaagaggcacacctggacgcagagccctgccagcgccctcctctgctgttgcagctgcaaggagaccatgcctgtgggagccaggcctcgcttgcatgaagaaggaacgatgcctttttcaatggtgtctccctcccattgtgcagaagagcttttgttggcttctctcccgagcttgtgcctgattctgtggcccaaaacaatcattgttaacatcttcatgtgtttcattctgatctttcattcatatatatgatgcctagctaatttcattttaaaataaatgggaatctgttgtattctgattttttattagcaacactagattatgaggggttatctcctgttattaaaaagtcagaaaacact

SEQ ID NO: 6474 - protein, 910 aa, Homo sapiens; identical to SEQ ID NO: 824

SEQ ID NO: 6475 - DNA, 5506 bp, Homo sapiens
agcggaagtgaacgaggcggctgtggcggtggctgaggcggctgggcctagggtgcagcgggcgcgtctgcggctggtgttggcgcatctctagatcctttcccggagttcagttatgggtgtgagaggtttgcaaggatttgtgggaagtacctgcccacatatatgtacagtagtaaatttcaaagaactggcagagcaccaccgaagcaagtatcctggatgtacccctaccattgtggttgatgccatgtgttgtctcagatattggtatactccagaatcttggatctgcggtggccagtggcgagaatacttttctgctttgcgagattttgttaaaacttttacggcagctgggatcaagttgatattcttctttgatggcatggtggagcaggataagagagatgaatgggtgaaacgaaggctcaagaacaacagggagatatccaggatttttcattacatcaagtcacacaaggagcagccaggcagaaatatgttcttcatcccctcagggctagctgtgtttacacgatttgctctaaagacactgggccaggaaactttgtgttctttgcaggaagcagattatgaggtagcttcctatggcctccagcataactgtcttgggattctgggggaagacactgattacctaatctatgacacttgtccctacttttcaattagcgagctctgcctagagagcctggacaccgtcatgctctgcagagagaagctctgtgagagtctgggcctctgtgtggccgaccttcctcttctggcctgcctccttggcaacgacataatcccagagggcatgtttgaaagctttaggtacaaatgcttatcgtcctacacctctgtaaaagagaactttgacaaaaaaggtaacatcatattagctgtgtcagaccatatatcgaaagttctttacttgtatcaaggtgagaaaaaattagaagagatattacctctgggaccaaacaaagctcttttttataaaggaatggcatcatatcttttaccaggacaaaaatctccatggtttttccaaaaacccaaaggtgtaataactttggacaaacaagtaatatccacgagttcagacgccgaatccagggaagaagttcccatgtgttcagatgctgaatccaggcaagaagttcccatgtgtacaggccctgaatccaggcgagaagttcccgtgtatacagattctgaacccaggcaagaagttcccatgtgttcagaccctgaacccaggcaagaagttcccacgtgtacaggccctgaatccaggcgagaagttcccatgtgttcagaccctgaacccaggcaagaagttcccatgtgtacaggccctgaagccaggcaagaagttcccatgtatacagactctgaacccaggcaagaagttcccatgtatacagactctgaacccaggcaagaagttcccatgtatacaggctctgaacccaggcaagaagttcccatgtatacaggccctgaatccaggcaagaagttcccatgtatacaggccctgaatccaggcaagaagttttaatacggacagaccctgaatctaggcaagaaattatgtgtacaggccatgaatccaaacaggaagttcccatatgtacagatcctatatccaagcaagaagactccatgtgtacacacgctgaaatcaatcaaaaattacctgtagcaacagattttgaatttaagctagaagctctcatgtgtacaaaccctgaaattaaacaagaagaccccacaaatgtggggcctgaagtaaagcaacaagtaaccatggtttcagacactgaaatcttaaaggttgctagaacacatcacgtccaagcagaaagctacctggtgtacaacatcatgagcagtggagagattgaatgcagcaacaccctagaagatgagcttgaccaggccttacccagccaggccttcatttaccgtcccattcgacagcgggtctactcactcttactggaggactgtcaagatgtcaccagcacctgcctagctgtcaaggagtggtttgtgtatcctgggaacccactgaggcacccggacctcgtcaggccgctgcagatgaccattccagggggaacgcctagtttgaaaatattatggctgaaccaagagccagaaatacaggttcggcgcttggacacactcctagcctgtttcaatctttcctcctcaagagaagagctgcaggctgtcgaaagcccatttcaagctttgtgctgcctcttgatctacctctttgtccaggtggacacgctttgcctggaggatttgcatgcgtttattgcgcaggccttgtgcctccaaggaaaatccacctcgcagcttgtaaatctacagcctgattacatcaaccccagagccgtgcagctgggctcccttctcgtccgcggcctcaccactctggttttagtcaacagcgcatgtggcttcccctggaagacgagtgatttcatgccctggaatgtatttgacgggaagctttttcatcagaagtacttgcaatctgaaaagggttatgctgtggaggttcttttagaacaaaatagatctcggctcaccaaattccacaacctgaaggcagtcgtctgcaaggcctgcatgaaggagaacagacgcatcactggccgagcccactggggctcacaccacgcagggaggtggggaagacagggctccagctaccacaggacgggctctgggtatagccgttccagtcagggacagccgtggagagaccagggaccaggaagcagacagtatgagcatgaccagtggagaaggtactagtcaacctccagaaagagtatggagagaaaaagaggcacacctggacgcagagccctgccagcgccctcctctgctgttgcagctgcaaggagaccatgcctgtgggagccaggcctcgcttgcatgaagaaggaacgatgcctttttcaatggtgtctccctcccattgtgcagaagagcttttgttggcttctctcccgagcttgtgcctgattctgtggcccaaaacaatcattgttaacatcttcatgtgtttcattctgatctttcattcatatatatgatgcctagctaatttcattttaaaataaatgggaatctgttgtattctgattttttattagcaacactagattatgaggggttatctcctgttattaaaaagtcagaaaacactatacagtagtcctcccttatctgcgggggagacatcccaagaccctcagtggatgcctgagactggatagtatggaatcctacatatctataccttggctttttcctctacgtacataccatgataaagcttaacaaagaacagtgagagattaacagcaaccaataactaataaaagctatgtgaatgtggtctctgtcaaaatatcgtgctgtaatcacccttcttgctatctgaaaaccaagaagaccactaagtgactaatggtcagagaagctggatgaggggctgattcatgtcctgggcatgacagagcgggaggcacaaggtttcatcacactattcacaatggcgagcaagttaaaacggatttcccatttaatttaattttcagacttcagttgaccatgagtaaccgaaaccacagaaagtgaagctggggatatttcagaaattcttttctaatcagaaattctaatcaaacataagtttccaactatgtgttctcttggtcctcagaagtgtttgaatagaaaagtaacaactaacttcccatctttctggtggaagagttaattctgcctggagggttctgcctgggagacatgacagcatgtgtgtgactcctgtgtctgtttctgtggggtcatccctttcgtttcattttgccagggcctggctcaggattttttatggcagtgcctgtgaagacaagcctggccctccatccagtcacacaggaaatccacagagagcatgctgagagcagccagcggctgggctgccatcaggcctggtttatgatgccacaagtgaatggcacgtttgttcctctttatctctgagcattgaaggacttttggttaaaaaaaaaaattaagttcagagtaatccttttcatggaagaatcttcaggtcaccaaagaattgaaattttaagccccagattgtactgagctgtacctgtgggaaaaggaatggccagggtattgatgatggaaaagattcaaatgaggagttagaaggcaagccctctgtgggcagccgtcttccagaaacctcgaacttatgtctgtctccacctgagaaaggagaagaaaagctggtggtgacccctgctcctgctgggccatgccatggctctgaagatgccccgtgttcttaggaggtgctcacccctggcacctaaagacatttccttctggttgttgctctttaaaaacaaaataagcccctgaacgtgcttgcaggccagtttgtgtgcctgcacttgacgaattaccttgaccaacgggccaaaggcacagagctccaaggcatcatctttccttaaaatcctgagtgtttattaaaaagggacatggtctctaggtatcttattacatttgtatttcttacatttgaaatatcctaaccgctcccttcggtttcttcttaagaacatttacatctaattatttttcgtgcaagtcttgtaggacccacatgttttcctagctttggaaatcgatttttttcattcctcttatgaggatttccctatgtcagtaaacattaactttctatttcttccatttttgctcatttgaaacccctgctgcttctagatctatttctttgcacttgtataactttgaaataaattcctcatcccttagactaagagagtgggtgtctgtgaaaattgttttctccttcataatacctaaattctagtttgtcagtaaaatatttgtgtttggttaacaagctcttatttaagccattgagttagtataatctttattacctttgaaaaaccagagagctgaattttttgtcattctaagttgtaagtaacactgcagtcaagtcttctgatgaaatttccatatatcaaattgaaaataaagcaaaatatatttattactcataactaatatactttcacatttctctgattatttgtaagacatttcagcatgtggatgtggggaagggtgagcctgccccagaaacatctccctgctgccaccatggccacggctcggcagtctcccttcactgactcctgaaactccacgtaaatctaccatcacccaccccttctttgaccgttccctgcaccttcttgctcacagaaagctggtgtttcccccattcctcggtgcatagagccgacacccctcacattcttggcctgtttccaggctgttgtagttgcttcagcacgtggtggtgcacaacacccattcgatcgtgctcatagattctgggcgttg

SEQ ID NO: 6476 - protein, 910 aa, Homo sapiens; identical to SEQ ID NO: 824

SEQ ID NO: 6477 - DNA, 1021 bp, Homo sapiens
ggggaagacactgattacctaatctatgacacttgtccctacttttcaattagcgagctctgcctagagagcctggacaccgtcatgctctgcagagagaagctctgtgagagtctgggcctctgtgtggccgaccttcctcttctggcctgcctccttggcaacgacataatcccagagggcatgtttgaaagctttaggtacaaatgcttatcgtcctacacctctgtaaaagagaactttgacaaaaaaggtaacatcatattagctgtgtcagaccatatatcgaaagttctttacttgtatcaaggtgagaaaaaattagaagagatattacctctgggaccaaacaaagctcttttttataaaggaatggcatcatatcttttaccaggacaaaaatctccatggtttttccaaaaacccaaaggtgtaataactttggacaaacaagtaatatccacgagttcagacgccgaatccagggaagaagttcccatgtgttcagatgctgaatccaggcaagaagttcccatgtgtacaggccctgaatccaggcgagaagttcccgtgtatacagattctgaacccaggcaagaagttcccatgtgttcagaccctgaacccaggcaagaagttcccacgtgtacaggccctgaatccaggcgagaagttcccatgtgttcagaccctgaacccaggcaagaagttcccatgtgtacaggccctgaagccaggcaagaagttcccatgtatacagactctgaacccaggcaagaagttcccatgtatacagactctgaacccaggcaagaagttcccatgtatacaggctctgaacccaggcaagaagttcccatgtatacaggccctgaatccaggcaagaagttcccaaaacaatcattgttaacatcttcatgtgtttcattctgatctttcattcatatatatgatgcctagctaatttcattttaaaataaatgggaatctgttgtattctgattttttattagcaacact

SEQ ID NO: 6478 - protein, 289 aa, Homo sapiens
MLCREKLCESLGLCVADLPLLACLLGNDIIPEGMFESFRYKCLSSYTSVKENFDKKGNIILAVSDHISKVLYLYQGEKKLEEILPLGPNKALFYKGMASYLLPGQKSPWFFQKPKGVITLDKQVISTSSDAESREEVPMCSDAESRQEVPMCTGPESRREVPVYTDSEPRQEVPMCSDPEPRQEVPTCTGPESRREVPMCSDPEPRQEVPMCTGPEARQEVPMYTDSEPRQEVPMYTDSEPRQEVPMYTGSEPRQEVPMYTGPESRQEVPKTIIVNIFMCFILIFHSYI

SEQ ID NO: 6479 - DNA, 2869 bp, Homo sapiens
agttcggccacgtccctggccacgtcgcgggcgatctcgccatcttcgccgcttcctctcaggggccgccgcctcctgagccgcccagccccggggccgccgcgctgcgccgaccgccaccgccgccgccgccatgaacattttccggctgactggggacctgtcccacctggcggccatcgtcatcctgctgctgaagatctggaagacgcgctcctgcgccggtggattggcattctgacgttgtatctcatgcacagaggaaagctggactgtgctggtggagccttgctcagcagttacttgatcgtcctcatgattctcctggcagttgtcatatgtactgtgtcagccatcatgtgtgtcagcatgagaggaacgatttgtaaccctggaccgcggaagtctatgtctaagctgctttacatccgcctggcgctgttttttccagagatggtctgggcctctctgggggctgcctgggtggcagatggtgttcagtgcgacaggacagttgtaaacggcatcatcgcaaccgtcgtggtcagttggatcatcatcgctgccacagtggtttccattatcattgtctttgaccctcttggggggaaaatggctccatattcctctgccggccccagccacctggatagtcatgattcaagccagttacttaatggcctcaagacagcagctacaagcgtgtgggaaaccagaatcaagctcttgtgctgttgcattgggaaagacgaccatactcgggttgctttttcgagtacggcagagcttttctcaacctacttttcagacacagatctggtgcccagcgacattgcggcgggcctcgccctgcttcatcagcaacaggacaatatcaggaacaaccaagagcctgcccaggtggtctgccatgccccagggagctcccaggaagctgatctggatgcagaattagaaaactgccatcattacatgcagtttgcagcagcggcctatgggtggcccctctacatctacagaaaccccctcacggggctgtgcaggattggtggtgactgctgcagaagcagaaccacagactatgacttggtcggaggcgatcagctcaactgtcacttcggctccatcctgcacaccacagggctgcagtacagggacttcatccacgtcagcttccatgacaaggtttacgagctgccgtttttagtggctctggatcacaggaaagagtctgttgtggtcgctgtgagggggaccatgtctctgcaggatgtccttacggacctgtcagcggagagtgaggtgctggacgtggagtgtgaggtgcaggaccgcctggcacacaagggtatttctcaagctgccagatacgtttaccaacgactcatcaacgacgggattttgagccaagccttcagcattgctcctgagtaccggctggtcatagtgggccacagcctcgggggcggggcggccgccctgctggccaccatgctcagagccgcctacccgcaggtcaggtgctacgccttctccccaccccgggggctgtggagcaaagctctgcaggaatattctcagagcttcatcgtgtcactcgtcctggggaaggatgtgattcccaggctcagtgtgaccaacttggaagatctgaagagaagaatcttgcgagtggtcgcgcactgcaataaacccaagtacaagatcttgctgcacggtttgtggtacgaactgtttggaggaaaccccaacaacttgcccacggagctggacgggggcgaccaggaagtcctgacacagcctcttctgggggagcagagcctactgacgcgctggtccccggcctacagcttctccagcgactccccactggactcttctcccaagtacccccctctctaccctcccggcaggatcatccacctgcaggaggagggcgcctcggggcggtttggctgctgctctgctgctcactatagcgccaagtggtcacacgaagcggaattcagcaaaatactcataggtccgaagatgctcaccgaccacatgccagacatcctgatgcgggccttggacagcgtggtctccgacagagcggcctgcgtctcctgtccagcacaaggggtctccagtgtggacgtggcctgaccagggccactggaaactgtcccaggaacgatggactcacgcttttgtccttaaactgacttaccatccgaggagttcccatgacgccaaaacagcgaatgtccatcaacaggaatcggatgggaacagaattccatggtctcaatgacttaagtttatgggaagtcattgtggccataatggtagcagaagtagtgagcacgctcaggtgataggacgactcctgagacccagcgaccgtggagacagcctcgggaagccctggcccgtggatggatcccttggctgtctgaggactgctccagaagtgcgggaatccagggcccacccagaagaccgtgaacagttccttagcctcccacccccaaggcagctcttttcatccaactcagtttacaggcgtggtttgtttttcaaactgggcttcctggatgtacaaatggaactgtggtgagggtgcgggctggggttttctcctgggcgtcaccaagggcagccctgggctctggctggggatgaagacgaaacccgatcgggaaagtaagtggagcccccggccccgccgagccacagccccccaactgcctattcccactgcccagttgtttgtccacatcaggagttgctgattgaattcttgctactcttctggctctggggtcggccagtggattcaggagttgaaacaataaagcgcgcgtcaccatagtgcttgtgtgta

SEQ ID NO: 6480 - protein, 631 aa, Homo sapiens
MHRGKLDCAGGALLSSYLIVLMILLAVVICTVSAIMCVSMRGTICNPGPRKSMSKLLYIRLALFFPEMVWASLGAAWVADGVQCDRTVVNGIIATVVVSWIIIAATVVSIIIVFDPLGGKMAPYSSAGPSHLDSHDSSQLLNGLKTAATSVWETRIKLLCCCIGKDDHTRVAFSSTAELFSTYFSDTDLVPSDIAAGLALLHQQQDNIRNNQEPAQVVCHAPGSSQEADLDAELENCHHYMQFAAAAYGWPLYIYRNPLTGLCRIGGDCCRSRTTDYDLVGGDQLNCHFGSILHTTGLQYRDFIHVSFHDKVYELPFLVALDHRKESVVVAVRGTMSLQDVLTDLSAESEVLDVECEVQDRLAHKGISQAARYVYQRLINDGILSQAFSIAPEYRLVIVGHSLGGGAAALLATMLRAAYPQVRCYAFSPPRGLWSKALQEYSQSFIVSLVLGKDVIPRLSVTNLEDLKRRILRVVAHCNKPKYKILLHGLWYELFGGNPNNLPTELDGGDQEVLTQPLLGEQSLLTRWSPAYSFSSDSPLDSSPKYPPLYPPGRIIHLQEEGASGRFGCCSAAHYSAKWSHEAEFSKILIGPKMLTDHMPDILMRALDSVVSDRAACVSCPAQGVSSVDVA

SEQ ID NO: 6481 - DNA, 2498 bp, Homo sapiens
cccggggccgccgcgctgcgccgaccgccaccgccgccgccgccatgaacattttccggctgactggggacctgtcccacctggcggccatcgtcatcctgctgctgaagatctggaagacgcgctcctgcgccggtgagcggcgggggaaggcccgcaagactggggaggccgagaccatcaccacccactacctgttcttcctgggcctctatcgtgctttgtatcttgtcaactggatctggcgcttctactttgagggcttctttgacctcattgctgtggtggccggcgtagtccagaccatcctatactgtgacttcttctacttgtacattacaaaagtactcaagggaaagaagctcagtttgccagcataagtgccaaagaccatcaccagcatctgtccttcagggtgctcggacagaattcttaccacagcaaaggcataagatgcttgatacggaaaatcagaaacttaactcttttgttgcagatagtcatcagtggctctgtaaaaacgcagaggaaaagagccagaaggtttctgtttaatgcatcttgccttatctttttttattactgtgtacaaagatttttttacacaaagaaacttaatgctgtattaataaattcagtgtgtagcttcaattgggatagttccaaaagtgaagattttgtgaggaataagtgcaaattttttttttattttaaaaaattctttgaaactcttaagtctttgtgtctgcaatgaaattgtactccttgacagttgatagattatatattcttccatccctcaaacttgcattccactatatttattttttggcaaaagatgagctgtatttgtttgaaatctgagacactatgttcaattggatgtatctgttcaaatttattcccacgtgacgtggaagtccttcgttggatgtcacaacactacatttaaggttggtaaggatgacttggaggtccatggttttcattaccaacattttaagattctgaatgtcgatggagtctcactgaagagtcaccaaaggtgcctgccctcctcccctgctgggaagtgtcagttggagactgtcccaagggtgctgaagaatccagtggcaggggttctggctgctttccatctgagtgtgggatgggaggggtgttcatgatcatttggatatagcaatctactctgagaaatggaacacaaggagttacctatcactttcacttataattccaaaagatgactacaaccatgtccatgctcagattcaaacagttttccatatcacttttgggtggtaagatgatttaattacagttttttttttaattggcagcaccactaaccattccttacattcttttttgtatgtgtggttttctttttatttaacccgcagccgacatcgtagtttcttgttttgttttgttttacagagctgttgcatgacttatgttaccatcctaaaaaacactatattaaacatggaataaattgtctttttatgaattaggctttttgaacatcctgtgttgggatttttttgtttttcaattggcaacaaaagctctgtagggctgcagacatttaaagttcacataatcatctgtaagacattatgtattttgtggaaatactagaatttttttcctgattttgccattatatggatttgctattttttgattaatgcaaaagtatatgactttgttttttatgtgatacaccataaatattaaagtgttgaatactaacagtgctgactacaagaaggatgtagtattttggctttctgcattacaacgtcttctggaggaagggagcaggatgggtttcatttgtatctagtgtgtgtcttaacatctttctaaatcggcagtgtaactgcatagtttaacttcctgtctgtctccctcattttactcttccctccttgtcttatgttttggcttttgtgtatcagagcatctttctttgcagcatcctagtcttgcttcagtttctgtggtctcttttcatcctgcttgaagattcggagtgtggaaggaggctaggaagtctggtgcagtaggtgagcagacctcttgctgcccagcccagggtgggtggggcgcacacctgtctttgtgcatgcaaatctgatacacctggcgcatcctctggagagcacaacgcatggaaaggtctggaagctctgtgtagccattccttctgcagtcatcctacccaagtaaaagtaaccttggctatgttaccaccgttttggtcacccaggaggacatcttagcaagggtgcctgcgagggagtgtgggactgggcctcatcctcgccggcgttggaaaccaaggccttgtatgccacgccttatgaagcactgtttcacagttactttcacttcccgaataaaggttaccaggtaattaatatttttattgaggtgtttgtgtgtttttcaatgtaagcatcatgagaaataaagcaaagttcaga

SEQ ID NO: 6482 - protein, 111 aa, Homo sapiens
MNIFRLTGDLSHLAAIVILLLKIWKTRSCAGERRGKARKTGEAETITTHYLFFLGLYRALYLVNWIWRFYFEGFFDLIAVVAGVVQTILYCDFFYLYITKVLKGKKLSLPA

SEQ ID NO: 6483 - DNA, 2802 bp, Homo sapiens
gtccctggccacgtcgcgggcgatctcgccatcttcgccgccgccatgaacattttccggctgactggggacctgtcccacctggcggccatcgtcatcctgctgctgaagatctggaagacgcgctcctgcgccggtatttctgggaaaagccagcttctgtttgcactggtcttcacaactcgttacctggatctttttacttcatttatttcattgtataacacatctatgaaggttatctaccttgcctgctcctatgccacagtgtacctgatctacctgaaatttaaggcaacctacgatggaaatcatgataccttccgagtggagtttctggtggtccctgtgggaggcctctcatttttagttaatcacgatttctctcctcttgagatcctctggaccttctccatctacctggagtccgtggctatccttccgcagctatttatgatcagcaagactggggaggccgagaccatcaccacccactacctgttcttcctgggcctctatcgtgctttgtatcttgtcaactggatctggcgcttctactttgagggcttctttgacctcattgctgtggtggccggcgtagtccagaccatcctatactgtgacttcttctacttgtacattacaaaagtactcaagggaaagaagctcagtttgccagcataagtgccaaagaccatcaccagcatctgtccttcagggtgctcggacagaattcttaccacagcaaaggcataagatgcttgatacggaaaatcagaaacttaactcttttgttgcagatagtcatcagtggctctgtaaaaacgcagaggaaaagagccagaaggtttctgtttaatgcatcttgccttatctttttttattactgtgtacaaagatttttttacacaaagaaacttaatgctgtattaataaattcagtgtgtagcttcaattgggatagttccaaaagtgaagattttgtgaggaataagtgcaaattttttttttattttaaaaaattctttgaaactcttaagtctttgtgtctgcaatgaaattgtactccttgacagttgatagattatatattcttccatccctcaaacttgcattccactatatttattttttggcaaaagatgagctgtatttgtttgaaatctgagacactatgttcaattggatgtatctgttcaaatttattcccacgtgacgtggaagtccttcgttggatgtcacaacactacatttaaggttggtaaggatgacttggaggtccatggttttcattaccaacattttaagattctgaatgtcgatggagtctcactgaagagtcaccaaaggtgcctgccctcctcccctgctgggaagtgtcagttggagactgtcccaagggtgctgaagaatccagtggcaggggttctggctgctttccatctgagtgtgggatgggaggggtgttcatgatcatttggatatagcaatctactctgagaaatggaacacaaggagttacctatcactttcacttataattccaaaagatgactacaaccatgtccatgctcagattcaaacagttttccatatcacttttgggtggtaagatgatttaattacagttttttttttaattggcagcaccactaaccattccttacattcttttttgtatgtgtggttttctttttatttaacccgcagccgacatcgtagtttcttgttttgttttgttttacagagctgttgcatgacttatgttaccatcctaaaaaacactatattaaacatggaataaattgtctttttatgaattaggctttttgaacatcctgtgttgggatttttttgtttttcaattggcaacaaaagctctgtagggctgcagacatttaaagttcacataatcatctgtaagacattatgtattttgtggaaatactagaatttttttcctgattttgccattatatggatttgctattttttgattaatgcaaaagtatatgactttgttttttatgtgatacaccataaatattaaagtgttgaatactaacagtgctgactacaagaaggatgtagtattttggctttctgcattacaacgtcttctggaggaagggagcaggatgggtttcatttgtatctagtgtgtgtcttaacatctttctaaatcggcagtgtaactgcatagtttaacttcctgtctgtctccctcattttactcttccctccttgtcttatgttttggcttttgtgtatcagagcatctttctttgcagcatcctagtcttgcttcagtttctgtggtctcttttcatcctgcttgaagattcggagtgtggaaggaggctaggaagtctggtgcagtaggtgagcagacctcttgctgcccagcccagggtgggtggggcgcacacctgtctttgtgcatgcaaatctgatacacctggcgcatcctctggagagcacaacgcatggaaaggtctggaagctctgtgtagccattccttctgcagtcatcctacccaagtaaaagtaaccttggctatgttaccaccgttttggtcacccaggaggacatcttagcaagggtgcctgcgagggagtgtgggactgggcctcatcctcgccggcgttggaaaccaaggccttgtatgccacgccttatgaagcactgtttcacagttactttcacttcccgaataaaggttaccaggtaattaatatttttattgaggtgtttgtgtgtttttcaatgtaagcatcatgagaaataaagcaaagttcaga

SEQ ID NO: 6484 - protein, 212 aa, Homo sapiens; identical to SEQ ID NO: 826

SEQ ID NO: 6485 - DNA, 2637 bp, Homo sapiens
agttcggccacgtccctggccacgtcgcgggcgatctcgccatcttcgccgcttcctctcaggggccgccgcctcctgagccgcccagccccggggccgccgcgctgcgccgaccgccaccgccgccgccgccatgaacattttccggctgactggggacctgtcccacctggcggccatcgtcatcctgctgctgaagatctggaagacgcgctcctgcgccggtatttctgggaaaagccagcttctgtttgcactggtcttcacaactcgttacctggatctttttacttcatttatttcattgtataacacatctatgaaggttatctaccttgcctgctcctatgccacagtgtacctgatctacctgaaatttaaggcaacctacgatggaaatcatgataccttccgagtggagtttctggtggtccctgtgggaggcctctcatttttagttaatcacgatttctctcctcttgagtactcaagggaaagaagctcagtttgccagcataagtgccaaagaccatcaccagcatctgtccttcagggtgctcggacagaattcttaccacagcaaaggcataagatgcttgatacggaaaatcagaaacttaactcttttgttgcagatagtcatcagtggctctgtaaaaacgcagaggaaaagagccagaaggtttctgtttaatgcatcttgccttatctttttttattactgtgtacaaagatttttttacacaaagaaacttaatgctgtattaataaattcagtgtgtagcttcaattgggatagttccaaaagtgaagattttgtgaggaataagtgcaaattttttttttattttaaaaaattctttgaaactcttaagtctttgtgtctgcaatgaaattgtactccttgacagttgatagattatatattcttccatccctcaaacttgcattccactatatttattttttggcaaaagatgagctgtatttgtttgaaatctgagacactatgttcaattggatgtatctgttcaaatttattcccacgtgacgtggaagtccttcgttggatgtcacaacactacatttaaggttggtaaggatgacttggaggtccatggttttcattaccaacattttaagattctgaatgtcgatggagtctcactgaagagtcaccaaaggtgcctgccctcctcccctgctgggaagtgtcagttggagactgtcccaagggtgctgaagaatccagtggcaggggttctggctgctttccatctgagtgtgggatgggaggggtgttcatgatcatttggatatagcaatctactctgagaaatggaacacaaggagttacctatcactttcacttataattccaaaagatgactacaaccatgtccatgctcagattcaaacagttttccatatcacttttgggtggtaagatgatttaattacagttttttttttaattggcagcaccactaaccattccttacattcttttttgtatgtgtggttttctttttatttaacccgcagccgacatcgtagtttcttgttttgttttgttttacagagctgttgcatgacttatgttaccatcctaaaaaacactatattaaacatggaataaattgtctttttatgaattaggctttttgaacatcctgtgttgggatttttttgtttttcaattggcaacaaaagctctgtagggctgcagacatttaaagttcacataatcatctgtaagacattatgtattttgtggaaatactagaatttttttcctgattttgccattatatggatttgctattttttgattaatgcaaaagtatatgactttgttttttatgtgatacaccataaatattaaagtgttgaatactaacagtgctgactacaagaaggatgtagtattttggctttctgcattacaacgtcttctggaggaagggagcaggatgggtttcatttgtatctagtgtgtgtcttaacatctttctaaatcggcagtgtaactgcatagtttaacttcctgtctgtctccctcattttactcttccctccttgtcttatgttttggcttttgtgtatcagagcatctttctttgcagcatcctagtcttgcttcagtttctgtggtctcttttcatcctgcttgaagattcggagtgtggaaggaggctaggaagtctggtgcagtaggtgagcagacctcttgctgcccagcccagggtgggtggggcgcacacctgtctttgtgcatgcaaatctgatacacctggcgcatcctctggagagcacaacgcatggaaaggtctggaagctctgtgtagccattccttctgcagtcatcctacccaagtaaaagtaaccttggctatgttaccaccgttttggtcacccaggaggacatcttagcaagggtgcctgcgagggagtgtgggactgggcctcatcctcgccggcgttggaaaccaaggccttgtatgccacgccttatgaagcactgtttcacagttactttcacttcccgaataaaggttaccaggtaattaatatttttattgaggtgtttgtgtgtttttcaatgtaagcatcatgagaaataaagcaaagttcaga

SEQ ID NO: 6486 - protein, 186 aa, Homo sapiens
MNIFRLTGDLSHLAAIVILLLKIWKTRSCAGISGKSQLLFALVFTTRYLDLFTSFISLYNTSMKVIYLACSYATVYLIYLKFKATYDGNHDTFRVEFLVVPVGGLSFLVNHDFSPLEYSRERSSVCQHKCQRPSPASVLQGARTEFLPQQRHKMLDTENQKLNSFVADSHQWLCKNAEEKSQKVSV

SEQ ID NO: 6487 - DNA, 2909 bp, Homo sapiens
cgcgcgcgcgcgcgccggcagttcggccacgtccctggccacgtcgcgggcgatctcgccatcttcgccgcttcctctcaggggccgccgcctcctgagccgcccagccccggggccgccgcgctgcgccgaccgccaccgccgccgccgccatgaacattttccggctgactggggacctgtcccacctggcggccatcgtcatcctgctgctgaagatctggaagacgcgctcctgcgccggtatttctgggaaaagccagcttctgtttgcactggtcttcacaactcgttacctggatctttttacttcatttatttcattgtataacacatctatgaaggttatctaccttgcctgctcctatgccacagtgtacctgatctacctgaaatttaaggcaacctacgatggaaatcatgataccttccgagtggagtttctggtggtccctgtgggaggcctctcatttttagttaatcacgatttctctcctcttgagatcctctggaccttctccatctacctggagtccgtggctatccttccgcagctatttatgatcagcaagactggggaggccgagaccatcaccacccactacctgttcttcctgggcctctatcgtgctttgtatcttgtcaactggatctggcgcttctactttgagggcttctttgacctcattgctgtggtggccggcgtagtccagaccatcctatactgtgacttcttctacttgtacattacaaaagtactcaagggaaagaagctcagtttgccagcataagtgccaaagaccatcaccagcatctgtccttcagggtgctcggacagaattcttaccacagcaaaggcataagatgcttgatacggaaaatcagaaacttaactcttttgttgcagatagtcatcagtggctctgtaaaaacgcagaggaaaagagccagaaggtttctgtttaatgcatcttgccttatctttttttattactgtgtacaaagatttttttacacaaagaaacttaatgctgtattaataaattcagtgtgtagcttcaattgggatagttccaaaagtgaagattttgtgaggaataagtgcaaattttttttttattttaaaaaattctttgaaactcttaagtctttgtgtctgcaatgaaattgtactccttgacagttgatagattatatattcttccatccctcaaacttgcattccactatatttattttttggcaaaagatgagctgtatttgtttgaaatctgagacactatgttcaattggatgtatctgttcaaatttattcccacgtgacgtggaagtccttcgttggatgtcacaacactacatttaaggttggtaaggatgacttggaggtccatggttttcattaccaacattttaagattctgaatgtcgatggagtctcactgaagagtcaccaaaggtgcctgccctcctcccctgctgggaagtgtcagttggagactgtcccaagggtgctgaagaatccagtggcaggggttctggctgctttccatctgagtgtgggatgggaggggtgttcatgatcatttggatatagcaatctactctgagaaatggaacacaaggagttacctatcactttcacttataattccaaaagatgactacaaccatgtccatgctcagattcaaacagttttccatatcacttttgggtggtaagatgatttaattacagttttttttttaattggcagcaccactaaccattccttacattcttttttgtatgtgtggttttctttttatttaacccgcagccgacatcgtagtttcttgttttgttttgttttacagagctgttgcatgacttatgttaccatcctaaaaaacactatattaaacatggaataaattgtctttttatgaattaggctttttgaacatcctgtgttgggatttttttgtttttcaattggcaacaaaagctctgtagggctgcagacatttaaagttcacataatcatctgtaagacattatgtattttgtggaaatactagaatttttttcctgattttgccattatatggatttgctattttttgattaatgcaaaagtatatgactttgttttttatgtgatacaccataaatattaaagtgttgaatactaacagtgctgactacaagaaggatgtagtattttggctttctgcattacaacgtcttctggaggaagggagcaggatgggtttcatttgtatctagtgtgtgtcttaacatctttctaaatcggcagtgtaactgcatagtttaacttcctgtctgtctccctcattttactcttccctccttgtcttatgttttggcttttgtgtatcagagcatctttctttgcagcatcctagtcttgcttcagtttctgtggtctcttttcatcctgcttgaagattcggagtgtggaaggaggctaggaagtctggtgcagtaggtgagcagacctcttgctgcccagcccagggtgggtggggcgcacacctgtctttgtgcatgcaaatctgatacacctggcgcatcctctggagagcacaacgcatggaaaggtctggaagctctgtgtagccattccttctgcagtcatcctacccaagtaaaagtaaccttggctatgttaccaccgttttggtcacccaggaggacatcttagcaagggtgcctgcgagggagtgtgggactgggcctcatcctcgccggcgttggaaaccaaggccttgtatgccacgccttatgaagcactgtttcacagttactttcacttcccgaataaaggttaccaggtaattaatatttttattgaggtgtttgtgtgtttttcaatgtaagcatcatgagaaataaagcaaagttcaga

SEQ ID NO: 6488 - protein, 212 aa, Homo sapiens; identical to SEQ ID NO: 826

SEQ ID NO: 6489 - DNA, 2439 bp, Homo sapiens
cccggggccgccgcgctgcgccgaccgccaccgccgccgccgccatgaacattttccggctgactggggacctgtcccacctggcggccatcgtcatcctgctgctgaagatctggaagacgcgctcctgcgccggtgagcggcgggggaaggcccgcaagactggggaggccgagaccatcaccacccactacctgttcttcctgggcctctatcgtgctttgtatcttgtcaactggatctggcgcttctactttgagggcttctttgacctcattgctgtggtggccggcgtagtccagaccatcctatactgtgacttcttctacttgtacattacaaaagtactcaagggaaagaagctcagtttgccagcataagtgccaaagaccatcaccagcatctgtccttcagggtgctcggacagaattcttaccacagcaaaggcataagatgcttgatacggaaaatcagaaacttaactcttttgttgcagatagtcatcagtggctctgtaaaaacgcagaggaaaagagccagaaggtttctgtttaatgcatcttgccttatctttttttattactgtgtacaaagatttttttacacaaagaaacttaatgctgtattaataaattcagtgtgtagcttcaattgggatagttccaaaagtgaagattttgtgaggaataagtgcaaattttttttttattttaaaaaattctttgaaactcttaagtctttgtgtctgcaatgaaattgtactccttgacagttgatagattatatattcttccatccctcaaacttgcattccactatatttattttttggcaaaagatgagctgtatttgtttgaaatctgagacactatgttcaattggatgtatctgttcaaatttattcccacgtgacgtggaagtccttcgttggatgtcacaacactacatttaaggttggtaaggatgacttggaggtccatggttttcattaccaacattttaagattctgaatgtcgatggagtctcactgaagagtcaccaaaggtgcctgccctcctcccctgctgggaagtgtcagttggagactgtcccaagggtgctgaagaatccagtggcaggggttctggctgctttccatctgagtgtgggatgggaggggtgttcatgatcatttggatatagcaatctactctgagaaatggaacacaaggagttacctatcactttcacttataattccaaaagatgactacaaccatgtccatgctcagattcaaacagttttccatatcacttttgggtggtaagatgatttaattacagttttttttttaattggcagcaccactaaccattccttacattcttttttgtatgtgtggttttctttttatttaacccgcagccgacatcgtagtttcttgttttgttttgttttacagagctgttgcatgacttatgttaccatcctaaaaaacactatattaaacatggaataaattgtctttttatgaattaggctttttgaacatcctgtgttgggatttttttgtttttcaattggcaacaaaagctctgtagggctgcagacatttaaagttcacataatcatctgtaagacattatgtattttgtggaaatactagaatttttttcctgattttgccattatatggatttgctattttttgattaatgcaaaagtatatgactttgttttttatgtgatacaccataaatattaaagtgttgaatactaacagtgctgactacaagaaggatgtagtattttggctttctgcattacaacgtcttctggaggaagggagcaggatgggtttcatttgtatctagtgtgtgtcttaacatctttctaaatcggcagtgtaactgcatagtttaacttcctgtctgtctccctcattttactcttccctccttgtcttatgttttggcttttgtgtatcagagcatctttctttgcagcatcctagtcttgcttcagtttctgtggtctcttttcatcctgcttgaagattcggagtgtggaaggaggctaggaagtctggtgcagtaggtgagcagacctcttgctgcccagcccagggtgggtggggcgcacacctgtctttgtgcatgcaaatctgatacacctggcgcatcctctggagagcacaacgcatggaaaggtctggaagctctgtgtagccattccttctgcagtcatcctacccaagtaaaagtaaccttggctatgttaccaccgttttggtcacccaggaggacatcttagcaagggtgcctgcgagggagtgtgggactgggcctcatcctcgccggcgttggaaaccaaggccttgtatgccacgccttatgaagcactgtttcacagttactttcacttcccgaataaaggttaccaggtaattaatattttt

SEQ ID NO: 6490 - protein, 111 aa, Homo sapiens; identical to SEQ ID NO: 6482

SEQ ID NO: 6491 - DNA, 2743 bp, Homo sapiens
gtccctggccacgtcgcgggcgatctcgccatcttcgccgccgccatgaacattttccggctgactggggacctgtcccacctggcggccatcgtcatcctgctgctgaagatctggaagacgcgctcctgcgccggtatttctgggaaaagccagcttctgtttgcactggtcttcacaactcgttacctggatctttttacttcatttatttcattgtataacacatctatgaaggttatctaccttgcctgctcctatgccacagtgtacctgatctacctgaaatttaaggcaacctacgatggaaatcatgataccttccgagtggagtttctggtggtccctgtgggaggcctctcatttttagttaatcacgatttctctcctcttgagatcctctggaccttctccatctacctggagtccgtggctatccttccgcagctatttatgatcagcaagactggggaggccgagaccatcaccacccactacctgttcttcctgggcctctatcgtgctttgtatcttgtcaactggatctggcgcttctactttgagggcttctttgacctcattgctgtggtggccggcgtagtccagaccatcctatactgtgacttcttctacttgtacattacaaaagtactcaagggaaagaagctcagtttgccagcataagtgccaaagaccatcaccagcatctgtccttcagggtgctcggacagaattcttaccacagcaaaggcataagatgcttgatacggaaaatcagaaacttaactcttttgttgcagatagtcatcagtggctctgtaaaaacgcagaggaaaagagccagaaggtttctgtttaatgcatcttgccttatctttttttattactgtgtacaaagatttttttacacaaagaaacttaatgctgtattaataaattcagtgtgtagcttcaattgggatagttccaaaagtgaagattttgtgaggaataagtgcaaattttttttttattttaaaaaattctttgaaactcttaagtctttgtgtctgcaatgaaattgtactccttgacagttgatagattatatattcttccatccctcaaacttgcattccactatatttattttttggcaaaagatgagctgtatttgtttgaaatctgagacactatgttcaattggatgtatctgttcaaatttattcccacgtgacgtggaagtccttcgttggatgtcacaacactacatttaaggttggtaaggatgacttggaggtccatggttttcattaccaacattttaagattctgaatgtcgatggagtctcactgaagagtcaccaaaggtgcctgccctcctcccctgctgggaagtgtcagttggagactgtcccaagggtgctgaagaatccagtggcaggggttctggctgctttccatctgagtgtgggatgggaggggtgttcatgatcatttggatatagcaatctactctgagaaatggaacacaaggagttacctatcactttcacttataattccaaaagatgactacaaccatgtccatgctcagattcaaacagttttccatatcacttttgggtggtaagatgatttaattacagttttttttttaattggcagcaccactaaccattccttacattcttttttgtatgtgtggttttctttttatttaacccgcagccgacatcgtagtttcttgttttgttttgttttacagagctgttgcatgacttatgttaccatcctaaaaaacactatattaaacatggaataaattgtctttttatgaattaggctttttgaacatcctgtgttgggatttttttgtttttcaattggcaacaaaagctctgtagggctgcagacatttaaagttcacataatcatctgtaagacattatgtattttgtggaaatactagaatttttttcctgattttgccattatatggatttgctattttttgattaatgcaaaagtatatgactttgttttttatgtgatacaccataaatattaaagtgttgaatactaacagtgctgactacaagaaggatgtagtattttggctttctgcattacaacgtcttctggaggaagggagcaggatgggtttcatttgtatctagtgtgtgtcttaacatctttctaaatcggcagtgtaactgcatagtttaacttcctgtctgtctccctcattttactcttccctccttgtcttatgttttggcttttgtgtatcagagcatctttctttgcagcatcctagtcttgcttcagtttctgtggtctcttttcatcctgcttgaagattcggagtgtggaaggaggctaggaagtctggtgcagtaggtgagcagacctcttgctgcccagcccagggtgggtggggcgcacacctgtctttgtgcatgcaaatctgatacacctggcgcatcctctggagagcacaacgcatggaaaggtctggaagctctgtgtagccattccttctgcagtcatcctacccaagtaaaagtaaccttggctatgttaccaccgttttggtcacccaggaggacatcttagcaagggtgcctgcgagggagtgtgggactgggcctcatcctcgccggcgttggaaaccaaggccttgtatgccacgccttatgaagcactgtttcacagttactttcacttcccgaataaaggttaccaggtaattaatattttt

SEQ ID NO: 6492 - protein, 212 aa, Homo sapiens; identical to SEQ ID NO: 826

SEQ ID NO: 6493 - DNA, 2578 bp, Homo sapiens
agttcggccacgtccctggccacgtcgcgggcgatctcgccatcttcgccgcttcctctcaggggccgccgcctcctgagccgcccagccccggggccgccgcgctgcgccgaccgccaccgccgccgccgccatgaacattttccggctgactggggacctgtcccacctggcggccatcgtcatcctgctgctgaagatctggaagacgcgctcctgcgccggtatttctgggaaaagccagcttctgtttgcactggtcttcacaactcgttacctggatctttttacttcatttatttcattgtataacacatctatgaaggttatctaccttgcctgctcctatgccacagtgtacctgatctacctgaaatttaaggcaacctacgatggaaatcatgataccttccgagtggagtttctggtggtccctgtgggaggcctctcatttttagttaatcacgatttctctcctcttgagtactcaagggaaagaagctcagtttgccagcataagtgccaaagaccatcaccagcatctgtccttcagggtgctcggacagaattcttaccacagcaaaggcataagatgcttgatacggaaaatcagaaacttaactcttttgttgcagatagtcatcagtggctctgtaaaaacgcagaggaaaagagccagaaggtttctgtttaatgcatcttgccttatctttttttattactgtgtacaaagatttttttacacaaagaaacttaatgctgtattaataaattcagtgtgtagcttcaattgggatagttccaaaagtgaagattttgtgaggaataagtgcaaattttttttttattttaaaaaattctttgaaactcttaagtctttgtgtctgcaatgaaattgtactccttgacagttgatagattatatattcttccatccctcaaacttgcattccactatatttattttttggcaaaagatgagctgtatttgtttgaaatctgagacactatgttcaattggatgtatctgttcaaatttattcccacgtgacgtggaagtccttcgttggatgtcacaacactacatttaaggttggtaaggatgacttggaggtccatggttttcattaccaacattttaagattctgaatgtcgatggagtctcactgaagagtcaccaaaggtgcctgccctcctcccctgctgggaagtgtcagttggagactgtcccaagggtgctgaagaatccagtggcaggggttctggctgctttccatctgagtgtgggatgggaggggtgttcatgatcatttggatatagcaatctactctgagaaatggaacacaaggagttacctatcactttcacttataattccaaaagatgactacaaccatgtccatgctcagattcaaacagttttccatatcacttttgggtggtaagatgatttaattacagttttttttttaattggcagcaccactaaccattccttacattcttttttgtatgtgtggttttctttttatttaacccgcagccgacatcgtagtttcttgttttgttttgttttacagagctgttgcatgacttatgttaccatcctaaaaaacactatattaaacatggaataaattgtctttttatgaattaggctttttgaacatcctgtgttgggatttttttgtttttcaattggcaacaaaagctctgtagggctgcagacatttaaagttcacataatcatctgtaagacattatgtattttgtggaaatactagaatttttttcctgattttgccattatatggatttgctattttttgattaatgcaaaagtatatgactttgttttttatgtgatacaccataaatattaaagtgttgaatactaacagtgctgactacaagaaggatgtagtattttggctttctgcattacaacgtcttctggaggaagggagcaggatgggtttcatttgtatctagtgtgtgtcttaacatctttctaaatcggcagtgtaactgcatagtttaacttcctgtctgtctccctcattttactcttccctccttgtcttatgttttggcttttgtgtatcagagcatctttctttgcagcatcctagtcttgcttcagtttctgtggtctcttttcatcctgcttgaagattcggagtgtggaaggaggctaggaagtctggtgcagtaggtgagcagacctcttgctgcccagcccagggtgggtggggcgcacacctgtctttgtgcatgcaaatctgatacacctggcgcatcctctggagagcacaacgcatggaaaggtctggaagctctgtgtagccattccttctgcagtcatcctacccaagtaaaagtaaccttggctatgttaccaccgttttggtcacccaggaggacatcttagcaagggtgcctgcgagggagtgtgggactgggcctcatcctcgccggcgttggaaaccaaggccttgtatgccacgccttatgaagcactgtttcacagttactttcacttcccgaataaaggttaccaggtaattaatattttt

SEQ ID NO: 6494 - protein, 186 aa, Homo sapiens; identical to SEQ ID NO: 6486

SEQ ID NO: 6495 - DNA, 2850 bp, Homo sapiens
cgcgcgcgcgcgcgccggcagttcggccacgtccctggccacgtcgcgggcgatctcgccatcttcgccgcttcctctcaggggccgccgcctcctgagccgcccagccccggggccgccgcgctgcgccgaccgccaccgccgccgccgccatgaacattttccggctgactggggacctgtcccacctggcggccatcgtcatcctgctgctgaagatctggaagacgcgctcctgcgccggtatttctgggaaaagccagcttctgtttgcactggtcttcacaactcgttacctggatctttttacttcatttatttcattgtataacacatctatgaaggttatctaccttgcctgctcctatgccacagtgtacctgatctacctgaaatttaaggcaacctacgatggaaatcatgataccttccgagtggagtttctggtggtccctgtgggaggcctctcatttttagttaatcacgatttctctcctcttgagatcctctggaccttctccatctacctggagtccgtggctatccttccgcagctatttatgatcagcaagactggggaggccgagaccatcaccacccactacctgttcttcctgggcctctatcgtgctttgtatcttgtcaactggatctggcgcttctactttgagggcttctttgacctcattgctgtggtggccggcgtagtccagaccatcctatactgtgacttcttctacttgtacattacaaaagtactcaagggaaagaagctcagtttgccagcataagtgccaaagaccatcaccagcatctgtccttcagggtgctcggacagaattcttaccacagcaaaggcataagatgcttgatacggaaaatcagaaacttaactcttttgttgcagatagtcatcagtggctctgtaaaaacgcagaggaaaagagccagaaggtttctgtttaatgcatcttgccttatctttttttattactgtgtacaaagatttttttacacaaagaaacttaatgctgtattaataaattcagtgtgtagcttcaattgggatagttccaaaagtgaagattttgtgaggaataagtgcaaattttttttttattttaaaaaattctttgaaactcttaagtctttgtgtctgcaatgaaattgtactccttgacagttgatagattatatattcttccatccctcaaacttgcattccactatatttattttttggcaaaagatgagctgtatttgtttgaaatctgagacactatgttcaattggatgtatctgttcaaatttattcccacgtgacgtggaagtccttcgttggatgtcacaacactacatttaaggttggtaaggatgacttggaggtccatggttttcattaccaacattttaagattctgaatgtcgatggagtctcactgaagagtcaccaaaggtgcctgccctcctcccctgctgggaagtgtcagttggagactgtcccaagggtgctgaagaatccagtggcaggggttctggctgctttccatctgagtgtgggatgggaggggtgttcatgatcatttggatatagcaatctactctgagaaatggaacacaaggagttacctatcactttcacttataattccaaaagatgactacaaccatgtccatgctcagattcaaacagttttccatatcacttttgggtggtaagatgatttaattacagttttttttttaattggcagcaccactaaccattccttacattcttttttgtatgtgtggttttctttttatttaacccgcagccgacatcgtagtttcttgttttgttttgttttacagagctgttgcatgacttatgttaccatcctaaaaaacactatattaaacatggaataaattgtctttttatgaattaggctttttgaacatcctgtgttgggatttttttgtttttcaattggcaacaaaagctctgtagggctgcagacatttaaagttcacataatcatctgtaagacattatgtattttgtggaaatactagaatttttttcctgattttgccattatatggatttgctattttttgattaatgcaaaagtatatgactttgttttttatgtgatacaccataaatattaaagtgttgaatactaacagtgctgactacaagaaggatgtagtattttggctttctgcattacaacgtcttctggaggaagggagcaggatgggtttcatttgtatctagtgtgtgtcttaacatctttctaaatcggcagtgtaactgcatagtttaacttcctgtctgtctccctcattttactcttccctccttgtcttatgttttggcttttgtgtatcagagcatctttctttgcagcatcctagtcttgcttcagtttctgtggtctcttttcatcctgcttgaagattcggagtgtggaaggaggctaggaagtctggtgcagtaggtgagcagacctcttgctgcccagcccagggtgggtggggcgcacacctgtctttgtgcatgcaaatctgatacacctggcgcatcctctggagagcacaacgcatggaaaggtctggaagctctgtgtagccattccttctgcagtcatcctacccaagtaaaagtaaccttggctatgttaccaccgttttggtcacccaggaggacatcttagcaagggtgcctgcgagggagtgtgggactgggcctcatcctcgccggcgttggaaaccaaggccttgtatgccacgccttatgaagcactgtttcacagttactttcacttcccgaataaaggttaccaggtaattaatattttt

SEQ ID NO: 6496 - protein, 212 aa, Homo sapiens; identical to SEQ ID NO: 826

SEQ ID NO: 6497 - DNA, 1777 bp, Homo sapiens
cccggggccgccgcgctgcgccgaccgccaccgccgccgccgccatgaacattttccggctgactggggacctgtcccacctggcggccatcgtcatcctgctgctgaagatctggaagacgcgctcctgcgccggtgagcggcgggggaaggcccgcaagactggggaggccgagaccatcaccacccactacctgttcttcctgggcctctatcgtgctttgtatcttgtcaactggatctggcgcttctactttgagggcttctttgacctcattgctgtggtggccggcgtagtccagaccatcctatactgtgacttcttctacttgtacattacaaaagtactcaagggaaagaagctcagtttgccagcataagtgccaaagaccatcaccagcatctgtccttcagggtgctcggacagaattcttaccacagcaaaggcataagatgcttgatacggaaaatcagaaacttaactcttttgttgcagatagtcatcagtggctctgtaaaaacgcagaggaaaagagccagaaggtttctgtttaatgcatcttgccttatctttttttattactgtgtacaaagatttttttacacaaagaaacttaatgctgtattaataaattcagtgtgtagcttcaattgggatagttccaaaagtgaagattttgtgaggaataagtgcaaattttttttttattttaaaaaattctttgaaactcttaagtctttgtgtctgcaatgaaattgtactccttgacagttgatagattatatattcttccatccctcaaacttgcattccactatatttattttttggcaaaagatgagctgtatttgtttgaaatctgagacactatgttcaattggatgtatctgttcaaatttattcccacgtgacgtggaagtccttcgttggatgtcacaacactacatttaaggttggtaaggatgacttggaggtccatggttttcattaccaacattttaagattctgaatgtcgatggagtctcactgaagagtcaccaaaggtgcctgccctcctcccctgctgggaagtgtcagttggagactgtcccaagggtgctgaagaatccagtggcaggggttctggctgctttccatctgagtgtgggatgggaggggtgttcatgatcatttggatatagcaatctactctgagaaatggaacacaaggagttacctatcactttcacttataattccaaaagatgactacaaccatgtccatgctcagattcaaacagttttccatatcacttttgggtggtaagatgatttaattacagttttttttttaattggcagcaccactaaccattccttacattcttttttgtatgtgtggttttctttttatttaacccgcagccgacatcgtagtttcttgttttgttttgttttacagagctgttgcatgacttatgttaccatcctaaaaaacactatattaaacatggaataaattgtctttttatgaattaggctttttgaacatcctgtgttgggatttttttgtttttcaattggcaacaaaagctctgtagggctgcagacatttaaagttcacataatcatctgtaagacattatgtattttgtggaaatactagaatttttttcctgattttgccattatatggatttgctattttttgattaatgcaaaagtatatgactttgttttttatgtgatacaccataaatattaaagtgttgaatactaacagtgctgactacaag

SEQ ID NO: 6498 - protein, 111 aa, Homo sapiens; identical to SEQ ID NO: 6482

SEQ ID NO: 6499 - DNA, 2081 bp, Homo sapiens
gtccctggccacgtcgcgggcgatctcgccatcttcgccgccgccatgaacattttccggctgactggggacctgtcccacctggcggccatcgtcatcctgctgctgaagatctggaagacgcgctcctgcgccggtatttctgggaaaagccagcttctgtttgcactggtcttcacaactcgttacctggatctttttacttcatttatttcattgtataacacatctatgaaggttatctaccttgcctgctcctatgccacagtgtacctgatctacctgaaatttaaggcaacctacgatggaaatcatgataccttccgagtggagtttctggtggtccctgtgggaggcctctcatttttagttaatcacgatttctctcctcttgagatcctctggaccttctccatctacctggagtccgtggctatccttccgcagctatttatgatcagcaagactggggaggccgagaccatcaccacccactacctgttcttcctgggcctctatcgtgctttgtatcttgtcaactggatctggcgcttctactttgagggcttctttgacctcattgctgtggtggccggcgtagtccagaccatcctatactgtgacttcttctacttgtacattacaaaagtactcaagggaaagaagctcagtttgccagcataagtgccaaagaccatcaccagcatctgtccttcagggtgctcggacagaattcttaccacagcaaaggcataagatgcttgatacggaaaatcagaaacttaactcttttgttgcagatagtcatcagtggctctgtaaaaacgcagaggaaaagagccagaaggtttctgtttaatgcatcttgccttatctttttttattactgtgtacaaagatttttttacacaaagaaacttaatgctgtattaataaattcagtgtgtagcttcaattgggatagttccaaaagtgaagattttgtgaggaataagtgcaaattttttttttattttaaaaaattctttgaaactcttaagtctttgtgtctgcaatgaaattgtactccttgacagttgatagattatatattcttccatccctcaaacttgcattccactatatttattttttggcaaaagatgagctgtatttgtttgaaatctgagacactatgttcaattggatgtatctgttcaaatttattcccacgtgacgtggaagtccttcgttggatgtcacaacactacatttaaggttggtaaggatgacttggaggtccatggttttcattaccaacattttaagattctgaatgtcgatggagtctcactgaagagtcaccaaaggtgcctgccctcctcccctgctgggaagtgtcagttggagactgtcccaagggtgctgaagaatccagtggcaggggttctggctgctttccatctgagtgtgggatgggaggggtgttcatgatcatttggatatagcaatctactctgagaaatggaacacaaggagttacctatcactttcacttataattccaaaagatgactacaaccatgtccatgctcagattcaaacagttttccatatcacttttgggtggtaagatgatttaattacagttttttttttaattggcagcaccactaaccattccttacattcttttttgtatgtgtggttttctttttatttaacccgcagccgacatcgtagtttcttgttttgttttgttttacagagctgttgcatgacttatgttaccatcctaaaaaacactatattaaacatggaataaattgtctttttatgaattaggctttttgaacatcctgtgttgggatttttttgtttttcaattggcaacaaaagctctgtagggctgcagacatttaaagttcacataatcatctgtaagacattatgtattttgtggaaatactagaatttttttcctgattttgccattatatggatttgctattttttgattaatgcaaaagtatatgactttgttttttatgtgatacaccataaatattaaagtgttgaatactaacagtgctgactacaag

SEQ ID NO: 6500 - protein, 212 aa, Homo sapiens; identical to SEQ ID NO: 826

SEQ ID NO: 6501 - DNA, 1916 bp, Homo sapiens
agttcggccacgtccctggccacgtcgcgggcgatctcgccatcttcgccgcttcctctcaggggccgccgcctcctgagccgcccagccccggggccgccgcgctgcgccgaccgccaccgccgccgccgccatgaacattttccggctgactggggacctgtcccacctggcggccatcgtcatcctgctgctgaagatctggaagacgcgctcctgcgccggtatttctgggaaaagccagcttctgtttgcactggtcttcacaactcgttacctggatctttttacttcatttatttcattgtataacacatctatgaaggttatctaccttgcctgctcctatgccacagtgtacctgatctacctgaaatttaaggcaacctacgatggaaatcatgataccttccgagtggagtttctggtggtccctgtgggaggcctctcatttttagttaatcacgatttctctcctcttgagtactcaagggaaagaagctcagtttgccagcataagtgccaaagaccatcaccagcatctgtccttcagggtgctcggacagaattcttaccacagcaaaggcataagatgcttgatacggaaaatcagaaacttaactcttttgttgcagatagtcatcagtggctctgtaaaaacgcagaggaaaagagccagaaggtttctgtttaatgcatcttgccttatctttttttattactgtgtacaaagatttttttacacaaagaaacttaatgctgtattaataaattcagtgtgtagcttcaattgggatagttccaaaagtgaagattttgtgaggaataagtgcaaattttttttttattttaaaaaattctttgaaactcttaagtctttgtgtctgcaatgaaattgtactccttgacagttgatagattatatattcttccatccctcaaacttgcattccactatatttattttttggcaaaagatgagctgtatttgtttgaaatctgagacactatgttcaattggatgtatctgttcaaatttattcccacgtgacgtggaagtccttcgttggatgtcacaacactacatttaaggttggtaaggatgacttggaggtccatggttttcattaccaacattttaagattctgaatgtcgatggagtctcactgaagagtcaccaaaggtgcctgccctcctcccctgctgggaagtgtcagttggagactgtcccaagggtgctgaagaatccagtggcaggggttctggctgctttccatctgagtgtgggatgggaggggtgttcatgatcatttggatatagcaatctactctgagaaatggaacacaaggagttacctatcactttcacttataattccaaaagatgactacaaccatgtccatgctcagattcaaacagttttccatatcacttttgggtggtaagatgatttaattacagttttttttttaattggcagcaccactaaccattccttacattcttttttgtatgtgtggttttctttttatttaacccgcagccgacatcgtagtttcttgttttgttttgttttacagagctgttgcatgacttatgttaccatcctaaaaaacactatattaaacatggaataaattgtctttttatgaattaggctttttgaacatcctgtgttgggatttttttgtttttcaattggcaacaaaagctctgtagggctgcagacatttaaagttcacataatcatctgtaagacattatgtattttgtggaaatactagaatttttttcctgattttgccattatatggatttgctattttttgattaatgcaaaagtatatgactttgttttttatgtgatacaccataaatattaaagtgttgaatactaacagtgctgactacaag

SEQ ID NO: 6502 - protein, 186 aa, Homo sapiens; identical to SEQ ID NO: 6486

SEQ ID NO: 6503 - DNA, 2188 bp, Homo sapiens
cgcgcgcgcgcgcgccggcagttcggccacgtccctggccacgtcgcgggcgatctcgccatcttcgccgcttcctctcaggggccgccgcctcctgagccgcccagccccggggccgccgcgctgcgccgaccgccaccgccgccgccgccatgaacattttccggctgactggggacctgtcccacctggcggccatcgtcatcctgctgctgaagatctggaagacgcgctcctgcgccggtatttctgggaaaagccagcttctgtttgcactggtcttcacaactcgttacctggatctttttacttcatttatttcattgtataacacatctatgaaggttatctaccttgcctgctcctatgccacagtgtacctgatctacctgaaatttaaggcaacctacgatggaaatcatgataccttccgagtggagtttctggtggtccctgtgggaggcctctcatttttagttaatcacgatttctctcctcttgagatcctctggaccttctccatctacctggagtccgtggctatccttccgcagctatttatgatcagcaagactggggaggccgagaccatcaccacccactacctgttcttcctgggcctctatcgtgctttgtatcttgtcaactggatctggcgcttctactttgagggcttctttgacctcattgctgtggtggccggcgtagtccagaccatcctatactgtgacttcttctacttgtacattacaaaagtactcaagggaaagaagctcagtttgccagcataagtgccaaagaccatcaccagcatctgtccttcagggtgctcggacagaattcttaccacagcaaaggcataagatgcttgatacggaaaatcagaaacttaactcttttgttgcagatagtcatcagtggctctgtaaaaacgcagaggaaaagagccagaaggtttctgtttaatgcatcttgccttatctttttttattactgtgtacaaagatttttttacacaaagaaacttaatgctgtattaataaattcagtgtgtagcttcaattgggatagttccaaaagtgaagattttgtgaggaataagtgcaaattttttttttattttaaaaaattctttgaaactcttaagtctttgtgtctgcaatgaaattgtactccttgacagttgatagattatatattcttccatccctcaaacttgcattccactatatttattttttggcaaaagatgagctgtatttgtttgaaatctgagacactatgttcaattggatgtatctgttcaaatttattcccacgtgacgtggaagtccttcgttggatgtcacaacactacatttaaggttggtaaggatgacttggaggtccatggttttcattaccaacattttaagattctgaatgtcgatggagtctcactgaagagtcaccaaaggtgcctgccctcctcccctgctgggaagtgtcagttggagactgtcccaagggtgctgaagaatccagtggcaggggttctggctgctttccatctgagtgtgggatgggaggggtgttcatgatcatttggatatagcaatctactctgagaaatggaacacaaggagttacctatcactttcacttataattccaaaagatgactacaaccatgtccatgctcagattcaaacagttttccatatcacttttgggtggtaagatgatttaattacagttttttttttaattggcagcaccactaaccattccttacattcttttttgtatgtgtggttttctttttatttaacccgcagccgacatcgtagtttcttgttttgttttgttttacagagctgttgcatgacttatgttaccatcctaaaaaacactatattaaacatggaataaattgtctttttatgaattaggctttttgaacatcctgtgttgggatttttttgtttttcaattggcaacaaaagctctgtagggctgcagacatttaaagttcacataatcatctgtaagacattatgtattttgtggaaatactagaatttttttcctgattttgccattatatggatttgctattttttgattaatgcaaaagtatatgactttgttttttatgtgatacaccataaatattaaagtgttgaatactaacagtgctgactacaag

SEQ ID NO: 6504 - protein, 212 aa, Homo sapiens; identical to SEQ ID NO: 826

SEQ ID NO: 6505 - DNA, 1218 bp, Homo sapiens
cgcgcgcgcgcgcgccggcagttcggccacgtccctggccacgtcgcgggcgatctcgccatcttcgccgcttcctctcaggggccgccgcctcctgagccgcccagccccggggccgccgcgctgcgccgaccgccaccgccgccgccgccatgaacattttccggctgactggggacctgtcccacctggcggccatcgtcatcctgctgctgaagatctggaagacgcgctcctgcgccggtatttctgggaaaagccagcttctgtttgcactggtcttcacaactcgttacctggatctttttacttcatttatttcattgtataacacatctatgaaggttatctaccttgcctgctcctatgccacagtgtacctgatctacctgaaatttaaggcaacctacgatggaaatcatgataccttccgagtggagtttctggtggtccctgtgggaggcctctcatttttagttaatcacgatttctctcctcttgagatcctctggaccttctccatctacctggagtccgtggctatccttccgcagctatttatgatcagcaagactggggaggccgagaccatcaccacccactacctgttcttcctgggcctctatcgtgctttgtatcttgtcaactggatctggcgcttctactttgagggcttctttgacctcattgctgtggtggccggcgtagtccagaccatcctatactgtgacttcttctacttgtacattacaaaagtactcaagggaaagaagctcagtttgccagcataagtgccaaagaccatcaccagcatctgtccttcagggtgctcggacagaattcttaccacagcaaaggcataagatgcttgatacggaaaatcagaaacttaactcttttgttgcagatagtcatcagtggctctgtaaaaacgcagaggaaaagagccagaaggtttctgtttaatgcatcttgccttatctttttttattactgtgtacaaagatttttttacacaaagaaacttaatgctgtattaataaattcagtgtgtagcttcaattgggatagttccaaaagtgaagattttgtgaggaataagtgcaaattttttttttattttaaaaaattctttgaaactcttaagtctttgtgtctgcaatgaaattgtactccttgacagttgatagattatatattcttccatccctcaaactt

SEQ ID NO: 6506 - protein, 212 aa, Homo sapiens; identical to SEQ ID NO: 826

SEQ ID NO: 6507 - DNA, 1108 bp, Homo sapiens
gtccctggccacgtcgcgggcgatctcgccatcttcgccgccgccatgaacattttccggctgactggggacctgtcccacctggcggccatcgtcatcctgctgctgaagatctggaagacgcgctcctgcgccggtatttctgggaaaagccagcttctgtttgcactggtcttcacaactcgttacctggatctttttacttcatttatttcattgtataacacatctatgaaggttatctaccttgcctgctcctatgccacagtgtacctgatctacctgaaatttaaggcaacctacgatggaaatcatgataccttccgagtggagtttctggtggtccctgtgggaggcctctcatttttagttaatcacgatttctctcctcttgagatcctctggaccttctccatctacctggagtccgtggctatccttccgcagctatttatgatcagcaagactggggaggccgagaccatcaccacccactacctgttcttcctgggcctctatcgtgctttgtatcttgtcaactggatctggcgcttctactttgagggcttctttgacctcattgctgtggtggccggcgtagtccagaccatcctatactgtgacttcttctacttgtacattacaaaagtactcaagggaaagaagctcagtttgccagcataagtgccaaagaccatcaccagcatctgtccttcagggtgctcggacagaattcttaccacagcaaaggcataagatgcttgatacggaaaatcagaaacttaactcttttgttgcagatagtcatcagtggctctgtaaaaacgcagaggaaaagagccagaaggtttctgtttaatgcatcttgccttatctttttttattactgtgtacaaagatttttttacacaaagaaacttaatgctgtattaataaattcagtgtgtagcttcaattgggatagttccaaaagtgaagattttgtgaggaataagtgcaaattttttttttattttaaaaaattctttgaaactcttaagtctttgtgtctgcaatgaaattgtactccttgacagttgatagattatatattcttccatccctcaaa

SEQ ID NO: 6508 - protein, 212 aa, Homo sapiens; identical to SEQ ID NO: 826

SEQ ID NO: 6509 - DNA, 941 bp, Homo sapiens
agttcggccacgtccctggccacgtcgcgggcgatctcgccatcttcgccgcttcctctcaggggccgccgcctcctgagccgcccagccccggggccgccgcgctgcgccgaccgccaccgccgccgccgccatgaacattttccggctgactggggacctgtcccacctggcggccatcgtcatcctgctgctgaagatctggaagacgcgctcctgcgccggtatttctgggaaaagccagcttctgtttgcactggtcttcacaactcgttacctggatctttttacttcatttatttcattgtataacacatctatgaaggttatctaccttgcctgctcctatgccacagtgtacctgatctacctgaaatttaaggcaacctacgatggaaatcatgataccttccgagtggagtttctggtggtccctgtgggaggcctctcatttttagttaatcacgatttctctcctcttgagtactcaagggaaagaagctcagtttgccagcataagtgccaaagaccatcaccagcatctgtccttcagggtgctcggacagaattcttaccacagcaaaggcataagatgcttgatacggaaaatcagaaacttaactcttttgttgcagatagtcatcagtggctctgtaaaaacgcagaggaaaagagccagaaggtttctgtttaatgcatcttgccttatctttttttattactgtgtacaaagatttttttacacaaagaaacttaatgctgtattaataaattcagtgtgtagcttcaattgggatagttccaaaagtgaagattttgtgaggaataagtgcaaattttttttttattttaaaaaattctttgaaactcttaagtctttgtgtctgcaatgaaattgtactccttgacagttgatagattatatattcttccatccctca

SEQ ID NO: 6510 - protein, 186 aa, Homo sapiens; identical to SEQ ID NO: 6486

SEQ ID NO: 6511 - DNA, 1037 bp, Homo sapiens
gtccctggccacgtcgcgggcgatctcgccatcttcgccgccgccatgaacattttccggctgactggggacctgtcccacctggcggccatcgtcatcctgctgctgaagatctggaagacgcgctcctgcgccggtatttctgggaaaagccagcttctgtttgcactggtcttcacaactcgttacctggatctttttacttcatttatttcattgtataacacatctatgaaggttatctaccttgcctgctcctatgccacagtgtacctgatctacctgaaatttaaggcaacctacgatggaaatcatgataccttccgagtggagtttctggtggtccctgtgggaggcctctcatttttagttaatcacgatttctctcctcttgagatcctctggaccttctccatctacctggagtccgtggctatccttccgcagctatttatgatcagcaagactggggaggccgagaccatcaccacccactacctgttcttcctgggcctctatcgtgctttgtatcttgtcaactggatctggcgcttctactttgagggcttctttgacctcattgctgtggtggccggcgtagtccagaccatcctatactgtgacttcttctacttgtacattacaaaagtactcaagggaaagaagctcagtttgccagcataagtgccaaagaccatcaccagcatctgtccttcagggtgctcggacagaattcttaccacagcaaaggcataagatgcttgatacggaaaatcagaaacttaactcttttgttgcagatagtcatcagtggctctgtaaaaacgcagaggaaaagagccagaaggtttctgtttaatgcatcttgccttatctttttttattactgtgtacaaagatttttttacacaaagaaacttaatgctgtattaataaattcagtgtgtagcttcaattgggatagttccaaaagtgaagattttgtgaggaataagtgcaaattttttttttattttaaaaaattctttgaaactctt

SEQ ID NO: 6512 - protein, 212 aa, Homo sapiens; identical to SEQ ID NO: 826

SEQ ID NO: 6513 - DNA, 872 bp, Homo sapiens
agttcggccacgtccctggccacgtcgcgggcgatctcgccatcttcgccgcttcctctcaggggccgccgcctcctgagccgcccagccccggggccgccgcgctgcgccgaccgccaccgccgccgccgccatgaacattttccggctgactggggacctgtcccacctggcggccatcgtcatcctgctgctgaagatctggaagacgcgctcctgcgccggtatttctgggaaaagccagcttctgtttgcactggtcttcacaactcgttacctggatctttttacttcatttatttcattgtataacacatctatgaaggttatctaccttgcctgctcctatgccacagtgtacctgatctacctgaaatttaaggcaacctacgatggaaatcatgataccttccgagtggagtttctggtggtccctgtgggaggcctctcatttttagttaatcacgatttctctcctcttgagtactcaagggaaagaagctcagtttgccagcataagtgccaaagaccatcaccagcatctgtccttcagggtgctcggacagaattcttaccacagcaaaggcataagatgcttgatacggaaaatcagaaacttaactcttttgttgcagatagtcatcagtggctctgtaaaaacgcagaggaaaagagccagaaggtttctgtttaatgcatcttgccttatctttttttattactgtgtacaaagatttttttacacaaagaaacttaatgctgtattaataaattcagtgtgtagcttcaattgggatagttccaaaagtgaagattttgtgaggaataagtgcaaattttttttttattttaaaaaattctttgaaactctt

SEQ ID NO: 6514 - protein, 186 aa, Homo sapiens; identical to SEQ ID NO: 6486

SEQ ID NO: 6515 - DNA, 1144 bp, Homo sapiens
cgcgcgcgcgcgcgccggcagttcggccacgtccctggccacgtcgcgggcgatctcgccatcttcgccgcttcctctcaggggccgccgcctcctgagccgcccagccccggggccgccgcgctgcgccgaccgccaccgccgccgccgccatgaacattttccggctgactggggacctgtcccacctggcggccatcgtcatcctgctgctgaagatctggaagacgcgctcctgcgccggtatttctgggaaaagccagcttctgtttgcactggtcttcacaactcgttacctggatctttttacttcatttatttcattgtataacacatctatgaaggttatctaccttgcctgctcctatgccacagtgtacctgatctacctgaaatttaaggcaacctacgatggaaatcatgataccttccgagtggagtttctggtggtccctgtgggaggcctctcatttttagttaatcacgatttctctcctcttgagatcctctggaccttctccatctacctggagtccgtggctatccttccgcagctatttatgatcagcaagactggggaggccgagaccatcaccacccactacctgttcttcctgggcctctatcgtgctttgtatcttgtcaactggatctggcgcttctactttgagggcttctttgacctcattgctgtggtggccggcgtagtccagaccatcctatactgtgacttcttctacttgtacattacaaaagtactcaagggaaagaagctcagtttgccagcataagtgccaaagaccatcaccagcatctgtccttcagggtgctcggacagaattcttaccacagcaaaggcataagatgcttgatacggaaaatcagaaacttaactcttttgttgcagatagtcatcagtggctctgtaaaaacgcagaggaaaagagccagaaggtttctgtttaatgcatcttgccttatctttttttattactgtgtacaaagatttttttacacaaagaaacttaatgctgtattaataaattcagtgtgtagcttcaattgggatagttccaaaagtgaagattttgtgaggaataagtgcaaattttttttttattttaaaaaattctttgaaactctt

SEQ ID NO: 6516 - protein, 212 aa, Homo sapiens; identical to SEQ ID NO: 826

SEQ ID NO: 6517 - DNA, 953 bp, Homo sapiens
gtccctggccacgtcgcgggcgatctcgccatcttcgccgccgccatgaacattttccggctgactggggacctgtcccacctggcggccatcgtcatcctgctgctgaagatctggaagacgcgctcctgcgccggtatttctgggaaaagccagcttctgtttgcactggtcttcacaactcgttacctggatctttttacttcatttatttcattgtataacacatctatgaaggttatctaccttgcctgctcctatgccacagtgtacctgatctacctgaaatttaaggcaacctacgatggaaatcatgataccttccgagtggagtttctggtggtccctgtgggaggcctctcatttttagttaatcacgatttctctcctcttgagatcctctggaccttctccatctacctggagtccgtggctatccttccgcagctatttatgatcagcaagactggggaggccgagaccatcaccacccactacctgttcttcctgggcctctatcgtgctttgtatcttgtcaactggatctggcgcttctactttgagggcttctttgacctcattgctgtggtggccggcgtagtccagaccatcctatactgtgacttcttctacttgtacattacaaaagtactcaagggaaagaagctcagtttgccagcataagtgccaaagaccatcaccagcatctgtccttcagggtgctcggacagaattcttaccacagcaaaggcataagatgcttgatacggaaaatcagaaacttaactcttttgttgcagatagtcatcagtggctctgtaaaaacgcagaggaaaagagccagaaggtttctgtttaatgcatcttgccttatctttttttattactgtgtacaaagatttttttacacaaagaaacttaatgctgtattaataaattcagtgtgtagcttc

SEQ ID NO: 6518 - protein, 212 aa, Homo sapiens; identical to SEQ ID NO: 826

SEQ ID NO: 6519 - DNA, 788 bp, Homo sapiens
agttcggccacgtccctggccacgtcgcgggcgatctcgccatcttcgccgcttcctctcaggggccgccgcctcctgagccgcccagccccggggccgccgcgctgcgccgaccgccaccgccgccgccgccatgaacattttccggctgactggggacctgtcccacctggcggccatcgtcatcctgctgctgaagatctggaagacgcgctcctgcgccggtatttctgggaaaagccagcttctgtttgcactggtcttcacaactcgttacctggatctttttacttcatttatttcattgtataacacatctatgaaggttatctaccttgcctgctcctatgccacagtgtacctgatctacctgaaatttaaggcaacctacgatggaaatcatgataccttccgagtggagtttctggtggtccctgtgggaggcctctcatttttagttaatcacgatttctctcctcttgagtactcaagggaaagaagctcagtttgccagcataagtgccaaagaccatcaccagcatctgtccttcagggtgctcggacagaattcttaccacagcaaaggcataagatgcttgatacggaaaatcagaaacttaactcttttgttgcagatagtcatcagtggctctgtaaaaacgcagaggaaaagagccagaaggtttctgtttaatgcatcttgccttatctttttttattactgtgtacaaagatttttttacacaaagaaacttaatgctgtattaataaattcagtgtgtagcttc

SEQ ID NO: 6520 - protein, 186 aa, Homo sapiens; identical to SEQ ID NO: 6486

SEQ ID NO: 6521 - DNA, 1060 bp, Homo sapiens
cgcgcgcgcgcgcgccggcagttcggccacgtccctggccacgtcgcgggcgatctcgccatcttcgccgcttcctctcaggggccgccgcctcctgagccgcccagccccggggccgccgcgctgcgccgaccgccaccgccgccgccgccatgaacattttccggctgactggggacctgtcccacctggcggccatcgtcatcctgctgctgaagatctggaagacgcgctcctgcgccggtatttctgggaaaagccagcttctgtttgcactggtcttcacaactcgttacctggatctttttacttcatttatttcattgtataacacatctatgaaggttatctaccttgcctgctcctatgccacagtgtacctgatctacctgaaatttaaggcaacctacgatggaaatcatgataccttccgagtggagtttctggtggtccctgtgggaggcctctcatttttagttaatcacgatttctctcctcttgagatcctctggaccttctccatctacctggagtccgtggctatccttccgcagctatttatgatcagcaagactggggaggccgagaccatcaccacccactacctgttcttcctgggcctctatcgtgctttgtatcttgtcaactggatctggcgcttctactttgagggcttctttgacctcattgctgtggtggccggcgtagtccagaccatcctatactgtgacttcttctacttgtacattacaaaagtactcaagggaaagaagctcagtttgccagcataagtgccaaagaccatcaccagcatctgtccttcagggtgctcggacagaattcttaccacagcaaaggcataagatgcttgatacggaaaatcagaaacttaactcttttgttgcagatagtcatcagtggctctgtaaaaacgcagaggaaaagagccagaaggtttctgtttaatgcatcttgccttatctttttttattactgtgtacaaagatttttttacacaaagaaacttaatgctgtattaataaattcagtgtgtagcttc

SEQ ID NO: 6522 - protein, 212 aa, Homo sapiens; identical to SEQ ID NO: 826

SEQ ID NO: 6523 - DNA, 757 bp, Homo sapiens
gccgcttcctctcaggggccgccgcctcctgagccgcccagccccggggccgccgcgctgcgccgaccgccaccgccgccgccgccatgaacattttccggctgactggggacctgtcccacctggcggccatcgtcatcctgctgctgaagatctggaagacgcgctcctgcgccggtatttctgggaaaagccagcttctgtttgcactggtcttcacaactcgttacctggatctttttacttcatttatttcattgtataacacatctatgaaggtatggtatgccatccacaggaatgtatttcatctacagtgcacaggtctatggacacttaatttatgtcagctgtgtatttttaattaaaatgctccaaaaataatgtcttaatatgctgttcttgactttaaaactttcagaccaccttgtatatataactgggactaaacgagctatcagtaagcatacatttttggtttcaaaacagtagttaattaaaatactttgaagttagaacttttttattttaggttccttaagtatgataaatctaaagctcttgataactctgtaagtaagagcggtaactattatattttcaagccgtgggaaattacagagtccccagagaaatccagcaagttggtacataacaaggaacgaaagcaggactcctagttgcagtgtctcatttcgctgctgtgtgaggaactgtctataggcttctatcttttttctttgccactgagtcagtt

SEQ ID NO: 6524 - protein, 93 aa, Homo sapiens
MNIFRLTGDLSHLAAIVILLLKIWKTRSCAGISGKSQLLFALVFTTRYLDLFTSFISLYNTSMKVWYAIHRNVFHLQCTGLWTLNLCQLCIFN

SEQ ID NO: 6525 - DNA, 384 bp, Homo sapiens
atggcttctgcaaagaagggtggcgagaagaaaggtcgttccgccattagtgaggcggttaccccagaatacaccagcgcatgggtggagtgggcttcaagaagtgcccctcgggcacacagagagatccagaaattcgccatgaaggagatggggactccaaatttgcacattgatgtgaggctcaacaaagctctctgggccaaaggaataaggaatgtcccataccatatccatatgaagttgcccagaaaacttaatgaggatgaagattcaccagacaagctctatgctttggttcctacatatacctgttaccactttcacaaatctatagacaggcaatgtggaagagagctaaccactgatggttcaatacattaa

SEQ ID NO: 6526 - protein, 127 aa, Homo sapiens
MASAKKGGEKKGRSAISEAVTPEYTSAWVEWASRSAPRAHREIQKFAMKEMGTPNLHIDVRLNKALWAKGIRNVPYHIHMKLPRKLNEDEDSPDKLYALVPTYTCYHFHKSIDRQCGRELTTDGSIH

SEQ ID NO: 6527 - DNA, 396 bp, Homo sapiens
gtgaaagcccctgtcacattcctctgactgcagcacatggggcctggtgcgggtgagtgtctgagtaggaatttgatgtcagatctacccctgccctttcctctcaggcaggagatctgcagagaatcactaagcaaactctacagcttgggcaaggtgcttttcacccccatctttcacccacttcacacccggatttttgttttgttttgagacggaactccatttgaaaaaaaaaaaaaaaaccctgcataagatctgtagagataatagactccaacaggcgtgatttccaggcctggttagcccacatggcattttcctgcaagttagaaacacatgtcccttccaggagacctaacctcttgattgcacagtgtggcaggccaagcacca

SEQ ID NO: 6528 - protein, 58 aa, Homo sapiens
MGPGAGECLSRNLMSDLPLPFPLRQEICRESLSKLYSLGKVLFTPIFHPLHTRIFVLF

SEQ ID NO: 6529 - DNA, 4011 bp, Homo sapiens
atggccaccactgccacgccggccacgaaccagggctggccagaggactttggcttccggctaggtggctctggcccctgcttcgtcctggaggtggccaaggggagcagcgcgcatgccggaggactgcggccaggagaccagatcctggaggtggaggggctggcggtgggcggtctgagccgcgagcgcctcgtgcgcctggcacggcgctgcccacgtgtgccgcccagtctgggcgtgctcccggctcccgacggtggccccggcccaggatccggccccgcggccccgaccacagtcttgcgggccccgcggtgcggccgcggcctagctctgggccgtgagctgcttcgcctggccggccgcaagcgcccggacgcggtgcaccgagagcgcaggcgcaaggcccaagagttcagccgcaaggactcctccttgcaggtggatgaaatcttgggggaccagccaactgccaaggagcaggtgttcgctgcactgaagcagtttgcagctgagcagcgggtggatgatctggtgtggactctcaccctggcgctgccccgagaggcctgcgggccactcctggacaacctcaggatcttcatccccaagaagcaccgggcgcgcttcgacgaggtggtgtctcagggcctcctgggcaagctgtgccgcgcacgccgggcccagggcgcgcagcgactgcgccggagccgcagcgaggagcggccggagcgcctcctggtgtccacgcgcgccagcgccccgccgcgccgccccgatgagccgcccccgcgcagggcctccttgctggtgggcggcctcgccggccccgggggcgcgcgcaggactgtccgagtctacaaaggcaacaagagcttcggcttcacacttcgcggccacgggcctgtctggatcgagtctgtcctgcctgggagcccagctgacaatgctgccctcaagtcaggtgaccggatcctcttcctcaatggactggacatgaggtcagaggctattggggacaccaggggttggaactgctcccacgacaaggtggtgtccatgctgcagggcagtggtgccatgcccacgctggtggtggaggaagggctcgtcccatttgccagtgactccgattctctggactcacccaacccgtcgtcggcgctcacctccctgcagtgggtggcggagatcctgccgtccagcatccgggtccaagggaggaccttcagccagcagctggagcacctactcacacctcctgagcgctatggggtctgccgggccctcgagagcttcttccagcacaggaacatcgacaccctcatcgttgacgtctaccctgtgctggacacccctgccaagcaggtcctgtggcagttcatctaccagctgctgacctatgaggagcaggagctctgtcaggagaaaatcgcatgcttcctgggctacacggccatgacagcagagccggagcctgagctggacctggagtccgagcccacgcctgagccccagccgcggagctccctgcgggcttcctccatgtgccgccgcagcctccggtcccagggcctggaggccggcctcagctgcggtcccagcgagtgccctgagatgcctcttcccctgatcccaggcgagcgccaggcaggcgacggcacgtccctccctgagacccccaaccccaagatgatgtcagccgtctatgcagagcttgagtctcgactgaacagcagcttcaaagggaagatggggaccgtgtccaaatcccgggcttcccctccaggccccagcccagcagtcaccacaggctcagccctggagctgcttctctgctccatcaggcttgcacctggaacctcggtgctggctgaagaggaatcctcatactccatccctcctccagggcccaggaccctgtccggcgtctcatggcccagcgagcgactcttgccctccccctgctaccacccgctgtgttcggggggtctggcctcccccagcagctctgagtcccacccctacgccagcctggacagcagcagggcaccctccccacagccaggccccgggcccatctgccccgacagccccccaagcccggaccccacccgcccgcccagccgcaggaagctcttcaccttctcccaccctgtgcgaagccgcgatactgaccgcttcctggacgtgctgagcgagcagctgggcccccgggtcaccatcgtggatgatttcctgaccccggagaacgactacgaggagatgagcttccatgatgaccagggcagcttcgtaaccaatgagcggagcagcgccagcgactgcatcagcagcagtgaagaaggcagctccctgacctactcctccatctctgaccacatccccccacccccgctcagccccccaccaccgccacccctgcctttccatgacgctaagcccagctcccgcagctctgatggttcccggggccctgctcaggcgctggccaagcccctcacccaactcagccacccagtccctccaccacccccaccgcccctgcccccacccgtgccctgtgcaccccccatgctgtcccggggcctgggccaccggcgcagtgagaccagccacatgagcgtcaagcgcttgcggtgggaacaggtggagaactcagaaggcaccatctggggtcagctcggggaagactctgactacgataagctgagtgacatggtgaaatacctcgacctggagctccacttcggcacccagaaacctgctaaaccggtgccggggccggagcccttccggaagaaggaggtggtggagatcctgtcccataagaaggcctacaacacctccatcctcttggcacacctgaagctgagccccgcggagctgcgccaggtgctgatgagcatggagccccggcgcctggagcccgcacatctcgcgcagctgctgctcttcgcgcccgacgccgacgaggagcagcgctaccaggccttccgcgaggcgcccggccgcctcagcgagccggaccagttcgtcctgcaggtgccgcgaccacaaccccgccccgaggcctcggccggctccacaggggctgtcgctgtggccagggctgctggggtcccgcgcgccttcgggggccgccattgcgcccaagcctctgagtcccagtttaacacctttaatggccgggtcctatcaggggtccaagttcccgaatacaagacacgcctgcgcagcctccacttccaggccaccctccaggagaagacagaggagatccgaggcagccttgaatgcttgcgccaggcctccctggagctcaaaaacagtcggaagctcgccaagatcctggagtttgtgttggccatgggcaactatctcaacgatggacagcccaaaaccaacaagactacgggcttcaagatcaactttctgacagagctgaactccaccaagacagtggatgggaagtccaccttcctgcacatccttgccaaatcgctgagccagcacttccctgaactcctgggctttgctcaggacctgcccaccgtgcccctggctgccaaagtgaaccaacgggccctgaccagtgacctggctgacctccatggcactatcagcgagatacaggatgcctgccagagcatttccccctctagcgaggacaagtttgcaatggtcatgtcggcatcctctgagcagcctgttcctgcaccaggctggatcctgggcgggctggctgtttccttaactgaggcctgtcagtccttcctggagacggcccagccagcacttcgggcgctcgacgggctgcagcgcgaggccatggaggagctgggcaaggcgctggccttctttggggaggattccaaggccaccacctctgaggctttcttcggcatctttgcagagttcatgagcaaattcgagcgagcgctgagtgacctgcaggccggggagggcctgcgcagctccgggatggtttcacccctggcctggtga

SEQ ID NO: 6530 - protein, 1336 aa, Homo sapiens
MATTATPATNQGWPEDFGFRLGGSGPCFVLEVAKGSSAHAGGLRPGDQILEVEGLAVGGLSRERLVRLARRCPRVPPSLGVLPAPDGGPGPGSGPAAPTTVLRAPRCGRGLALGRELLRLAGRKRPDAVHRERRRKAQEFSRKDSSLQVDEILGDQPTAKEQVFAALKQFAAEQRVDDLVWTLTLALPREACGPLLDNLRIFIPKKHRARFDEVVSQGLLGKLCRARRAQGAQRLRRSRSEERPERLLVSTRASAPPRRPDEPPPRRASLLVGGLAGPGGARRTVRVYKGNKSFGFTLRGHGPVWIESVLPGSPADNAALKSGDRILFLNGLDMRSEAIGDTRGWNCSHDKVVSMLQGSGAMPTLVVEEGLVPFASDSDSLDSPNPSSALTSLQWVAEILPSSIRVQGRTFSQQLEHLLTPPERYGVCRALESFFQHRNIDTLIVDVYPVLDTPAKQVLWQFIYQLLTYEEQELCQEKIACFLGYTAMTAEPEPELDLESEPTPEPQPRSSLRASSMCRRSLRSQGLEAGLSCGPSECPEMPLPLIPGERQAGDGTSLPETPNPKMMSAVYAELESRLNSSFKGKMGTVSKSRASPPGPSPAVTTGSALELLLCSIRLAPGTSVLAEEESSYSIPPPGPRTLSGVSWPSERLLPSPCYHPLCSGGLASPSSSESHPYASLDSSRAPSPQPGPGPICPDSPPSPDPTRPPSRRKLFTFSHPVRSRDTDRFLDVLSEQLGPRVTIVDDFLTPENDYEEMSFHDDQGSFVTNERSSASDCISSSEEGSSLTYSSISDHIPPPPLSPPPPPPLPFHDAKPSSRSSDGSRGPAQALAKPLTQLSHPVPPPPPPPLPPPVPCAPPMLSRGLGHRRSETSHMSVKRLRWEQVENSEGTIWGQLGEDSDYDKLSDMVKYLDLELHFGTQKPAKPVPGPEPFRKKEVVEILSHKKAYNTSILLAHLKLSPAELRQVLMSMEPRRLEPAHLAQLLLFAPDADEEQRYQAFREAPGRLSEPDQFVLQVPRPQPRPEASAGSTGAVAVARAAGVPRAFGGRHCAQASESQFNTFNGRVLSGVQVPEYKTRLRSLHFQATLQEKTEEIRGSLECLRQASLELKNSRKLAKILEFVLAMGNYLNDGQPKTNKTTGFKINFLTELNSTKTVDGKSTFLHILAKSLSQHFPELLGFAQDLPTVPLAAKVNQRALTSDLADLHGTISEIQDACQSISPSSEDKFAMVMSASSEQPVPAPGWILGGLAVSLTEACQSFLETAQPALRALDGLQREAMEELGKALAFFGEDSKATTSEAFFGIFAEFMSKFERALSDLQAGEGLRSSGMVSPLAW

SEQ ID NO: 6531 - DNA, 3976 bp, Homo sapiens; identical to SEQ ID NO: 827

SEQ ID NO: 6532 - protein, 1148 aa, Homo sapiens
MIWCGLSPWRCPERPAGHSWTTSGSSSPRSTGRASTRWCLRASWASCAAHAGPRARSDCAGAAARSGRSASWCPRAPAPRRAAPMSRPRAGPPCWTVRVYKGNKSFGFTLRGHGPVWIESVLPGSPADNAALKSGDRILFLNGLDMRSEAIGDTRGWNCSHDKVVSMLQGSGAMPTLVVEEGLVPFASDSDSLDSPNPSSALTSLQWVAEILPSSIRVQGRTFSQQLEHLLTPPERYGVCRALESFFQHRNIDTLIVDVYPVLDTPAKQVLWQFIYQLLTYEEQELCQEKIACFLGYTAMTAEPEPELDLESEPTPEPQPRSSLRASSMCRRSLRSQGLEAGLSCGPSECPEMPLPLIPGERQAGDGTSLPETPNPKMMSAVYAELESRLNSSFKGKMGTVSKSRASPPGPSPAVTTGSALELLLCSIRLAPGTSVLAEEESSYSIPPPGPRTLSGVSWPSERLLPSPCYHPLCSGGLASPSSSESHPYASLDSSRAPSPQPGPGPICPDSPPSPDPTRPPSRRKLFTFSHPVRSRDTDRFLDVLSEQLGPRVTIVDDFLTPENDYEEMSFHDDQGSFVTNERSSASDCISSSEEGSSLTYSSISDHIPPPPLSPPPPPPLPFHDAKPSSRSSDGSRGPAQALAKPLTQLSHPVPPPPPPPLPPPVPCAPPMLSRGLGHRRSETSHMSVKRLRWEQVENSEGTIWGQLGEDSDYDKLSDMVKYLDLELHFGTQKPAKPVPGPEPFRKKEVVEILSHKKAYNTSILLAHLKLSPAELRQVLMSMEPRRLEPAHLAQLLLFAPDADEEQRYQAFREAPGRLSEPDQFVLQVPRPQPRPEASAGSTGAVAVARAAGVPRAFGGRHCAQASESQFNTFNGRVLSGVQVPEYKTRLRSLHFQATLQEKTEEIRGSLECLRQASLELKNSRKLAKILEFVLAMGNYLNDGQPKTNKTTGFKINFLTELNSTKTVDGKSTFLHILAKSLSQHFPELLGFAQDLPTVPLAAKVNQRALTSDLADLHGTISEIQDACQSISPSSEDKFAMVMSASSEQPVPAPGWILGGLAVSLTEACQSFLETAQPALRALDGLQREAMEELGKALAFFGEDSKATTSEAFFGIFAEFMSKFERALSDLQAGEGLRSSGMVSPLAW

SEQ ID NO: 6533 - DNA, 1494 bp, Homo sapiens
tcaggggcgccgtgctgatgtcacgagcccgcaggaagtctcgtatcgcgcccgggaggcgccggagcccagcggctggcgggccgccgtcccacccccacctcgcccgagtccggggcggccccggtgtcccctccgagcctgctgcactccacgtccccctaccagggctccagcccccagggaaatctccgaccaggcccgcccaggagccagatccaggctcctggaagaaccatgtccggcagctactggtcatgccaggcacacactgctgcccaagaggagctgctgtttgaattatctgtgaatgttgggaagaggaatgccagagctgccggctgaaaattacccaaccaagagaaatctgcaggatggactttctggtcctcttcttgttctacctggcttcggtgctgatgggtcttgttcttatctgcgtctgctcgaaaacccatagcttgaaaggcctggccaggggaggagcacagatattttcctgtataattccagaatgtcttcagagagccgtgcatggattgcttcattaccttttccatacgagaaaccacaccttcattgtcctgcacctggtcttgcaagggatggtttatactgagtacacctgggaagtatttggctactgtcaggagctggagttgtccttgcattaccttcttctgccctatctgctgctaggtgtaaacctgttttttttcaccctgacttgtggaaccaatcctggcattataacaaaagcaaatgaattattatttcttcatgtttatgaatttgatgaagtgatgtttccaaagaacgtgaggtgctctacttgtgatttaaggaaaccagctcgatccaagcactgcagtgtgtgtaactggtgtgtgcaccgtttcgaccatcactgtgtttgggtgaacaactgcatcggggcctggaacatcaggtacttcctcatctacgtcttgaccttgacggcctcggctgccaccgtcgccattgtgagcaccacttttctggtccacttggtggtgatgtcagatttataccaggagacttacatcgatgaccttggacacctccatgttatggacacggtctttcttattcagtacctgttcctgacttttccacggattgtcttcatgctgggctttgtcgtggttctgagcttcctcctgggtggctacctgttgtttgtcctgtatctggcggccaccaaccagactactaacgagtggtacagaggtgactgggcctggtgccagcgttgtccccttgtggcctggcctccgtcagcagagccccaagtccaccggaacattcactcccatgggcttcggagcaaccttcaagagatctttctacctgcctttccatgtcatgagaggaagaaacaagaatgacaagtgtatgactgcctttgagctgtagttcccgtttatttacacatgtggatcctcgttttccaagcatggcttgtttgttttg

SEQ ID NO: 6534 - protein, 344 aa, Homo sapiens; identical to SEQ ID NO: 829

SEQ ID NO: 6535 - DNA, 1296 bp, Homo sapiens
aggggcgccgtgctgatgtcacgagcccgcaggaagtctcgtatcgcgcccgggaggcgccggagcccagcggctggcgccagatccaggctcctggaagaaccatgtccggcagctactggtcatgccaggcacacactgctgcccaagaggagctgctgtttgaattatctgtgaatgttgggaagaggaatgccagagctgccggctgaaaattacccaaccaagagaaatctgcaggatggactttctggtcctcttcttgttctacctggcttcggtgctgatgggtcttgttcttatctgcgtctgctcgaaaacccatagcttgaaaggcctggccaggggaggagcacagatattttcctgtataattccagaatgtcttcagagagccgtgcatggattgcttcattaccttttccatacgagaaaccacaccttcattgtcctgcacctggtcttgcaagggatggtttatactgagtacacctgggaagtatttggctactgtcaggagctggagttgtccttgcattaccttcttctgccctatctgctgctaggtgtaaacctgttttttttcaccctgacttgtggaaccaatcctggcattataacaaaagcaaatgaattattatttcttcatgtttatgaatttgatgaagtgatgtttccaaagaacgtgaggtgctctacttgtgatttaaggaaaccagctcgatccaagcactgcagtgtgtgtaactggtgtgtgcaccgtttcgaccatcactgtgtttgggtgaacaactgcatcggggcctggaacatcaggtacttcctcatctacgtcttgaccttgacggcctcggctgccaccgtcgccattgtgagcaccacttttctggtccacttggtggtgatgtcagatttataccaggagacttacatcgatgaccttggacacctccatgttatggacacggtctttcttattcagtacctgttcctgacttttccacggattgtcttcatgctgggctttgtcgtggttctgagcttcctcctgggtggctacctgttgtttgtcctgtatctggcggccaccaaccagactactaacgagtggtacagaggtgactgggcctggtgccagcgttgtccccttgtggcctggcctccgtcagcagagccccaagtccaccggaacattcactcccatgggcttcggagcaaccttcaagagatctttctacctgcctttccatgtcatgagaggaagaaacaagaatgacaagtgtatgactgcctttg

SEQ ID NO: 6536 - protein, 344 aa, Homo sapiens; identical to SEQ ID NO: 829

SEQ ID NO: 6537 - DNA, 1361 bp, Homo sapiens
aggggcgccgtgctgatgtcacgagcccgcaggaagtctcgtatcgcgcccgggaggcgccggagcccagcggctggcgccagatccaggctcctggaagaaccatgtccggcagctactggtcatgccaggcacacactgctgcccaagaggagctgctgtttgaattatctgtgaatgttgggaagaggaatgccagagctgccggctgaaaattacccaaccaagagaaatctgcaggatggactttctggtcctcttcttgttctacctggcttcggtgctgatgggtcttgttcttatctgcgtctgctcgaaaacccatagcttgaaaggcctggccaggggaggagcacagatattttcctgtataattccagaatgtcttcagagagccgtgcatggattgcttcattaccttttccatacgagaaaccacaccttcattgtcctgcacctggtcttgcaagggatggtttatactgagtacacctgggaagtatttggctactgtcaggagctggagttgtccttgcattaccttcttctgccctatctgctgctaggtgtaaacctgttttttttcaccctgacttgtggaaccaatcctggcattataacaaaagcaaatgaattattatttcttcatgtttatgaatttgatgaagtgatgtttccaaagaacgtgaggtgctctacttgtgatttaaggaaaccagctcgatccaagcactgcagtgtgtgtaactggtgtgtgcaccgtttcgaccatcactgtgtttgggtgaacaactgcatcggggcctggaacatcaggtacttcctcatctacgtcttgaccttgacggcctcggctgccaccgtcgccattgtgagcaccacttttctggtccacttggtggtgatgtcagatttataccaggagacttacatcgatgaccttggacacctccatgttatggacacggtctttcttattcagtacctgttcctgacttttccacggattgtcttcatgctgggctttgtcgtggttctgagcttcctcctgggtggctacctgttgtttgtcctgtatctggcggccaccaaccagactactaacgagtggtacagaggtgactgggcctggtgccagcgttgtccccttgtggcctggcctccgtcagcagagccccaagtccaccggaacattcactcccatgggcttcggagcaaccttcaagagatctttctacctgcctttccatgtcatgagaggaagaaacaagaatgacaagtgtatgactgcctttgagctgtagttcccgtttatttacacatgtggatcctcgttttccaagcatggcttgtttgttttg

SEQ ID NO: 6538 - protein, 344 aa, Homo sapiens; identical to SEQ ID NO: 829

SEQ ID NO: 6539 - DNA, 1598 bp, Homo sapiens
aggggcgccgtgctgatgtcacgagcccgcaggaagtctcgtatcgcgcccgggaggcgccggagcccagcggctggcgccagatccaggctcctggaagaaccatgtccggcagctactggtcatgccaggcacacactgctgcccaagaggagctgctgtttgaattatctgtgaatgttgggaagaggaatgccagagctgccggctgaaaattacccaaccaagagaaatctgcaggatggactttctggtcctcttcttgttctacctggcttcggtgctgatgggtcttgttcttatctgcgtctgctcgaaaacccatagcttgaaaggcctggccaggggaggagcacagatattttcctgtataattccagaatgtcttcagagagccgtgcatggattgcttcattaccttttccatacgagaaaccacaccttcattgtcctgcacctggtcttgcaagggatggtttatactgagtacacctgggaagtatttggctactgtcaggagctggagttgtccttgcattaccttcttctgccctatctgctgctaggtgtaaacctgttttttttcaccctgacttgtggaaccaatcctggcattataacaaaagcaaatgaattattatttcttcatgtttatgaatttgatgaagtgatgtttccaaagaacgtgaggtgctctacttgtgatttaaggaaaccagctcgatccaagcactgcagtgtgtgtaactggtgtgtgcaccgtttcgaccatcactgtgtttgggtgaacaactgcatcggggcctggaacatcaggtacttcctcatctacgtcttgaccttgacggcctcggctgccaccgtcgccattgtgagcaccacttttctggtccacttggtggtgatgtcagatttataccaggagacttacatcgatgaccttggacacctccatgttatggacacggtctttcttattcagtacctgttcctgacttttccacggattgtcttcatgctgggctttgtcgtggttctgagcttcctcctgggtggctacctgttgtttgtcctgtatctggcggccaccaaccagactactaacgagtggtacagaggtgactgggcctggtgccagcgttgtccccttgtggcctggcctccgtcagcagagccccaagtccaccggaacattcactcccatgggcttcggagcaaccttcaagagatctttctacctgcctttccatgtcatgagaggaagaaacaagaatgacaagtgtatgactgcctttgagctgtagttcccgtttatttacacatgtggatcctcgttttccaagcatggcttgtttgttttgatttctgctgtgcttataaatcactttcggtgggcaagggagagaggggaaaatgggtgttgactgaggaatcccccttgcttgtcttcttttgaaaccgggcatctctgaagtcctggtgtcaaggggatcaagagatgacttctcagaggttctaggtgatgctgagaccttggtgtctctaaactctgggcatgtggacaggaggggcttgcggccgtgtctctgacctgtgtg

SEQ ID NO: 6540 - protein, 344 aa, Homo sapiens; identical to SEQ ID NO: 829

SEQ ID NO: 6541 - DNA, 1612 bp, Homo sapiens
gatgtcacgagcccgcaggaagtctcgtatcgcgcccgggaggcgccggagcccagcggctggcgccagatccaggctcctggaagaaccatgtccggcagctactggtcatgccaggcacacactgctgcccaagaggagctgctgtttgaattatctgtgaatgttgggaagaggaatgccagagctgccggctgaaaattacccaaccaagagaaatctgcaggatggactttctggtcctcttcttgttctacctggcttcggtgctgatgggtcttgttcttatctgcgtctgctcgaaaacccatagcttgaaaggcctggccaggggaggagcacagatattttcctgtataattccagaatgtcttcagagagccgtgcatggattgcttcattaccttttccatacgagaaaccacaccttcattgtcctgcacctggtcttgcaagggatggtttatactgagtacacctgggaagtatttggctactgtcaggagctggagttgtccttgcattaccttcttctgccctatctgctgctaggtgtaaacctgttttttttcaccctgacttgtggaaccaatcctggcattataacaaaagcaaatgaattattatttcttcatgtttatgaatttgatgaagtgatgtttccaaagaacgtgaggtgctctacttgtgatttaaggaaaccagctcgatccaagcactgcagtgagtgtggctctcgtgactccagcggcacctccaacagcacatgtgtgggcttcgtctgtgagggaatgtttcctgaatccgaaagcagagccagttcacccccagatatggtgtggccactacttgtagagttgagataatggtttctttcagatgagtgagggtcaggtcttgtgttcctgtgtagtagacagtcctcatctctgggcataacagcccttccctcgccacgtggcaggacatgctccccacaagttgtttctgcggatgttgtgtttgcagatttcagtcctacaaagcctagtcttctggggagggcccaagattctagacccgtgctgtctaacaaaaatagaatgtggctgggcgcagcggttcatgccaggaattccagtactttgggaggcaggcagatctcttgagcctaggagttcaagaccagcttgggcaccatggggaaaccccacctctacaaaaaatacaaaagatgtagtcctggctactcaggaggctgaggcgggaggatcacttgagcccaggagatcgaggctgcagtaagctatgattaaaccactgcactccagcctcagcaacagagcaagaccctgtctcagaaaaaaaaaaaaaggccatgaatagaaagtttttaaaaatgtttttcaaaatgtggctgtgcttggagacagttttaatcaggatgttatttaacctacatatgtaaaatatcattttaacatgtaatcaatgtaaaaaattcttcatgagatagtttatattctttttttcatactaagcctttgaaatctggtgtgtatcttacatttatagcacatcttgatttggacactaaattttcatgtggaaatgcttgtgtatttagatttaa

SEQ ID NO: 6542 - protein, 212 aa, Homo sapiens
MDFLVLFLFYLASVLMGLVLICVCSKTHSLKGLARGGAQIFSCIIPECLQRAVHGLLHYLFHTRNHTFIVLHLVLQGMVYTEYTWEVFGYCQELELSLHYLLLPYLLLGVNLFFFTLTCGTNPGIITKANELLFLHVYEFDEVMFPKNVRCSTCDLRKPARSKHCSECGSRDSSGTSNSTCVGFVCEGMFPESESRASSPPDMVWPLLVELR

SEQ ID NO: 6543 - DNA, 2680 bp, Homo sapiens
ggaagtctcgtatcgcgcccgggaggcgccggagcccagcggctggcggtattctgcctttgactgcaactcttgtcgtcttatgtgggtgttgaattgatctgtctctgcagccagatccaggctcctggaagaaccatgtccggcagctactggtcatgccaggcacacactgctgcccaagaggagctgctgtttgaattatctgtgaatgttgggaagaggaatgccagagctgccggctgaaaattacccaaccaagagaaatctgcaggatggactttctggtcctcttcttgttctacctggcttcggtgctgatgggtcttgttcttatctgcgtctgctcgaaaacccatagcttgaaaggcctggccaggggaggagcacagatattttcctgtataattccagaatgtcttcagagagccgtgcatggattgcttcattaccttttccatacgagaaaccacaccttcattgtcctgcacctggtcttgcaagggatggtttatactgagtacacctgggaagtatttggctactgtcaggagctggagttgtccttgcattaccttcttctgccctatctgctgctaggtgtaaacctgttttttttcaccctgacttgtggaaccaatcctggcattataacaaaagcaaatgaattattatttcttcatgtttatgaatttgatgaagtgatgtttccaaagaacgtgaggtgctctacttgtgatttaaggaaaccagctcgatccaagcactgcagtgtgtgtaactggtgtgtgcaccgtttcgaccatcactgtgtttgggtgaacaactgcatcggggcctggaacatcaggtacttcctcatctacgtcttgaccttgacggcctcggctgccaccgtcgccattgtgagcaccacttttctggtccacttggtggtgatgtcagatttataccaggagacttacatcgatgaccttggacacctccatgttatggacacggtctttcttattcagtacctgttcctgacttttccacggattgtcttcatgctgggctttgtcgtggttctgagcttcctcctgggtggctacctgttgtttgtcctgtatctggcggccaccaaccagactactaacgagtggtacagaggtgactgggcctggtgccagcgttgtccccttgtggcctggcctccgtcagcagagccccaagtccaccggaacattcactcccatgggcttcggagcaaccttcaagagatctttctacctgcctttccatgtcatgagaggaagaaacaagaatgacaagtgtatgactgcctttgagctgtagttcccgtttatttacacatgtggatcctcgttttccaagcatggcttgtttgttttgatttctgctgtgcttataaatcactttcggtgggcaagggagagaggggaaaatgggtgttgactgaggaatcccccttgcttgtcttcttttgaaaccgggcatctctgaagtcctggtgtcaaggggatcaagagatgacttctcagaggttctaggtgatgctgagaccttggtgtctctaaactctgggcatgtggacaggaggggcttgcggccgtgtctctgacctgtgtgatgtgcaggagggtctcattgactcagcgcctgcgcgttgtgcctggctgtgctctcttttatgccccctctattctcctctctcccccaggggattttcatctcaacaacagagtgtcctcacccaggcctgccttccggccagtatgggcttgtacatcaggcaccttcctgcatgtgtggcctccggcctgccctcctctagccacattcaagtcctttctcaccagtttaaaaattgtgaaagtgaactgccacctatttcagaggagacatgactgccagaaacgaggtcttggtgcggaaggtctttggagtgggagggctctcaggtgcaggtggcaggtgttctgcaccttgctaggccaaggagcccgcagtcagagaggctgggaagtgggagtcaggggcagggggccttccagccatcttcccccgtaccccccagctgagaacagatggaaacgtgaagacgggtagctggggcggccagggaacccaagtccgctggccgaagccaaagcccggcaccacccccaattcttgctggtggaaagcaccgtgaaatcaaccagcggcagctctgaacgcgacgcacagcccgcgagggagcctgggcaaggacggagcgggcctgcaccggcggttgggcgggctccgggggcggggtccacctgggaccgcggcgcgcccctcaccgctcgcgccgccagggggcgccctccggagagcgcgcctaggccgcggcctgcgcttggcccctgcgggccgccgtctccgtgcccggcattcggccgctgttcggctgcgcggcggcagctcccggcggctcctggcggcgccgcagtcggaccttcgggcgcctgctggccggcggcagcagcgatggccccctgagcaggcagggagcaggcggcggcaggcgggcaagcgggcgggtgccgcagcccaggcccgggtcgcgcctctttgtttccacgggtagcggcgcagtcccgggccccgggcggaagtgagacgcgctcggcgcgggggccgcggcggccgc

SEQ ID NO: 6544 - protein, 344 aa, Homo sapiens; identical to SEQ ID NO: 829

SEQ ID NO: 6545 - DNA, 1470 bp, Homo sapiens
cccgggaggcgccggagcccagcggctggcggtaaggccgcctccgcggggctgtgggaagcttgggctgtcccaggaccgtcagtctcctcctctgaccctccctttccccttgtgtgtagggccgccgtcccacccccacctcgcccgagtccggggcggccccggtgtcccctccgagcctgctgcactccacgtccccctaccagggctccagcccccagggaaatctccgaccaggcccgcccaggagccagatccaggctcctggaagaaccatgtccggcagctactggtcatgccaggcacacactgctgcccaagaggagctgctgtttgaattatctgtgaatgttgggaagaggaatgccagagctgccggctgaaaattacccaaccaagagaaatctgcaggatggactttctggtcctcttcttgttctacctggcttcggtgctgatgggtcttgttcttatctgcgtctgctcgaaaacccatagcttgaaaggcctggccaggggaggagcacagatattttcctgtataattccagaatgtcttcagagagccgtgcatggattgcttcattaccttttccatacgagaaaccacaccttcattgtcctgcacctggtcttgcaagggatggtttatactgagtacacctgggaagtatttggctactgtcaggagctggagttgtccttgcattaccttcttctgccctatctgctgctaggtgtaaacctgttttttttcaccctgacttgtggaaccaatcctggcattataacaaaagcaaatgaattattatttcttcatgtttatgaatttgatgaagtgatgtttccaaagaacgtgaggtgctctacttgtgatttaaggaaaccagctcgatccaagcactgcagtgtgtgtaactggtgtgtgcaccgtttcgaccatcactgtgtttgggtgaacaactgcatcggggcctggaacatcaggtacttcctcatctacgtcttgaccttgacggcctcggctgccaccgtcgccattgtgagcaccacttttctggtccacttggtggtgatgtcagatttataccaggagacttacatcgatgaccttggacacctccatgttatggacacggtctttcttattcagtacctgttcctgacttttccacggattgtcttcatgctgggctttgtcgtggttctgagcttcctcctgggtggctacctgttgtttgtcctgtatctggcggccaccaaccagactactaacgagtggtacagaggtgactgggcctggtgccagcgttgtccccttgtggcctggcctccgtcagcagagccccaagtccaccggaacattcactcccatgggcttcggagcaaccttcaagagatctttctacctgcctttccatgtcatgagaggaagaaacaagaatgacaagtgtatgactgcctttg

SEQ ID NO: 6546 - protein, 344 aa, Homo sapiens; identical to SEQ ID NO: 829

SEQ ID NO: 6547 - DNA, 1535 bp, Homo sapiens
cccgggaggcgccggagcccagcggctggcggtaaggccgcctccgcggggctgtgggaagcttgggctgtcccaggaccgtcagtctcctcctctgaccctccctttccccttgtgtgtagggccgccgtcccacccccacctcgcccgagtccggggcggccccggtgtcccctccgagcctgctgcactccacgtccccctaccagggctccagcccccagggaaatctccgaccaggcccgcccaggagccagatccaggctcctggaagaaccatgtccggcagctactggtcatgccaggcacacactgctgcccaagaggagctgctgtttgaattatctgtgaatgttgggaagaggaatgccagagctgccggctgaaaattacccaaccaagagaaatctgcaggatggactttctggtcctcttcttgttctacctggcttcggtgctgatgggtcttgttcttatctgcgtctgctcgaaaacccatagcttgaaaggcctggccaggggaggagcacagatattttcctgtataattccagaatgtcttcagagagccgtgcatggattgcttcattaccttttccatacgagaaaccacaccttcattgtcctgcacctggtcttgcaagggatggtttatactgagtacacctgggaagtatttggctactgtcaggagctggagttgtccttgcattaccttcttctgccctatctgctgctaggtgtaaacctgttttttttcaccctgacttgtggaaccaatcctggcattataacaaaagcaaatgaattattatttcttcatgtttatgaatttgatgaagtgatgtttccaaagaacgtgaggtgctctacttgtgatttaaggaaaccagctcgatccaagcactgcagtgtgtgtaactggtgtgtgcaccgtttcgaccatcactgtgtttgggtgaacaactgcatcggggcctggaacatcaggtacttcctcatctacgtcttgaccttgacggcctcggctgccaccgtcgccattgtgagcaccacttttctggtccacttggtggtgatgtcagatttataccaggagacttacatcgatgaccttggacacctccatgttatggacacggtctttcttattcagtacctgttcctgacttttccacggattgtcttcatgctgggctttgtcgtggttctgagcttcctcctgggtggctacctgttgtttgtcctgtatctggcggccaccaaccagactactaacgagtggtacagaggtgactgggcctggtgccagcgttgtccccttgtggcctggcctccgtcagcagagccccaagtccaccggaacattcactcccatgggcttcggagcaaccttcaagagatctttctacctgcctttccatgtcatgagaggaagaaacaagaatgacaagtgtatgactgcctttgagctgtagttcccgtttatttacacatgtggatcctcgttttccaagcatggcttgtttgttttg

SEQ ID NO: 6548 - protein, 344 aa, Homo sapiens; identical to SEQ ID NO: 829

SEQ ID NO: 6549 - DNA, 1772 bp, Homo sapiens
cccgggaggcgccggagcccagcggctggcggtaaggccgcctccgcggggctgtgggaagcttgggctgtcccaggaccgtcagtctcctcctctgaccctccctttccccttgtgtgtagggccgccgtcccacccccacctcgcccgagtccggggcggccccggtgtcccctccgagcctgctgcactccacgtccccctaccagggctccagcccccagggaaatctccgaccaggcccgcccaggagccagatccaggctcctggaagaaccatgtccggcagctactggtcatgccaggcacacactgctgcccaagaggagctgctgtttgaattatctgtgaatgttgggaagaggaatgccagagctgccggctgaaaattacccaaccaagagaaatctgcaggatggactttctggtcctcttcttgttctacctggcttcggtgctgatgggtcttgttcttatctgcgtctgctcgaaaacccatagcttgaaaggcctggccaggggaggagcacagatattttcctgtataattccagaatgtcttcagagagccgtgcatggattgcttcattaccttttccatacgagaaaccacaccttcattgtcctgcacctggtcttgcaagggatggtttatactgagtacacctgggaagtatttggctactgtcaggagctggagttgtccttgcattaccttcttctgccctatctgctgctaggtgtaaacctgttttttttcaccctgacttgtggaaccaatcctggcattataacaaaagcaaatgaattattatttcttcatgtttatgaatttgatgaagtgatgtttccaaagaacgtgaggtgctctacttgtgatttaaggaaaccagctcgatccaagcactgcagtgtgtgtaactggtgtgtgcaccgtttcgaccatcactgtgtttgggtgaacaactgcatcggggcctggaacatcaggtacttcctcatctacgtcttgaccttgacggcctcggctgccaccgtcgccattgtgagcaccacttttctggtccacttggtggtgatgtcagatttataccaggagacttacatcgatgaccttggacacctccatgttatggacacggtctttcttattcagtacctgttcctgacttttccacggattgtcttcatgctgggctttgtcgtggttctgagcttcctcctgggtggctacctgttgtttgtcctgtatctggcggccaccaaccagactactaacgagtggtacagaggtgactgggcctggtgccagcgttgtccccttgtggcctggcctccgtcagcagagccccaagtccaccggaacattcactcccatgggcttcggagcaaccttcaagagatctttctacctgcctttccatgtcatgagaggaagaaacaagaatgacaagtgtatgactgcctttgagctgtagttcccgtttatttacacatgtggatcctcgttttccaagcatggcttgtttgttttgatttctgctgtgcttataaatcactttcggtgggcaagggagagaggggaaaatgggtgttgactgaggaatcccccttgcttgtcttcttttgaaaccgggcatctctgaagtcctggtgtcaaggggatcaagagatgacttctcagaggttctaggtgatgctgagaccttggtgtctctaaactctgggcatgtggacaggaggggcttgcggccgtgtctctgacctgtgtg

SEQ ID NO: 6550 - protein, 344 aa, Homo sapiens; identical to SEQ ID NO: 829

SEQ ID NO: 6551 - DNA, 810 bp, Homo sapiens
ggccgcctccgcggggctgtgggaagcttgggctgtcccaggaccgtcagtctcctcctctgaccctccctttccccttgtgtgtagggccgccgtcccacccccacctcgcccgagtccggggcggccccggtgtcccctccgagcctgctgcactccacgtccccctaccagggctccagcccccagggaaatctccgaccaggcccgcccaggagccagatccaggctcctggaagaaccatgtccggcagctactggtcatgccaggcacacactgctgcccaagaggagctgctgtttgaattatctgtgaatgttgggaagaggaatgccagagctgccggctgaaaattacccaaccaagagaaatctgcaggatggactttctggtcctcttcttgttctacctggcttcggtgctgatgggtcttgttcttatctgcgtctgctcgaaaacccatagcttgaaaggcctggccaggggaggagcacaggaagctgaggcaggaggatcccttgagccaggagtctgaagttgccatgagctatgatcacgccactgcactccagcctggactacagagtgagaccctgtctcaacaacaacaaaaaagatgccacttaacatcattgatggatttagttcgttgatggcagttgtgggatattccacagcctctgtctgtgtgggttttgtgttcctgctgaaagtcctcttgcggtggtgctttgagagaagaggttgctgttttcctctggattagatgcctgtgattgggcatggatgtgagcagggtccgcctgggg

SEQ ID NO: 6552 - protein, 51 aa, Homo sapiens
MDFLVLFLFYLASVLMGLVLICVCSKTHSLKGLARGGAQEAEAGGSLEPGV

SEQ ID NO: 6553 - DNA, 2850 bp, Homo sapiens
ggccgcctccgcggggctgtgggaagcttgggctgtcccaggaccgtcagtctcctcctctgaccctccctttccccttgtgtgtagggccgccgtcccacccccacctcgcccgagtccggggcggccccggtgtcccctccgagcctgctgcactccacgtccccctaccagggctccagcccccagggaaatctccgaccaggcccgcccaggaggtattctgcctttgactgcaactcttgtcgtcttatgtgggtgttgaattgatctgtctctgcagccagatccaggctcctggaagaaccatgtccggcagctactggtcatgccaggcacacactgctgcccaagaggagctgctgtttgaattatctgtgaatgttgggaagaggaatgccagagctgccggctgaaaattacccaaccaagagaaatctgcaggatggactttctggtcctcttcttgttctacctggcttcggtgctgatgggtcttgttcttatctgcgtctgctcgaaaacccatagcttgaaaggcctggccaggggaggagcacagatattttcctgtataattccagaatgtcttcagagagccgtgcatggattgcttcattaccttttccatacgagaaaccacaccttcattgtcctgcacctggtcttgcaagggatggtttatactgagtacacctgggaagtatttggctactgtcaggagctggagttgtccttgcattaccttcttctgccctatctgctgctaggtgtaaacctgttttttttcaccctgacttgtggaaccaatcctggcattataacaaaagcaaatgaattattatttcttcatgtttatgaatttgatgaagtgatgtttccaaagaacgtgaggtgctctacttgtgatttaaggaaaccagctcgatccaagcactgcagtgtgtgtaactggtgtgtgcaccgtttcgaccatcactgtgtttgggtgaacaactgcatcggggcctggaacatcaggtacttcctcatctacgtcttgaccttgacggcctcggctgccaccgtcgccattgtgagcaccacttttctggtccacttggtggtgatgtcagatttataccaggagacttacatcgatgaccttggacacctccatgttatggacacggtctttcttattcagtacctgttcctgacttttccacggattgtcttcatgctgggctttgtcgtggttctgagcttcctcctgggtggctacctgttgtttgtcctgtatctggcggccaccaaccagactactaacgagtggtacagaggtgactgggcctggtgccagcgttgtccccttgtggcctggcctccgtcagcagagccccaagtccaccggaacattcactcccatgggcttcggagcaaccttcaagagatctttctacctgcctttccatgtcatgagaggaagaaacaagaatgacaagtgtatgactgcctttgagctgtagttcccgtttatttacacatgtggatcctcgttttccaagcatggcttgtttgttttgatttctgctgtgcttataaatcactttcggtgggcaagggagagaggggaaaatgggtgttgactgaggaatcccccttgcttgtcttcttttgaaaccgggcatctctgaagtcctggtgtcaaggggatcaagagatgacttctcagaggttctaggtgatgctgagaccttggtgtctctaaactctgggcatgtggacaggaggggcttgcggccgtgtctctgacctgtgtgatgtgcaggagggtctcattgactcagcgcctgcgcgttgtgcctggctgtgctctcttttatgccccctctattctcctctctcccccaggggattttcatctcaacaacagagtgtcctcacccaggcctgccttccggccagtatgggcttgtacatcaggcaccttcctgcatgtgtggcctccggcctgccctcctctagccacattcaagtcctttctcaccagtttaaaaattgtgaaagtgaactgccacctatttcagaggagacatgactgccagaaacgaggtcttggtgcggaaggtctttggagtgggagggctctcaggtgcaggtggcaggtgttctgcaccttgctaggccaaggagcccgcagtcagagaggctgggaagtgggagtcaggggcagggggccttccagccatcttcccccgtaccccccagctgagaacagatggaaacgtgaagacgggtagctggggcggccagggaacccaagtccgctggccgaagccaaagcccggcaccacccccaattcttgctggtggaaagcaccgtgaaatcaaccagcggcagctctgaacgcgacgcacagcccgcgagggagcctgggcaaggacggagcgggcctgcaccggcggttgggcgggctccgggggcggggtccacctgggaccgcggcgcgcccctcaccgctcgcgccgccagggggcgccctccggagagcgcgcctaggccgcggcctgcgcttggcccctgcgggccgccgtctccgtgcccggcattcggccgctgttcggctgcgcggcggcagctcccggcggctcctggcggcgccgcagtcggaccttcgggcgcctgctggccggcggcagcagcgatggccccctgagcaggcagggagcaggcggcggcaggcgggcaagcgggcgggtgccgcagcccaggcccgggtcgcgcctctttgtttccacgggtagcggcgcagtcccgggccccgggcggaagtgagacgcgctcggcgcgggggccgcggcggccgc

SEQ ID NO: 6554 - protein, 344 aa, Homo sapiens; identical to SEQ ID NO: 829

SEQ ID NO: 6555 - DNA, 615 bp, Homo sapiens
gccagatccaggctcctggaagaaccatgtccggcagctactggtcatgccaggcacacactgctgcccaagaggagctgttgtttgtcctgtatctggcggccaccaaccagactactaacgagtggtacagaggtgactgggcctggtgccagcgttgtccccttgtggcctggcctccgtcagcagagccccaagtccaccggaacattcactcccatgggcttcggagcaaccttcaagagatctttctacctgcctttccatgtcatgagaggaagaaacaagaatgacaagtgtatgactgcctttgagctgtagttcccgtttatttacacatgtggatcctcgttttccaagcatggcttgtttgttttgatttctgctgtgcttataaatcactttcggtgggcaagggagagaggggaaaatgggtgttgactgaggaatcccccttgcttgtcttcttttgaaaccgggcatctctgaagtcctggtgtcaaggggatcaagagatgacttctcagaggttctaggtgatgctgagaccttggtgtctctaaactctgggcatgtggacaggaggggcttgcggccgtgtctctgacctgtgtg

SEQ ID NO: 6556 - protein, 88 aa, Homo sapiens
MSGSYWSCQAHTAAQEELLFVLYLAATNQTTNEWYRGDWAWCQRCPLVAWPPSAEPQVHRNIHSHGLRSNLQEIFLPAFPCHERKKQE

SEQ ID NO: 6557 - DNA, 752 bp, Homo sapiens
atttgatgaagtgatgtttccaaagaacgtgaggtgctctacttgtgatttaaggaaaccagctcgatccaagcactgcagtgagtgtggctctcgtgactccagcggcacctccaacagcacatgtgtgggcttcgtctgtgagggaatgtttcctgaatccgaaagcagagccagttcacccccagatatggtgtgtgtaactggtgtgtgcaccgtttcgaccatcactgtgtttgggtgaacaactgcatcggggcctggaacatcaggtacttcctcatctacgtcttgaccttgacggcctcggctgccaccgtcgccattgtgagcaccacttttctggtccacttggtggtgatgtcagatttataccaggagacttacatcgatgaccttggacacctccatgttatggacacggtctttcttattcagtacctgttcctgacttttccacggattgtcttcatgctgggctttgtcgtggttctgagcttcctcctgggtggctacctgttgtttgtcctgtatctggcggccaccaaccagactactaacgagtggtacagaggtgactgggcctggtgccagcgttgtccccttgtggcctggcctccgtcagcagagccccaagtccaccggaacattcactcccatgggcttcggagcaaccttcaagagatctttctacctgcctttccatgtcatgagaggaagaaacaagaatgacaagtgtatgactgcctttg

SEQ ID NO: 6558 - protein, 123 aa, Homo sapiens
MSDLYQETYIDDLGHLHVMDTVFLIQYLFLTFPRIVFMLGFVVVLSFLLGGYLLFVLYLAATNQTTNEWYRGDWAWCQRCPLVAWPPSAEPQVHRNIHSHGLRSNLQEIFLPAFPCHERKKQE

SEQ ID NO: 6559 - DNA, 817 bp, Homo sapiens
atttgatgaagtgatgtttccaaagaacgtgaggtgctctacttgtgatttaaggaaaccagctcgatccaagcactgcagtgagtgtggctctcgtgactccagcggcacctccaacagcacatgtgtgggcttcgtctgtgagggaatgtttcctgaatccgaaagcagagccagttcacccccagatatggtgtgtgtaactggtgtgtgcaccgtttcgaccatcactgtgtttgggtgaacaactgcatcggggcctggaacatcaggtacttcctcatctacgtcttgaccttgacggcctcggctgccaccgtcgccattgtgagcaccacttttctggtccacttggtggtgatgtcagatttataccaggagacttacatcgatgaccttggacacctccatgttatggacacggtctttcttattcagtacctgttcctgacttttccacggattgtcttcatgctgggctttgtcgtggttctgagcttcctcctgggtggctacctgttgtttgtcctgtatctggcggccaccaaccagactactaacgagtggtacagaggtgactgggcctggtgccagcgttgtccccttgtggcctggcctccgtcagcagagccccaagtccaccggaacattcactcccatgggcttcggagcaaccttcaagagatctttctacctgcctttccatgtcatgagaggaagaaacaagaatgacaagtgtatgactgcctttgagctgtagttcccgtttatttacacatgtggatcctcgttttccaagcatggcttgtttgttttg

SEQ ID NO: 6560 - protein, 123 aa, Homo sapiens; identical to SEQ ID NO: 6558

SEQ ID NO: 6561 - DNA, 1054 bp, Homo sapiens
atttgatgaagtgatgtttccaaagaacgtgaggtgctctacttgtgatttaaggaaaccagctcgatccaagcactgcagtgagtgtggctctcgtgactccagcggcacctccaacagcacatgtgtgggcttcgtctgtgagggaatgtttcctgaatccgaaagcagagccagttcacccccagatatggtgtgtgtaactggtgtgtgcaccgtttcgaccatcactgtgtttgggtgaacaactgcatcggggcctggaacatcaggtacttcctcatctacgtcttgaccttgacggcctcggctgccaccgtcgccattgtgagcaccacttttctggtccacttggtggtgatgtcagatttataccaggagacttacatcgatgaccttggacacctccatgttatggacacggtctttcttattcagtacctgttcctgacttttccacggattgtcttcatgctgggctttgtcgtggttctgagcttcctcctgggtggctacctgttgtttgtcctgtatctggcggccaccaaccagactactaacgagtggtacagaggtgactgggcctggtgccagcgttgtccccttgtggcctggcctccgtcagcagagccccaagtccaccggaacattcactcccatgggcttcggagcaaccttcaagagatctttctacctgcctttccatgtcatgagaggaagaaacaagaatgacaagtgtatgactgcctttgagctgtagttcccgtttatttacacatgtggatcctcgttttccaagcatggcttgtttgttttgatttctgctgtgcttataaatcactttcggtgggcaagggagagaggggaaaatgggtgttgactgaggaatcccccttgcttgtcttcttttgaaaccgggcatctctgaagtcctggtgtcaaggggatcaagagatgacttctcagaggttctaggtgatgctgagaccttggtgtctctaaactctgggcatgtggacaggaggggcttgcggccgtgtctctgacctgtgtg

SEQ ID NO: 6562 - protein, 123 aa, Homo sapiens; identical to SEQ ID NO: 6558

SEQ ID NO: 6563 - DNA, 287 bp, Homo sapiens
aacagcacatgtgtgggcttcgtctgtgagggaatgtttcctgaatccgaaagcagagccagttcacccccagatatggtgtggccactacttgtagagttgagataatggtttctttcagatgagtgagggtcaggtcttgtgttcctgtgtagtagacagtcctcatctctgggcataacagcccttccctcgccacgtggcaggacatgctccccacaagttgtttctgcggatgttgttgatcctcccgcctagcctctgagtagctgggaccatgggtgcat

SEQ ID NO: 6564 - protein, 42 aa, Homo sapiens
GSGLVFLCSRQSSSLGITALPSPRGRTCSPQVVSADVVDPPA

SEQ ID NO: 6565 - DNA, 737 bp, Homo sapiens
cattttcctctgatgacacatccagtggacagattatgaaaatctcagcaggtgtgcggtgtccttgtctcgtcaagcaccatcccagcacgtgcccccttgtttctgtgcaggtgtgtgtaactggtgtgtgcaccgtttcgaccatcactgtgtttgggtgaacaactgcatcggggcctggaacatcaggtacttcctcatctacgtcttgaccttgacggcctcggctgccaccgtcgccattgtgagcaccacttttctggtccacttggtggtgatgtcagatttataccaggagacttacatcgatgaccttggacacctccatgttatggacacggtctttcttattcagtacctgttcctgacttttccacggattgtcttcatgctgggctttgtcgtggttctgagcttcctcctgggtggctacctgttgtttgtcctgtatctggcggccaccaaccagactactaacgagtggtacagaggtgactgggcctggtgccagcgttgtccccttgtggcctggcctccgtcagcagagccccaagtccaccggaacattcactcccatgggcttcggagcaaccttcaagagatctttctacctgcctttccatgtcatgagaggaagaaacaagaatgacaagtgtatgactgcctttgagctgtagttcccgtttatttacacatgtggatcctcgttttccaagcatggcttgtttgttttg

SEQ ID NO: 6566 - protein, 123 aa, Homo sapiens; identical to SEQ ID NO: 6558

SEQ ID NO: 6567 - DNA, 2139 bp, Homo sapiens
attcttgctggtggaaagcaccgtgaaatcaaccagcggcagctctgaacgcgacgcacagcccgcgagggagcctgggcaaggacggagcgggcctgcaccggcggttgggcgggctccgggggcggggtccacctgggaccgcggcgcgcccctcaccgctcgcgccgccagggggcgccctccggagagcgcgcctaggccgcggcctgcgcttggcccctgcgggccgccgtctccgtgcccggcattcggccgctgttcggctgcgcggcggcagctcccggcggctcctggcggcgccgcagtcggaccttcgggcgcctgctggccggcggcagcagcgatggccccctgagcaggcagggagcaggcggcggcaggcgggcaagcgggcgggtgccgcagcccaggcccgggtcgcgcctctttgtttccacgggtagcggcgcagtcccgggccccgggcggaagtgagacgcgctcggcgcgggggccgcggcggccgcaccatgagcgacatccgccactcgctgctgcgccgcgatgcgctgagcgccgccaaggaggtgttgtaccacctggacatctacttcagcagccagctgcagagcgcgccgctgcccatcgtggacaagggccccgtggagctgctggaggagttcgtgttccaggtgcccaaggagcgcagcgcgcagcccaaggagcaaaccaaggactctgttcggcagattattttttcatcccttttcagccctcaagggaacaaagccgatgacagccggatgagcttgttgggaaaactggtctccatggcggtggctgtgtgtcgaatcccggtgttggagtgtgctgcctcctggcttcagcggacgcccgtggtttactgtgtgaggttagccaaggcccttgtagatgactactgctgtttggtgccgggatccattcagacgctgaagcagatattcagtgccagcccgagattctgctgccagttcatcacctccgttaccgcgctctatgacctgtcatcagatgacctcattccacctatggacttgcttgaaatgattgtcacctggatttttgaggacccaagcgtcctgcaagtgctcatgacgctgcagctgcacctgaccgagaagaatctgtatgggcgcctggggctgatcctcttcgaccacatggtcccgctggtagaggagatcaacaggttggcggatgaactgaaccccctcaacgcctcccaggagattgagctctcgctggaccggctggcgcaggctctgcaggtggccatggcctcaggagctctgctgtgcacgagagatgacctgagaaccttgtgctccaggctgccccataataacctcctccagctggtgatctcgggtcccgtgcagcagtcgcctcacgccgcgctccccccggggttctacccccacatccacacgcccccgctgggctacggggctgtcccggcccaccccgccgcccaccccgccctgcccacgcatcccggccacaccttcatctccggcgtgacctttcccttcaggcccatccgctaggctggcccgtgtgtgccttctgcgctctcgctggacgaagcctttcgagatggaaggggtggccggactcccagaagagaacctcggggaaggggtcgggcagcccctccccgccggcagaaccgtcttggtgtcacggagtccaggtgcttcccacccggtcgcattctttgacatgcagattggatggtggagggaagagtccagcctctgccgagagcctgctgcgtgcatttttaaaagatgccgatcctgggagcctctgttctctgcgcatttcagacacagcctgtgtggcgaggagtgtgacggcaggagccacgggtgcaagcccgtgtgtctggcctctttcctcgtgaagacgatgtgtccccgccagaaaaagtgggctccttctgcagccccgtgagctgagcccaggctgcgtagtgaccacaagcttatgtgcagcactgctcagggaggctgtcaggaattcccctcacctcggaaaggaacttctcagttttattgggggtgtctaaatttcctttcatatgttcaaataaatttttctaaacagtcatgt

SEQ ID NO: 6568 - protein, 352 aa, Homo sapiens
MSDIRHSLLRRDALSAAKEVLYHLDIYFSSQLQSAPLPIVDKGPVELLEEFVFQVPKERSAQPKEQTKDSVRQIIFSSLFSPQGNKADDSRMSLLGKLVSMAVAVCRIPVLECAASWLQRTPVVYCVRLAKALVDDYCCLVPGSIQTLKQIFSASPRFCCQFITSVTALYDLSSDDLIPPMDLLEMIVTWIFEDPSVLQVLMTLQLHLTEKNLYGRLGLILFDHMVPLVEEINRLADELNPLNASQEIELSLDRLAQALQVAMASGALLCTRDDLRTLCSRLPHNNLLQLVISGPVQQSPHAALPPGFYPHIHTPPLGYGAVPAHPAAHPALPTHPGHTFISGVTFPFRPIR

SEQ ID NO: 6569 - DNA, 2430 bp, Homo sapiens
attcttgctggtggaaagcaccgtgaaatcaaccagcggcagctctgaacgcgacgcacagcccgcgagggagcctgggcaaggacggagcgggcctgcaccggcggttgggcgggctccgggggcggggtccacctgggaccgcggcgcgcccctcaccgctcgcgccgccagggggcgccctccggagagcgcgcctaggccgcggcctgcgcttggcccctgcgggccgccgtctccgtgcccggcattcggccgctgttcggctgcgcggcggcagctcccggcggctcctggcggcgccgcagtcggaccttcgggcgcctgctggccggcggcagcagcgatggccccctgagcaggcagggagcaggcggcggcaggcgggcaagcgggcgggtgccgcagcccaggcccgggtcgcgcctctttgtttccacgggtagcggcgcagtcccgggccccgggcggaagtgagacgcgctcggcgcgggggccgcggcggccgcaccatgagcgacatccgccactcgctgctgcgccgcgatgcgctgagcgccgccaaggaggtgttgtaccacctggacatctacttcagcagccagctgcagagcgcgccgctgcccatcgtggacaagggccccgtggagctgctggaggagttcgtgttccaggtgcccaaggagcgcagcgcgcagcccaagagactgaattcccttcaggagcttcaacttcttgaaatcatgtgcaattatttccaggagcaaaccaaggactctgttcggcagattattttttcatcccttttcagccctcaagggaacaaagccgatgacagccggatgagcttgttgggaaaactggtctccatggcggtggctgtgtgtcgaatcccggtgttggagtgtgctgcctcctggcttcagcggacgcccgtggtttactgtgtgaggttagccaaggcccttgtagatgactactgctgtttggtgccgggatccattcagacgctgaagcagatattcagtgccagcccgagattctgctgccagttcatcacctccgttaccgcgctctatgacctgtcatcagatgacctcattccacctatggacttgcttgaaatgattgtcacctggatttttgaggacccaaggttgattctcatcacttttttaaatactccgattgcggccaatctgccaataggattcttagagctcaccccgctcgttggattgatccgctggtgcgtgaaggcacccctggcttataaaaggaaaaagaagccccccttatccaatggccatgtcagcaacaaggtcacaaaggacccgggcgtggggatggacagagactcccacctcttgtactcaaaactccacctcagcgtcctgcaagtgctcatgacgctgcagctgcacctgaccgagaagaatctgtatgggcgcctggggctgatcctcttcgaccacatggtcccgctggtagaggagatcaacaggttggcggatgaactgaaccccctcaacgcctcccaggagattgagctctcgctggaccggctggcgcaggctctgcaggtggccatggcctcaggagctctgctgtgcacgagagatgacctgagaaccttgtgctccaggctgccccataataacctcctccagctggtgatctcgggtcccgtgcagcagtcgcctcacgccgcgctccccccggggttctacccccacatccacacgcccccgctgggctacggggctgtcccggcccaccccgccgcccaccccgccctgcccacgcatcccggccacaccttcatctccggcgtgacctttcccttcaggcccatccgctaggctggcccgtgtgtgccttctgcgctctcgctggacgaagcctttcgagatggaaggggtggccggactcccagaagagaacctcggggaaggggtcgggcagcccctccccgccggcagaaccgtcttggtgtcacggagtccaggtgcttcccacccggtcgcattctttgacatgcagattggatggtggagggaagagtccagcctctgccgagagcctgctgcgtgcatttttaaaagatgccgatcctgggagcctctgttctctgcgcatttcagacacagcctgtgtggcgaggagtgtgacggcaggagccacgggtgcaagcccgtgtgtctggcctctttcctcgtgaagacgatgtgtccccgccagaaaaagtgggctccttctgcagccccgtgagctgagcccaggctgcgtagtgaccacaagcttatgtgcagcactgctcagggaggctgtcaggaattcccctcacctcggaaaggaacttctcagttttattgggggtgtctaaatttcctttcatatgttcaaataaatttttctaaacagtcatgt

SEQ ID NO: 6570 - protein, 449 aa, Homo sapiens; identical to SEQ ID NO: 831

SEQ ID NO: 6571 - DNA, 575 bp, Homo sapiens
caaggttgattctcatcacttttttaaatactccgattgcggccaatctgccaataggattcttagagctcaccccgctcgttggattgatccgctggtgcgtgaaggcacccctggcttataaaaggaaaaagaagccccccttatccaatggccatgtcagcaacaaggtcacaaaggacccgggcgtggggatggacagagactcccacctcttgtactcaaaactccacctcagcgtcctgcaagtgctcatgacgctgcagctgcacctgaccgagaagaatctgtatgggcgcctggggctgatcctcttcgaccacatggtcccgctggtagaggagatcaacaggttggcggatgaactgaaccccctcaacgcctcccaggagattgagctctcgctggaccggctggcgcaggctctgcaggtggccatggcctcaggagctctgctgtgcacgagaggtggagtctcgcttctttgcccaggctggagtgcagtggtgcgatctcggctcattgcaacctctgcctcccgggttctagtgattctaccgcctcagcctcccaag

SEQ ID NO: 6572 - protein, 126 aa, Homo sapiens
MDRDSHLLYSKLHLSVLQVLMTLQLHLTEKNLYGRLGLILFDHMVPLVEEINRLADELNPLNASQEIELSLDRLAQALQVAMASGALLCTRGGVSLLCPGWSAVVRSRLIATSASRVLVILPPQPP

SEQ ID NO: 6573 - DNA, 1428 bp, Homo sapiens
caaggttgattctcatcacttttttaaatactccgattgcggccaatctgccaataggattcttagagctcaccccgctcgttggattgatccgctggtgcgtgaaggcacccctggcttataaaaggaaaaagaagccccccttatccaatggccatgtcagcaacaaggtcacaaaggacccgggcgtggggatggacagagactcccacctcttgtactcaaaactccacctcagcgtcctgcaagtgctcatgacgctgcagctgcacctgaccgagaagaatctgtatgggcgcctggggctgatcctcttcgaccacatggtcccgctggtagaggagatcaacaggttggcggatgaactgaaccccctcaacgcctcccaggagattgagctctcgctggaccggctggcgcaggctctgcaggtggccatggcctcaggagctctgctgtgcacgagagatgacctgagaaccttgtgctccaggctgccccataataagacggtagtgaggatgagacccagtggtgtttgtgaatttctcatcctactccttgccacgtggagacctccacaaacgcagtcatcaggactctgaatttcggggtcgtttgcaaggccagcttcctggggcttctgcttggaattcagcctcctccagctggtgatctcgggtcccgtgcagcagtcgcctcacgccgcgctccccccggggttctacccccacatccacacgcccccgctgggctacggggctgtcccggcccaccccgccgcccaccccgccctgcccacgcatcccggccacaccttcatctccggcgtgacctttcccttcaggcccatccgctaggctggcccgtgtgtgccttctgcgctctcgctggacgaagcctttcgagatggaaggggtggccggactcccagaagagaacctcggggaaggggtcgggcagcccctccccgccggcagaaccgtcttggtgtcacggagtccaggtgcttcccacccggtcgcattctttgacatgcagattggatggtggagggaagagtccagcctctgccgagagcctgctgcgtgcatttttaaaagatgccgatcctgggagcctctgttctctgcgcatttcagacacagcctgtgtggcgaggagtgtgacggcaggagccacgggtgcaagcccgtgtgtctggcctctttcctcgtgaagacgatgtgtccccgccagaaaaagtgggctccttctgcagccccgtgagctgagcccaggctgcgtagtgaccacaagcttatgtgcagcactgctcagggaggctgtcaggaattcccctcacctcggaaaggaacttctcagttttattgggggtgtctaaatttcctttcatatgttcaaataaatttttctaaacagtcatgt

SEQ ID NO: 6574 - protein, 136 aa, Homo sapiens
MDRDSHLLYSKLHLSVLQVLMTLQLHLTEKNLYGRLGLILFDHMVPLVEEINRLADELNPLNASQEIELSLDRLAQALQVAMASGALLCTRDDLRTLCSRLPHNKTVVRMRPSGVCEFLILLLATWRPPQTQSSGL

SEQ ID NO: 6575 - DNA, 3857 bp, Homo sapiens
gcccggccagcggcccgcacggacgcactcccgggcgggcgggcgagcccagggggacccggccttgccgcggcgcccgccccgcccccgccccggcccccgcgcggcccggcccaggccgcccgcaggctccgggcacctgtagcccccgaggacccgcgtcgcctggccgccgccgaccccaggcggggccaccccgtggtgccgaccccgggcgccggcctggatcccgctgcccgcgatggtcccggggggccggccctgagccccgcgcgggattcggggccctgcctcccgccccagcccccgccggagagtctccaccaacttctgctcggccgctcctctcagccccttcccttggcccagggcgacctcggcagcccagagggcgtggaccctccggagtgcccagaaagcccccggggtggccctgcgcctcctggctctttctggatggaggcgcctccggaaggagccggctgcacgccgtggccttcacctcgcagcctctgctgaccacacctccctagcgcagaggctgcccgggagcaggaaatgctccaccagccgactcccgggaatcggggtctgaccgccaggatggaagtggggccagccaccgagaccttcgtgctggaacttcaatgtcttgaggatgggggcccagggcctgacaccctctcaggtggcagcggtgggagcgagagtcaggaggaggaagagcctcaggagaggaacagcagtccacagcggccagcagtctcggccccagtgggggccagtgaaatcgctgaggaaacccggccgggacaacgagagttgcaactgcagcagttagaacagcagcccgagccgcagcaacagccgcaacacgagcagctgcaacagccgcagccacacctagaactgcaacagcagccgcagcaagatgggcaacaacagctatctcaactacaacaggaaaaacaccaatccgtgcaccatcaggaactgaaaccagaactgcagctaatgcaccagcagcaacagttacagccacagcaagtgcaagagcaacagcggttgcagcagcagcaggagcagttacagacgcagcaagcacaagagcaacaggtattgcagcagcaggaacagctacagcagcaagtgcaagagcaacagctgttacagcaacagcaggaacagttacagcagcagcagctgctacaacagcaggaacagttacagcagcaacagtttcaacagcagcaggaacagttacagcagcagcagcagctactattgctgcagcagcagggacagttacagcagcaactgttgcagcagcagcaggcacagttacaacagcagctgctggaacagcagcaggcacagttacagcagcagctactgctgcagcagcaggaacagttacagcagcagcagcaacagcagctgttgcaacagcagcaggaacaattgcagcagcaacaactgcagcctcctcccctggagcccgaggaggaggaagaggtggagctggagctcatgccggtggacctggggtcagagcaggagctggagcagcagcggcaggagttggagcggcagcaggagctggaacggcagcaggagcagcggcagctgcagctcaaactgcaggaggagctgcagcagctggagcaacagctggagcagcagcagcagcagctggagcagcaggaggtgcagctggagctgaccccggtggagctaggcgcccagcagcaggaggtgcagctggagctgacccccgtgcagccggagctgcagctggaactggtgccagccgcagggggcggcggagcggcggtcccgggggctccggccgcggtcgtggtggctcccccgggctacgtggtggtgcaggagctcatggtgctgcccgccgtggcagcgccggccgtggtggccatcccgggcccggcaggcagcgcggcgttgacccctgcacggcagcggcggcggcggcgcgctcgggaccggccgaccatctgcggggagtgcggcaagggcttcagccgcagcacggacctggtgcgccaccaggccacgcacacgggtgagcggccacaccgctgcggcgagtgcggcaagggcttctcgcagcactcgaatctggtgacgcaccaacgcatccacacgggcgagaaaccctacgcctgctcctactgcgccaagcgcttcagcgagagctcggcgctcgtgcagcaccagcgcacgcacaccggggagcgaccctacgcctgcggggactgtggcaagcgcttcagcgtctcctccaacctgctgcgccaccggcgcacgcactcgggcgagcggccctacgtgtgcgaggactgtggcgagcgcttccgacacaaggtgcagatccgccgccacgagcgccagctgcacggcgcgggccgctccaggggcctcggcctgctgcgcgcctcgcggccggcggccctcggtggcccagcccgcgcggagcaggccgctacagccactgcgcccgcagacaaggcgctgtgagggccgtgatcggggctgcctggccgggaggggaccccccacccgcctccacctgaaaagctccttgacccgggttcatgggcgctggaggcgtcctggaatatccctggagtaaaaggcttccaccatcatcatcatcatcatcttccggattccctgagaaaataccaggttcacagatttcaccgccagaaaaatccatccgccaaaagagaagtggaccggggctgaaacagcacacgggacacgtttgtctgccctttgaggggtctgccaaaggttttccctccgggaaaactggacttactacgaacgaggaaaaacccccagtggcgagacgattaatgacactggccgaggactggacacccaccagggaatcaagacgtggtgagacacacgtggaaaatcttcgatcctggtgaaaatgatcgcaaggagaaattcggggaggaagcaaacttgtttgcactatgtagaaactgaccaaggcatcgaatcgtcctcagaggcatttgccttgaaaatactttccaagatgaaaattcatcagggtgggtataattctgatgaaaacgcctgtgttcatcaacacagggtcagagcgctcaccgggtcgatgtgcaaatccaagccaggaagtcctgctccgggtggaaggtaaaaccttccctccagggaaccaggggctccggcgggcatcggaggcagcttcttggcctctgctgctgtgtcccccagtccccccagcccgcattaatgtcctctggaataagagcctgtggctgaagcagagggccttctgggagagctctccaaggtctggaaggagggtcccccagaaggagctccggggtagccccactgtggcccccctggactccaccagcttcatgcttctcagatgctacccaggggccggcccggggagaccagggcagatttctcccgcaccaggctgtggaggtttggagggctgcctgagcagacactgtgccattgctggggctggggaaagaatatctgagacgacgtttgggagcaatgctctttaccacgttcaccaagtcgtctggggcaggggttgtgagctgcagcagttgctggtgccttgtgggaaggtggggcagggaggaggctgcccgccacctctgcccccagtcacttcctgcttgacctgactcttcacatgtggctgcttaattcctgcccctctccccccagctgcttctcctttactaacacacctgctacattttacacatgtgttggtaagtgagaaacagaaacgaaaaataaattaaaatgcagaaatacaa

SEQ ID NO: 6576 - protein, 659 aa, Homo sapiens
MLHQPTPGNRGLTARMEVGPATETFVLELQCLEDGGPGPDTLSGGSGGSESQEEEEPQERNSSPQRPAVSAPVGASEIAEETRPGQRELQLQQLEQQPEPQQQPQHEQLQQPQPHLELQQQPQQDGQQQLSQLQQEKHQSVHHQELKPELQLMHQQQQLQPQQVQEQQRLQQQQEQLQTQQAQEQQVLQQQEQLQQQVQEQQLLQQQQEQLQQQQLLQQQEQLQQQQFQQQQEQLQQQQQLLLLQQQGQLQQQLLQQQQAQLQQQLLEQQQAQLQQQLLLQQQEQLQQQQQQQLLQQQQEQLQQQQLQPPPLEPEEEEEVELELMPVDLGSEQELEQQRQELERQQELERQQEQRQLQLKLQEELQQLEQQLEQQQQQLEQQEVQLELTPVELGAQQQEVQLELTPVQPELQLELVPAAGGGGAAVPGAPAAVVVAPPGYVVVQELMVLPAVAAPAVVAIPGPAGSAALTPARQRRRRRARDRPTICGECGKGFSRSTDLVRHQATHTGERPHRCGECGKGFSQHSNLVTHQRIHTGEKPYACSYCAKRFSESSALVQHQRTHTGERPYACGDCGKRFSVSSNLLRHRRTHSGERPYVCEDCGERFRHKVQIRRHERQLHGAGRSRGLGLLRASRPAALGGPARAEQAATATAPADKAL

SEQ ID NO: 6577 - DNA, 2157 bp, Homo sapiens
gttacagcagcaacagtttcaacagcagcaggaacagttacagcagcagcagcagctactattgctgcagcagcagggacagttacagcagcaactgttgcagcagcagcaggcacagttacaacagcagctgctggaacagcagcaggcacagttacagcagcagctactgctgcagcagcaggaacagttacagcagcagcagcaacagcagctgttgcaacagcagcaggaacaattgcagcagcaacaactgcagcctcctcccctggagcccgaggaggaggaagaggtggagctggagctcatgccggtggacctggggtcagagcaggagctggagcagcagcggcaggagttggagcggcagcaggagctggaacggcagcaggagcagcggcagctgcagctcaaactgcaggaggagctgcagcagctggagcaacagctggagcagcagcagcagcagctggagcagcaggaggtgcagctggagctgaccccggtggagctaggcgcccagcagcaggaggtgcagctggagctgacccccgtgcagccggagctgcagctggaactggtgccagccgcagggggcggcggagcggcggtcccgggggctccggccgcggtcgtggtggctcccccgggctacgtggtggtgcaggagctcatggtgctgcccgccgtggcagcgccggccgtggtggccatcccgggcccggcaggcagcgcggcgttgacccctgcacggcagcggcggcggcggcgcgctcgggaccggccgaccatctgcggggagtgcggcaagggcttcagccgcagcacggacctggtgcgccaccaggccacgcacacgggtgagcggccacaccgctgcggcgagtgcggcaagggcttctcgcagcactcgaatctggtgacgcaccaacgcatccacacgggcgagaaaccctacgcctgctcctactgcgccaagcgcttcagcgagagctcggcgctcgtgcagcaccagcgcacgcacaccggggagcgaccctacgcctgcggggactgtggcaagcgcttcagcgtctcctccaacctgctgcgccaccggcgcacgcactcgggcgagcggccctacgtgtgcgaggactgtggcgagcgcttccgacacaaggtgcagatccgccgccacgagcgccagctgcacggcgcgggccgctccaggggcctcggcctgctgcgcgcctcgcggccggcggccctcggtggcccagcccgcgcggagcaggccgctacagccactgcgcccgcagacaaggcgctgtgagggccgtgatcggggctgcctggccgggaggggaccccccacccgcctccacctgaaaagctccttgacccgggttcatgggcgctggaggcgtcctggaatatccctggagtaaaaggcttccaccatcatcatcatcatcatcttccggattccctgagaaaataccaggttcacagatttcaccgccagaaaaatccatccgccaaaagagaagtggaccggggctgaaacagcacacgggacacgtttgtctgccctttgaggggtctgccaaaggttttccctccgggaaaactggacttactacgaacgaggaaaaacccccagtggcgagacgattaatgacactggccgaggactggacacccaccagggaatcaagacgtggtgagacacacgtggaaaatcttcgatcctggtgaaaatgatcgcaaggagaaattcggggaggaagcaaacttgtttgcactatgtagaaactgaccaaggcatcgaatcgtcctcagagacactgtgccattgctggggctggggaaagaatatctgagacgacgtttgggagcaatgctctttaccacgttcaccaagtcgtctggggcaggggttgtgagctgcagcagttgctggtgccttgtgggaaggtggggcagggaggaggctgcccgccacctctgcccccagtcacttcctgcttgacctgactcttcacatgtggctgcttaattcctgcccctctccccccagctgcttctcctttactaacacacctgctacattttacacatgtgttggtaagtgagaaacagaaacgaaaaataaattaaaatgcagaaatacaa

SEQ ID NO: 6578 - protein, 40 aa, Homo sapiens
MIARRNSGRKQTCLHYVETDQGIESSSETLCHCWGWGKNI

SEQ ID NO: 6579 - DNA, 993 bp, Homo sapiens
tcgcgcagctcccgggccgtcactttgtgtagcgcggggtccgccgccggcccgcaggccccggccccggtgtccggcccgtggctcggccagcccggcccgcgcggtctctgcaggaggaggcggctccggacgccccctggggggcgggaggcgctcggcccgtcgccccaggagcccgctttgtgaccttgggggccttatccgggctttccctcatctgcagaaggagccccggtgggctgctcggctgtcttctgctgccggcaggagctggtcctccaccttctctggtcatccgtgggtggacttcttgggagaaagaactcagtgtcgtctttggaggcagagactctccactgcttctggggaagaagcctgacctgccggcttcctggcacctgtctctcctcctagccccgttgtgccttgcaagtgcctgcatcctgtctgtgctgagacctcttggcgttccctgctggcctggttcatgtgtgttgaggaccaggtaagcgtctctttgtcctgtgtatcaggtgggcttttccttctggctaaacatgggccaccctcgggctgtgtgatgcttccttgtggataaagactgggataaatgcctgatttactccaggaaagagcagcagttcacaccaggcacgtagttcttggtgaaaaggagctgagactggcatcccaggggtcacgcggaggggccattggggcagcctttctgggtacagaatgtcttgatggtgcagggtaagatcgtgggaaggcccggtcctccctcatctccattgccttcaactacataacaggaggagtaaatcctgctccctgcgcccccgccaggctgcgggagaccctgtgaggggaccgtgtggtgtgctgagagcagcccgtcactggcgtccatctgcatttcaggccacgtggaggctcgctcccagggaggatggcggcgctccacacgactcccgactccccagctgc

SEQ ID NO: 6580 - protein, 49 aa, Homo sapiens [sequence omitted]

SEQ ID NO: 6581 - DNA, 3637 bp, Homo sapiens
ataacaggaggagtaaatcctgctccctgcgcccccgccaggctgcgggagaccctgtgaggggaccgtgtggtgtgctgagagcagcccgtcactggcgtccatctgcatttcaggccacgtggaggctcgctcccagggaggatggcggcgctccacacgactcccgactccccagctgcccagctggagcgggcagaggacgggtcagagtgcgaccctgaccaggaagaagaggaggaggaggaggaaaagggggaagaggagctggtgacgtttgaagatgtggctgtgtacttctccctggaggagtgggaaaggctggaagcagaccagcggggcctctaccaggaagtcatgcaggagaactatgggattctcgtgtccttgggatacccaattcccaagcccgatctgatcttccggctggaacaaggggaagaaccttgggtcccagatagtccccgacctgaggaaggagacatcgtcactggcgtctacacagacctggtacctggtgcctctgactgcgcctctgcctttgccgcctggctcctggtggttcaagttccagaaagacctggcagcctggccaaggccatgcagctggttcagatgccagtgcagaagctgcgcccgagagccccgcctcccccaagcaccaatgtgtggggccagtgccaccctcatccccctgacagtttgcagaagagagtgctgctaatgcctatggacttgggcgtgtcacccttgtcctccacctcctttgcgactgtcccccgagcctggttctggacggacgacatagaggaccacgaggaggaagacgacgaggacttcctggcggaggtggccgaggaggagaacgagcccccagggctctggtcggcggcctacggcgtgggggacgtgcctgggacgtgggggcccgacgactcggattcggcgcagactccagaggggtggggacccgacccaggcggcctgggggtcctggccgacggctctgaagcgaagcctttcctgcccggccgggagccgggtgcgaacctgctgtcgccctgggcgttccccgccgcagtggccccgccggccgggaggccggagaccacgtgcgacgtgtgcggcaaggtcttcccgcaccgctcgcggctggccaagcaccagcgctaccacgcggccgtcaagcccttcggctgcgaggagtgcggcaagggcttcgtgtaccgctcgcacttggccatccaccagcgcacgcacaccggcgagaagcccttcccgtgcccggactgcggcaagcgcttcgtctacaagtcgcacctggttacgcaccgacgcatccatactggcgagcggccctaccgctgcgccttctgcggcgcgggcttcgggcgccgctcctacctggtcacgcaccagcgcacgcacaccggcgagcgaccctacccgtgttcgcactgcggccgcagcttcagccagagctcggcgctggcacggcaccaggcggtgcacacggccgaccgcccgcactgctgtcccgactgcggccaggccttccgcctgcgcgccgacttccagcgccaccgacgcggcgggggctgcgcggaggcgggtggtgacggcccccggcgggagcccggcgagacggcggccgccgcggggcccgaggacacggaccctgggccagagggatctgaagttggcgaggcggacggagaggcggaggccgcggccgaggagagagaggaggcggcggtggcggcgcccacccccagcggcaaggtggaccccgcgccggaacggcgcttcctggagctgggcaacggcctgggggagggcgaaggcccctcctcccacccgctgggcttccacttccccgtgcaccccaagtcctggctgcacccggacagcttcccgatcctgggcctacccgacttccgagagcggctgccggtcgacgggcgcccgctcccggcgcccctggggggcccgctctccctggtggagggtaccgggctggcgtgcgaccctttcggcggcggcggggccgcgggcggcggaggcggcctgcgcgcgttcgggcccgccatcgggggtctgctggcggagcccgcgccggccgcgctggcggaggaggagagcccgtggatctgctcggactgcggcaagacgtttgggcgccgggccgcgctggccaagcaccagcgctaccacgcgggcgagcggccgcatcgctgcgccgactgcggcaagagcttcgtgtacggctcgcacctggcgcgccaccggcgcacacacaccggcgagcggcccttcccgtgccccgagtgcggcgcgcggttcgcccgcggctcgcacttggcggcgcacgtgcgcggccacacgggcgagaagccgttcgtgtgcggcgtgtgcggtgcggggttcagccgtcgcgcgcacttgacggcgcacgggcgcgcgcacaccggggagcggccttacgcgtgtggagagtgcggccggcgcttcgggcagagcgcggcgctgacgcggcatcagtgggcgcacgccgaggagaagccgcaccgctgccccgactgcggcaagggcttcggccacagctcggacttcaagcggcatcggcgcacgcacacgggcgagaagcccttccgctgcgccgactgcggccgcggcttcgcgcagcgctccaacctggccaagcaccggcgcggccacacgggcgaacgccccttcccgtgccctgagtgcggcaagcgcttttcgcagcgctcggtgctggtcacgcaccagcgcacacatacgggcgagcggccctacgcctgcgccaactgcggccgccgcttctcgcagagctcgcacttgctcacccacatgaagacgcaccgcggagccaccgcagcgccgggctcgggttcggccccagcccccgcgcccaagcccgaggcggccgccaaggggccgtccagtgccggccccggtgagcgcggcagcgccctgctggagttcgcgggcggcacaagcttcggctccgagcaccaggccgcgttcgccgggccctcgggcgcctaccgggagggcgtcctaggtcacaccttgctaaacatcatcgaaaatacaccacacaagaaaccctatgaatgtaagcaatgtggaaaaaccttccagaagtcacacctcattgaacatcagaggacacacccaggggagataccccatgaatgtaataaatgtgggaaatccttctgttataagtcacccttgaccattcaccagagaactcacatagaagagaagccctataaatgtagcaaatctgttacttatttctgtatgaaatcacacctcactgtgcatcagagaccccataccaggaagaacccttttgagtgtaatgaatgcaggaaaatgttttatgtgaagtcaaacctcatcaatcatcagagaactcacacaggggagaaaccatatgaaggcaatacatgtgggaaatctgtatgaagtcatcctccacacaagagtgatactctgaattgtaacaaatatgggaaatcctcatgtgtaaagtcaatttgtttttcaaaccaaaattcatggtagaaaccttatgaatgtaaataatgtaggggtctccttc

SEQ ID NO: 6582 - protein, 1118 aa, Homo sapiens
MAALHTTPDSPAAQLERAEDGSECDPDQEEEEEEEEKGEEELVTFEDVAVYFSLEEWERLEADQRGLYQEVMQENYGILVSLGYPIPKPDLIFRLEQGEEPWVPDSPRPEEGDIVTGVYTDLVPGASDCASAFAAWLLVVQVPERPGSLAKAMQLVQMPVQKLRPRAPPPPSTNVWGQCHPHPPDSLQKRVLLMPMDLGVSPLSSTSFATVPRAWFWTDDIEDHEEEDDEDFLAEVAEEENEPPGLWSAAYGVGDVPGTWGPDDSDSAQTPEGWGPDPGGLGVLADGSEAKPFLPGREPGANLLSPWAFPAAVAPPAGRPETTCDVCGKVFPHRSRLAKHQRYHAAVKPFGCEECGKGFVYRSHLAIHQRTHTGEKPFPCPDCGKRFVYKSHLVTHRRIHTGERPYRCAFCGAGFGRRSYLVTHQRTHTGERPYPCSHCGRSFSQSSALARHQAVHTADRPHCCPDCGQAFRLRADFQRHRRGGGCAEAGGDGPRREPGETAAAAGPEDTDPGPEGSEVGEADGEAEAAAEEREEAAVAAPTPSGKVDPAPERRFLELGNGLGEGEGPSSHPLGFHFPVHPKSWLHPDSFPILGLPDFRERLPVDGRPLPAPLGGPLSLVEGTGLACDPFGGGGAAGGGGGLRAFGPAIGGLLAEPAPAALAEEESPWICSDCGKTFGRRAALAKHQRYHAGERPHRCADCGKSFVYGSHLARHRRTHTGERPFPCPECGARFARGSHLAAHVRGHTGEKPFVCGVCGAGFSRRAHLTAHGRAHTGERPYACGECGRRFGQSAALTRHQWAHAEEKPHRCPDCGKGFGHSSDFKRHRRTHTGEKPFRCADCGRGFAQRSNLAKHRRGHTGERPFPCPECGKRFSQRSVLVTHQRTHTGERPYACANCGRRFSQSSHLLTHMKTHRGATAAPGSGSAPAPAPKPEAAAKGPSSAGPGERGSALLEFAGGTSFGSEHQAAFAGPSGAYREGVLGHTLLNIIENTPHKKPYECKQCGKTFQKSHLIEHQRTHPGEIPHECNKCGKSFCYKSPLTIHQRTHIEEKPYKCSKSVTYFCMKSHLTVHQRPHTRKNPFECNECRKMFYVKSNLINHQRTHTGEKPYEGNTCGKSV

SEQ ID NO: 6583 - DNA, 393 bp, Homo sapiens
gtttgtccactctttattaaagccaggccctcctgctgacagctgcaggacagctgctggggcccaggagggacggagacagcagatcctggccatacagggctagagctgagattcccagagccccccaagcccaccttgcccttggccctttctgaggctcctgtcccgcagggagaggagaaacccagggccgaggtcattacccacgggtgggaggaggggccttcgccctcccccaggccgttgcccagctccaggaagcgccgttccggcgcggggtccaccttgccgctgggggtgggcgccgccaccgccgcctcctctctctcctcggccgcggcctccgcctctccgtccgcctcgccaacttcagatccctctggcccaggg

SEQ ID NO: 6584 - protein, 117 aa, Homo sapiens
QLQDSCWGPGGTETADPGHTGLELRFPEPPKPTLPLALSEAPVPQGEEKPRAEVITHGWEEGPSPSPRPLPSSRKRRSGAGSTLPLGVGAATAASSLSSAAASASPSASPTSDPSGP

SEQ ID NO: 6585 - DNA, 1757 bp, Homo sapiens
ccaggacgtcacccccacggagactgcgatatcccctgggtgggcccgggctgtgaagcagggcggtagttggcgggcgatgctatttatttcactcggattccgacttgggtggtctggggagcaagggatttgtgtgtttgcaaccgggtgtggcggcgagggaggggcccggccacccaggtgggccagcgggatgcctgggaggccggtgggtttggctgaccacttcttcccattcctcagtgagagacttgggccctcccggtcatccgagtctgtcccgaaggtttaactgcgcgcggcgaggggaggccttgtaggtttccaaagggcggagctccagtgggaaaacttgaaacttgtcgtctgcggatatttatttccacttcttgtatggcctgaagaatctaggaggagaaaaagccagataccaaacttacggccaggcagacgggtcgcgggtgttgacagggtcctgagggagtttgaagccttattctcgagccgcctcctcttctctacccacacttgcaccgaggtcaccccggcaccctccgcaccggttcggttttggtctctgcttgtcctctcagtccttggttggtgaggttgcggggcggggtggtgaggagagcaggggtcccagggaggcattggggtgctgggtaatgacctcggccctgggtttctcctctccctgcgggacaggagcctcagaaagggccaagggcaaggtgggcttggggggctctgggaatctcagctctagccctgtatggccaggatctgctgtctccgtccctcctgggccccagcagctgtcctgcagctgtcagcaggagggcctggctttaataaagagtggacaaactgaacttctgactggactccatgctgtcgccactcctgggaacccgtcggggaggctctgcgcggcctcaggtccaacttgtttctgcaaacattttttaaaagattttctcttttaagaaattagaatgggtcctaggatggcccatgaggagttggccccaggccagtgtggccccgtgctgcccatgcccaccgtattccttggtggcccccacgctgccccacacttgatgtagtgtaaacacctgacttggggcattactttttgtgaatatgttggccaggcttccagaggccagagtgaggggccaggtacccttcgtggtggtccaaacacatccccagccctttcttcagaggccccagcaccatgtggctcatccagggctcacctactccagtaccagggcaaggtgtacagccccaggacccaaaatgcctcccttaaagctgattggttgatttctttattcttatcacatggtagcccacgatcagatctgactctcctgtcctttctttgtgggtctgaaaaataagaactgctgtaatcaaatgtgatctggaggcatcagaacagagcaatctaatgcttcttttcttgcccaggctggagtgcagggcgtgatctcggctcactgcaacctctgcctcccaggttcaagcgattctcctgcctcagactgccgagtagctgggattacaggcatgtgccaccatgcccagcgagtttttttgtatttttagtagagatgggatttcagcatattggccaggctggtcttgagctcctgatcttgtgatctgcctgtcttggccttccaaagtgctgggattgcaggtgtgagtcaccgcgcccggccagagcaacctaatatttc

SEQ ID NO: 6586 - protein, 106 aa, Homo sapiens
MTSALGFSSPCGTGASERAKGKVGLGGSGNLSSSPVWPGSAVSVPPGPQQLSCSCQQEGLALIKSGQTELLTGLHAVATPGNPSGRLCAASGPTCFCKHFLKDFLF

SEQ ID NO: 6587 - DNA, 1330 bp, Homo sapiens
aggtgggccagcgggatgcctgggaggccggtgggtttggctgaccacttcttcccattcctcagtgagagacttgggccctcccggtcatccgagtctgtcccgaaggtttaactgcgcgcggcgaggggaggccttgtaggtttccaaagggcggagctccagtgggaaaacttgaaacttgtcgtctgcggatatttatttccacttcttgtatggcctgaagaatctaggaggagaaaaagccagataccaaacttacggccaggcagacgggtcgcgggtgttgacagggtcctgagggagtttgaagccttattctcgagccgcctcctcttctctacccacacttgcaccgaggtcaccccggcaccctccgcaccggttcggttttggtctctgcttgtcctctcagtccttggtactttcgtctccctcagccggaggtggcaaactcagacatctacgggcgcccgaggccctcgcagccctgagccccagctttcacttccctgggctgcccctctccgggagcaggcagacgccccgttctcggagcccagcgctcacttagagcgactgaggttggtcgaaggatctttccccacatcccataatcagggccctaggacactcgcaggtccctttaactctgcttctgtcattacactagaacaagtagtgtttctgtttagagtcccatttcacaaattggttagtggaggcacccgtggcctggcagcttgcacagtggctgtccacctcgggggggtgtggacctgagccgtggctcagtgacaaaccaggcacccaactatgcaaggcccctgcctggtgggcatcctaccctctggactgggcccatggaagccactgggcgggcagctggggtgtagttcatgtgaagccccattcccctcacgcttttggggccactgtgaatggggccaggaaacggatttttggtgcagctgcattccctaatagacctagttccctccacgttagtgtagacatggccttgggggctgagcgcagcagccaggctgccagggctgggggcgggtaggaggcacggtagttggtgggtgggaagagggcctgggtggtggcggtcagttagcctggctgggtgaggttggtgaggttgcggggcggggtggtgaggagagcaggggtcccagggaggcattggggtgctgggtaatgacctcggccctgggtttctcctctccctgcgggacaggagatctgctgtctccgtccctcctgggccccagcagctgtcctgcagctgtcagcaggagggcctggctttaataaagagtgg

SEQ ID NO: 6588 - protein, 37 aa, Homo sapiens
MTSALGFSSPCGTGDLLSPSLLGPSSCPAAVSRRAWL

SEQ ID NO: 6589 - DNA, 2709 bp, Homo sapiens
gtgcgcaggcgcttgcggcttcgcggggctgaccgtgcgcttcgcctgcggggtcgtgctggggcggcgggtacgctatttgaagaacaggtttccatgctcttagaggagcatcagaaaatgaacaaaccccagaagtccagaaattaagagacctgataaagggaagccaggaaaatcgagatgcatatttgtggtacacttcagttctcagtaacaacacactgactaagaagagggaatacgtttttgggaaaaaccttaatctgggtgcaaacccagtttcttcaagaaaaatagcctgttagtatgactcatgtggaatgagtttgaatacgtttcagaatcaagtattagtgataaaaattatgccagtaataacactgatgaaattaatataagtgagaagttgccttttgatagtaatcaggaaaacactcatactgggaagaaatctgttgtatataaccaaagtgggaagtcaccaagtcatagtgaggaccttattaaggaacaggaaattcaagctttagcccacctttggaagctaatgaacatggaaatcccttccttgagaaggtagccaccatcacacaagagacagctcaaacaagagagaaaccctgtgattataaggagcatggggaaaatgtcagtgccacatcagctcccagagttcatcaagaaattcacacaaggaagaatcactctgaagttaacgagtgtgagaagtcaaccttcttcaaacatcagaaagttaatacaggggtgaaaacccagggagctaatgaaaatgagaatttcagtcacaagtcacatctcagtctgcctcatagaactcacacagtagagaaaacttttgaatgtagtcatggcaagaaatctttttgccaggagtcccacttcactgagcatcacaggacatgcacaagagagaaaccatgtgaaagtaataaatatgggaaaaccttccagaaatgacaacttaccaactctcagataatgcatcgagaagagaaaccccatgaatctggtaaaacccttgtgaagtcagccctcactgatcaccagataagtcaatcagaaaagaagctttatgtatgtagtgactgtaagaaacgtttttgtcatagctcagtcctaagagtccatcagagtattcacacagggagaaaccctatcagtgtaatgggaaatcctaagcaaaatcaaacttcagtcatcatcagagaactcacacaggggagaaaccatatgaatgtaaggaatgtaggaaatccttccatgtgaaaccaaacctcactaaacatcagaaaacacatataggggagaaacctttcaaatgtactgcgtgtggaagaactttcttccagcagtcacaatttgctgattattagagaaaacacacatgagactactgcacttggcctgaagtcacatcttaatattcatctgagaaatcacacaggaaagagaccccatgtatgtaatgaatgtgggaaggccttttctatgaagtcaaacttcactgatcatcagagaacacactgagaagagaaatcctatgaatgtactgaatgtcagaaaacttttcaccataaatcaaccctaacagtacatcagagaactcatatggggagaagccttataaatgtaatgaatgtagaaaatctttctatatgaagtcagccctcagtcagcatcagaggatacatatatgggaggaacattgtgaatgtaaagaatgtgggaaaacctaccagaggtcacaccttgctaaacatcatcgaaaatacaccacacaagaaaccctatgaatgtaagcaatgtggaaaaaccttccagaagtcacacctcattgaacatcagaggacacacccaggggagataccccatgaatgtaataaatgtgggaaatccttctgttataagtcacccttgaccattcaccagagaactcacatagaagagaagccctataaatgtagcaaatctgttacttatttctgtatgaaatcacacctcactgtgcatcagagaccccataccaggaagaacccttttgagtgtaatgaatgcaggaaaatgttttatgtgaagtcaaacctcatcaatcatcagagaactcacacaggggagaaaccatatgaaggcaatacatgtgggaaatctgtatgaagtcatcctccacacaagagtgatactctgaattgtaacaaatatgggaaatcctcatgtgtaaagtcaatttgtttttcaaaccaaaattcatggtagaaaccttatgaatgtaaataatgtaggggtctccttctgtgtaaattaaatccttagttggcatcagaaaacacaagatatagggactggaggcctctccacaaatgaaatggatatgggaagattttgtgttatcttagaaaatactggccgggcatggtggctcacacctgtaatcccagcactttgggaggctgaggcagatggatcacctgaggtcaggagttcaagaccaacctggccaacatgaggaaaccccatctctactaaaaatacaaaaattagccaggcgtggtggcaaatgcctgtaatcctagctacttgggaggctgaggcaggagaattgcttgaacctcggaggcggaggttgcagtgagccaagatcatgccattgcactccagcctgggtgacaagaatgaaaactccatctc

SEQ ID NO: 6590 - protein, 95 aa, Homo sapiens [sequence omitted]

SEQ ID NO: 6591 - DNA, 4175 bp, Homo sapiens
aaactgatgacctaatagagagaatccaggaagaggaaaataaaccttcaaggcaaactgtgttcattgagaccctgattgaagagagaggtaatgttcctggtaaaacttttgatgtagaaacgaaccctgttccttcaagaaaaatagcctataaaaatagcctctgtgactcatgtgaaaagtgtttaacgtctgtttcagaatatattagtagtgatggaagctatgcaagaatgaaagctgatgaatgtagtggatgtgggaaatcactcctccatattaagcttgagaaaactcatccaggagatcaagcttatgaatttaatcaaaatggggaaccttatactctaaatgaagaaagtctttatcagaaaattcgtattttggagaaaccttttgaatatattgaatgccagaaagccttccaaaaggacactgtttttgttaatcacatggaagaaaagccctataagtggaatggatctgaaatagcctttctccagatgtcggacctcactgtacatcagacatctcatatggaaatgaagccctatgaatgcagtgaatgtgggaaatccttctgtaaaaagtcaaaatttattatacatcagaggactcacacaggagagaaaccttacgaatgtaatgaatgtgggaagaacttttaccagaagttacacctcattcagcatcagagaactcactcaggagagaagccctatgaatgtagttattgtggaaaatccttttgccagaagacacacctcacacaacatcagagaacacattcaggagagagaccttatgtttgtcatgactgtgggaaaaccttctcgcagaagtcagcacttaatgaccatcagaaaattcacacaggtgtgaaactctacaagtgtagtgaatgtgggaaatgcttctgccgcaagtctactctcacgacccacctgaggacccacacaggagagaaaccgtatgaatgtaatgagtgtggaaaattcttctctcggttgtcatatctcactgtacattatagaactcattcaggagagaaaccctatgaatgtaatgaatgtggaaaaaccttctacctgaattcagccctcatgagacatcagagagtgcacacaggagagaaaccttacgaatgtaatgaatgtggaaagttattctcccagttgtcatacctcactatccatcatagaactcattcaggagtaaaaccctatgaatgtagtgaatgtgggaaaaccttctaccagaactcagccctttgtagacatcggagaatacacaaaggagagaagccctatgaatgctatatatgtggaaaattcttctctcagatgtcatacctcactatacatcatagaattcattcaggagagaagccctatgaatgtagtgaatgtgggaaaaccttctgccagaattcagcccttaatcgacatcagagaacacacacaggagagaaagcctacgaatgttatgaatgtgggaagtgcttctctcagatgtcctatctcactatacatcatcgaattcattcaggagagaaaccctttgaatgtaatgagtgtggaaaagccttctctcggatgtcatacctcactgtacattatagaactcattcaggagagaaaccctatgagtgtactgaatgtggaaaaaaattctaccacaaatcagcattcaacagccatcagagaattcataggagaggcaatatgaatgtaatagatgtgggaaggcttctctgaagtcagacctcattttatatcagagaaccctttcagtatagtgaatcagaaactcctgcctgaagtcaaacaccttgtacatcagagagttcacacaggttagtgtggacatccccttgtgtgttggactcataatctgaagactcacagaatggaaaccatgattataacaagaccacatggtataacaatactagactatagacaagtaaaaatttataaatattaagaatgtatatacatgtcaccatggattggaactgttttgcatatcagggaaatcatagccaaggggaaatctatcagtataaggaatgtggaagacataatcctttggaaactgttaatactaaaagatatgtttctgatacaatagcaaacttgaaaaaaaaaaaagaaatagaagattcctgctgtgaataaacatacttcttgtgtaaatagaaactgtaaagtcatcaggatagctagttaagtcggtaaccttaaactcatgtaagcagttcccaaagaacataggacttatgtttggggagagggttgtttttattacagtacattacaggaattgtatgttcacttcgaatcatgtttgaaaaaacgttgtatccttattttgtaattcatatagtaagagtattctaaacagcactacattaatatcatttgataggtataaagtatactttttcttgcactcttctctaggatttaatgcattgatcattcttaatgaacaatatcagctctaaaggaccaatgcttttataatgttttcaactgtatctgagtcagccagagagataaatatccatgtataaaatagatagaaaactttgcttggtaatttaaaattaataatgccagttttccaagagtgagaaaatcattgcactctatacagttttaagatatacttaaaatattcccatttgtatctatttttttttctactgttttttatttggacacttacataacagtgcagagcacaatgctgtgtaacataggaattcactgtgttttcatttgatgtcgtactggttttaaaccttgtgctctactccttcctgttaatgaattaagaacacattctaacaagggtctgtggcagacattgccgagtgactttctaacataggaattcactgtgttttcatttgatgtcgtactggttttaaaccttgtgctctactccttcctgttaatgaattaagaacacattctaacaagggtctgtggcagacattgccgagtgactttcttagtcactcccttactctgctggcggagtttggttatccatttatcctcaaaaggaagtgagataaatcctgattagttttaaccagtgacactccccttctcgttgccagcagttgatttacagtggtcacagggcccaattctagacataaaacaaaggatatacctgacagactacttctggaaaaggttttctcaaaggcccaaggattcaagcaaagggaagtggaatcttgtggtgaacagtaccttgtctggatgtggtgcctggtaaccatctttcagcaatggattatagtttaatcatggcctgagcagaaatactgaaagaccctgagacctggatgatgtctttgagccaccaaaccaagcagccttgtagccactcctcctttggactgtttcttttgtgagagactaaacttatttttaagccagttgatttaggatgctctattactaataactgaagacattctaattggtacagactgaaacctttataggagttatgcagttcagaagtggactttaggtaagtcatttattttaagctgttgatatagagatttattttctgtaaattttgacgtaaatagtttgagcattagaaatcaacttgaaacaataaaatgtatgcttccttgaactgtcatatcgttgacctgcaaaattcacctttggaacgtgacacaatgttaggcatacctccttttttctaatacatggaatacattttgttggaggtaatttatgtgattcatataccactgctacagtgttagctgacaacatatagtatgaggtaaggatctaattctgtttcctctcacatgattacttgatagctaagcatctgattggtttactgctttaccactgagctgaaatgccgtgttttccatttattaaaatcacacatggctcctgtttttgtcactcagcactttttctccatattcttcaagacgattgtgagtatggtacgtaacaggaattacatctggtaagttgtatagttttgtgtaggaactctatattcatagcatatttgtggaaatgatacctatggaggtttctcacactggtgtgtcattatacattaattgtacaatatgcattttcagtaaaatatttgaaaactgtaaa

SEQ ID NO: 6592 - protein, 507 aa, Homo sapiens
MKADECSGCGKSLLHIKLEKTHPGDQAYEFNQNGEPYTLNEESLYQKIRILEKPFEYIECQKAFQKDTVFVNHMEEKPYKWNGSEIAFLQMSDLTVHQTSHMEMKPYECSECGKSFCKKSKFIIHQRTHTGEKPYECNECGKNFYQKLHLIQHQRTHSGEKPYECSYCGKSFCQKTHLTQHQRTHSGERPYVCHDCGKTFSQKSALNDHQKIHTGVKLYKCSECGKCFCRKSTLTTHLRTHTGEKPYECNECGKFFSRLSYLTVHYRTHSGEKPYECNECGKTFYLNSALMRHQRVHTGEKPYECNECGKLFSQLSYLTIHHRTHSGVKPYECSECGKTFYQNSALCRHRRIHKGEKPYECYICGKFFSQMSYLTIHHRIHSGEKPYECSECGKTFCQNSALNRHQRTHTGEKAYECYECGKCFSQMSYLTIHHRIHSGEKPFECNECGKAFSRMSYLTVHYRTHSGEKPYECTECGKKFYHKSAFNSHQRIHRRGNMNVIDVGRLL

SEQ ID NO: 6593 - DNA, 4535 bp, Homo sapiens
ctatttcacgtcacccaattccaatcacggtgccatttcaggggccagtgtcattcaaggacgtggctgtggacttcacccaggaggaatggcagcagctggatcctgagcagaagataacttacagggatgtgatgctggagaactacagcaatctagtttctgtggggtatcacattatcaaaccggatgttatcagcaagttggagcaaggagaagagccatggatagtagaaggagaattcctacttcagagctatccagatgaagtctggcaaactgatgacctaatagagagaatccaggaagaggaaaataaaccttcaaggcaaactgtgttcattgagaccctgattgaagagagaggtaatgttcctggtaaaacttttgatgtagaaacgaaccctgttccttcaagaaaaatagcctataaaaatagcctctgtgactcatgtgaaaagtgtttaacgtctgtttcagaatatattagtagtgatggaagctatgcaagaatgaaagctgatgaatgtagtggatgtgggaaatcactcctccatattaagcttgagaaaactcatccaggagatcaagcttatgaatttaatcaaaatggggaaccttatactctaaatgaagaaagtctttatcagaaaattcgtattttggagaaaccttttgaatatattgaatgccagaaagccttccaaaaggacactgtttttgttaatcacatggaagaaaagccctataagtggaatggatctgaaatagcctttctccagatgtcggacctcactgtacatcagacatctcatatggaaatgaagccctatgaatgcagtgaatgtgggaaatccttctgtaaaaagtcaaaatttattatacatcagaggactcacacaggagagaaaccttacgaatgtaatcagtgtgggaaatccttctgccagaagggaacccttactgtgcatcagagaacacacacaggggagaagccctatgaatgtaatgaatgtgggaagaacttttaccagaagttacacctcattcagcatcagagaactcactcaggagagaagccctatgaatgtagttattgtggaaaatccttttgccagaagacacacctcacacaacatcagagaacacattcaggagagagaccttatgtttgtcatgactgtgggaaaaccttctcgcagaagtcagcacttaatgaccatcagaaaattcacacaggtgtgaaactctacaagtgtagtgaatgtgggaaatgcttctgccgcaagtctactctcacgacccacctgaggacccacacaggagagaaaccgtatgaatgtaatgagtgtggaaaattcttctctcggttgtcatatctcactgtacattatagaactcattcaggagagaaaccctatgaatgtaatgaatgtggaaaaaccttctacctgaattcagccctcatgagacatcagagagtgcacacaggagagaaaccttacgaatgtaatgaatgtggaaagttattctcccagttgtcatacctcactatccatcatagaactcattcaggagtaaaaccctatgaatgtagtgaatgtgggaaaaccttctaccagaactcagccctttgtagacatcggagaatacacaaaggagagaagccctatgaatgctatatatgtggaaaattcttctctcagatgtcatacctcactatacatcatagaattcattcaggagagaagccctatgaatgtagtgaatgtgggaaaaccttctgccagaattcagcccttaatcgacatcagagaacacacacaggagagaaagcctacgaatgttatgaatgtgggaagtgcttctctcagatgtcctatctcactatacatcatcgaattcattcaggagagaaaccctttgaatgtaatgagtgtggaaaagccttctctcggatgtcatacctcactgtacattatagaactcattcaggagagaaaccctatgagtgtactgaatgtggaaaaaaattctaccacaaatcagcattcaacagccatcagagaattcataggagaggcaatatgaatgtaatagatgtgggaaggcttctctgaagtcagacctcattttatatcagagaaccctttcagtatagtgaatcagaaactcctgcctgaagtcaaacaccttgtacatcagagagttcacacaggttagtgtggacatccccttgtgtgttggactcataatctgaagactcacagaatggaaaccatgattataacaagaccacatggtataacaatactagactatagacaagtaaaaatttataaatattaagaatgtatatacatgtcaccatggattggaactgttttgcatatcagggaaatcatagccaaggggaaatctatcagtataaggaatgtggaagacataatcctttggaaactgttaatactaaaagatatgtttctgatacaatagcaaacttgaaaaaaaaaaaagaaatagaagattcctgctgtgaataaacatacttcttgtgtaaatagaaactgtaaagtcatcaggatagctagttaagtcggtaaccttaaactcatgtaagcagttcccaaagaacataggacttatgtttggggagagggttgtttttattacagtacattacaggaattgtatgttcacttcgaatcatgtttgaaaaaacgttgtatccttattttgtaattcatatagtaagagtattctaaacagcactacattaatatcatttgataggtataaagtatactttttcttgcactcttctctaggatttaatgcattgatcattcttaatgaacaatatcagctctaaaggaccaatgcttttataatgttttcaactgtatctgagtcagccagagagataaatatccatgtataaaatagatagaaaactttgcttggtaatttaaaattaataatgccagttttccaagagtgagaaaatcattgcactctatacagttttaagatatacttaaaatattcccatttgtatctatttttttttctactgttttttatttggacacttacataacagtgcagagcacaatgctgtgtaacataggaattcactgtgttttcatttgatgtcgtactggttttaaaccttgtgctctactccttcctgttaatgaattaagaacacattctaacaagggtctgtggcagacattgccgagtgactttctaacataggaattcactgtgttttcatttgatgtcgtactggttttaaaccttgtgctctactccttcctgttaatgaattaagaacacattctaacaagggtctgtggcagacattgccgagtgactttcttagtcactcccttactctgctggcggagtttggttatccatttatcctcaaaaggaagtgagataaatcctgattagttttaaccagtgacactccccttctcgttgccagcagttgatttacagtggtcacagggcccaattctagacataaaacaaaggatatacctgacagactacttctggaaaaggttttctcaaaggcccaaggattcaagcaaagggaagtggaatcttgtggtgaacagtaccttgtctggatgtggtgcctggtaaccatctttcagcaatggattatagtttaatcatggcctgagcagaaatactgaaagaccctgagacctggatgatgtctttgagccaccaaaccaagcagccttgtagccactcctcctttggactgtttcttttgtgagagactaaacttatttttaagccagttgatttaggatgctctattactaataactgaagacattctaattggtacagactgaaacctttataggagttatgcagttcagaagtggactttaggtaagtcatttattttaagctgttgatatagagatttattttctgtaaattttgacgtaaatagtttgagcattagaaatcaacttgaaacaataaaatgtatgcttccttgaactgtcatatcgttgacctgcaaaattcacctttggaacgtgacacaatgttaggcatacctccttttttctaatacatggaatacattttgttggaggtaatttatgtgattcatataccactgctacagtgttagctgacaacatatagtatgaggtaaggatctaattctgtttcctctcacatgattacttgatagctaagcatctgattggtttactgctttaccactgagctgaaatgccgtgttttccatttattaaaatcacacatggctcctgtttttgtcactcagcactttttctccatattcttcaagacgattgtgagtatggtacgtaacaggaattacatctggtaagttgtatagttttgtgtaggaactctatattcatagcatatttgtggaaatgatacctatggaggtttctcacactggtgtgtcattatacattaattgtacaatatgcattttcagtaaaatatttgaaaactgtaaa

SEQ ID NO: 6594 - protein, 661 aa, Homo sapiens
MLENYSNLVSVGYHIIKPDVISKLEQGEEPWIVEGEFLLQSYPDEVWQTDDLIERIQEEENKPSRQTVFIETLIEERGNVPGKTFDVETNPVPSRKIAYKNSLCDSCEKCLTSVSEYISSDGSYARMKADECSGCGKSLLHIKLEKTHPGDQAYEFNQNGEPYTLNEESLYQKIRILEKPFEYIECQKAFQKDTVFVNHMEEKPYKWNGSEIAFLQMSDLTVHQTSHMEMKPYECSECGKSFCKKSKFIIHQRTHTGEKPYECNQCGKSFCQKGTLTVHQRTHTGEKPYECNECGKNFYQKLHLIQHQRTHSGEKPYECSYCGKSFCQKTHLTQHQRTHSGERPYVCHDCGKTFSQKSALNDHQKIHTGVKLYKCSECGKCFCRKSTLTTHLRTHTGEKPYECNECGKFFSRLSYLTVHYRTHSGEKPYECNECGKTFYLNSALMRHQRVHTGEKPYECNECGKLFSQLSYLTIHHRTHSGVKPYECSECGKTFYQNSALCRHRRIHKGEKPYECYICGKFFSQMSYLTIHHRIHSGEKPYECSECGKTFCQNSALNRHQRTHTGEKAYECYECGKCFSQMSYLTIHHRIHSGEKPFECNECGKAFSRMSYLTVHYRTHSGEKPYECTECGKKFYHKSAFNSHQRIHRRGNMNVIDVGRLL

SEQ ID NO: 6595 - DNA, 4474 bp, Homo sapiens
ggaagggaaaggtggcatttgccagccctggaataattcgggttagtggcagaggcttgtaaaggcactcaggagaccagcattaggggcctgagggccagtgtcattcaaggacgtggctgtggacttcacccaggaggaatggcagcagctggatcctgagcagaagataacttacagggatgtgatgctggagaactacagcaatctagtttctgtggggtatcacattatcaaaccggatgttatcagcaagttggagcaaggagaagagccatggatagtagaaggagaattcctacttcagagctatccagatgaagtctggcaaactgatgacctaatagagagaatccaggaagaggaaaataaaccttcaaggcaaactgtgttcattgagaccctgattgaagagagagaatatattagtagtgatggaagctatgcaagaatgaaagctgatgaatgtagtggatgtgggaaatcactcctccatattaagcttgagaaaactcatccaggagatcaagcttatgaatttaatcaaaatggggaaccttatactctaaatgaagaaagtctttatcagaaaattcgtattttggagaaaccttttgaatatattgaatgccagaaagccttccaaaaggacactgtttttgttaatcacatggaagaaaagccctataagtggaatggatctgaaatagcctttctccagatgtcggacctcactgtacatcagacatctcatatggaaatgaagccctatgaatgcagtgaatgtgggaaatccttctgtaaaaagtcaaaatttattatacatcagaggactcacacaggagagaaaccttacgaatgtaatcagtgtgggaaatccttctgccagaagggaacccttactgtgcatcagagaacacacacaggggagaagccctatgaatgtaatgaatgtgggaagaacttttaccagaagttacacctcattcagcatcagagaactcactcaggagagaagccctatgaatgtagttattgtggaaaatccttttgccagaagacacacctcacacaacatcagagaacacattcaggagagagaccttatgtttgtcatgactgtgggaaaaccttctcgcagaagtcagcacttaatgaccatcagaaaattcacacaggtgtgaaactctacaagtgtagtgaatgtgggaaatgcttctgccgcaagtctactctcacgacccacctgaggacccacacaggagagaaaccgtatgaatgtaatgagtgtggaaaattcttctctcggttgtcatatctcactgtacattatagaactcattcaggagagaaaccctatgaatgtaatgaatgtggaaaaaccttctacctgaattcagccctcatgagacatcagagagtgcacacaggagagaaaccttacgaatgtaatgaatgtggaaagttattctcccagttgtcatacctcactatccatcatagaactcattcaggagtaaaaccctatgaatgtagtgaatgtgggaaaaccttctaccagaactcagccctttgtagacatcggagaatacacaaaggagagaagccctatgaatgctatatatgtggaaaattcttctctcagatgtcatacctcactatacatcatagaattcattcaggagagaagccctatgaatgtagtgaatgtgggaaaaccttctgccagaattcagcccttaatcgacatcagagaacacacacaggagagaaagcctacgaatgttatgaatgtgggaagtgcttctctcagatgtcctatctcactatacatcatcgaattcattcaggagagaaaccctttgaatgtaatgagtgtggaaaagccttctctcggatgtcatacctcactgtacattatagaactcattcaggagagaaaccctatgagtgtactgaatgtggaaaaaaattctaccacaaatcagcattcaacagccatcagagaattcataggagaggcaatatgaatgtaatagatgtgggaaggcttctctgaagtcagacctcattttatatcagagaaccctttcagtatagtgaatcagaaactcctgcctgaagtcaaacaccttgtacatcagagagttcacacaggttagtgtggacatccccttgtgtgttggactcataatctgaagactcacagaatggaaaccatgattataacaagaccacatggtataacaatactagactatagacaagtaaaaatttataaatattaagaatgtatatacatgtcaccatggattggaactgttttgcatatcagggaaatcatagccaaggggaaatctatcagtataaggaatgtggaagacataatcctttggaaactgttaatactaaaagatatgtttctgatacaatagcaaacttgaaaaaaaaaaaagaaatagaagattcctgctgtgaataaacatacttcttgtgtaaatagaaactgtaaagtcatcaggatagctagttaagtcggtaaccttaaactcatgtaagcagttcccaaagaacataggacttatgtttggggagagggttgtttttattacagtacattacaggaattgtatgttcacttcgaatcatgtttgaaaaaacgttgtatccttattttgtaattcatatagtaagagtattctaaacagcactacattaatatcatttgataggtataaagtatactttttcttgcactcttctctaggatttaatgcattgatcattcttaatgaacaatatcagctctaaaggaccaatgcttttataatgttttcaactgtatctgagtcagccagagagataaatatccatgtataaaatagatagaaaactttgcttggtaatttaaaattaataatgccagttttccaagagtgagaaaatcattgcactctatacagttttaagatatacttaaaatattcccatttgtatctatttttttttctactgttttttatttggacacttacataacagtgcagagcacaatgctgtgtaacataggaattcactgtgttttcatttgatgtcgtactggttttaaaccttgtgctctactccttcctgttaatgaattaagaacacattctaacaagggtctgtggcagacattgccgagtgactttctaacataggaattcactgtgttttcatttgatgtcgtactggttttaaaccttgtgctctactccttcctgttaatgaattaagaacacattctaacaagggtctgtggcagacattgccgagtgactttcttagtcactcccttactctgctggcggagtttggttatccatttatcctcaaaaggaagtgagataaatcctgattagttttaaccagtgacactccccttctcgttgccagcagttgatttacagtggtcacagggcccaattctagacataaaacaaaggatatacctgacagactacttctggaaaaggttttctcaaaggcccaaggattcaagcaaagggaagtggaatcttgtggtgaacagtaccttgtctggatgtggtgcctggtaaccatctttcagcaatggattatagtttaatcatggcctgagcagaaatactgaaagaccctgagacctggatgatgtctttgagccaccaaaccaagcagccttgtagccactcctcctttggactgtttcttttgtgagagactaaacttatttttaagccagttgatttaggatgctctattactaataactgaagacattctaattggtacagactgaaacctttataggagttatgcagttcagaagtggactttaggtaagtcatttattttaagctgttgatatagagatttattttctgtaaattttgacgtaaatagtttgagcattagaaatcaacttgaaacaataaaatgtatgcttccttgaactgtcatatcgttgacctgcaaaattcacctttggaacgtgacacaatgttaggcatacctccttttttctaatacatggaatacattttgttggaggtaatttatgtgattcatataccactgctacagtgttagctgacaacatatagtatgaggtaaggatctaattctgtttcctctcacatgattacttgatagctaagcatctgattggtttactgctttaccactgagctgaaatgccgtgttttccatttattaaaatcacacatggctcctgtttttgtcactcagcactttttctccatattcttcaagacgattgtgagtatggtacgtaacaggaattacatctggtaagttgtatagttttgtgtaggaactctatattcatagcatatttgtggaaatgatacctatggaggtttctcacactggtgtgtcattatacattaattgtacaatatgcattttcagtaaaatatttgaaaactgtaaa

SEQ ID NO: 6596 - protein, 623 aa, Homo sapiens
MLENYSNLVSVGYHIIKPDVISKLEQGEEPWIVEGEFLLQSYPDEVWQTDDLIERIQEEENKPSRQTVFIETLIEEREYISSDGSYARMKADECSGCGKSLLHIKLEKTHPGDQAYEFNQNGEPYTLNEESLYQKIRILEKPFEYIECQKAFQKDTVFVNHMEEKPYKWNGSEIAFLQMSDLTVHQTSHMEMKPYECSECGKSFCKKSKFIIHQRTHTGEKPYECNQCGKSFCQKGTLTVHQRTHTGEKPYECNECGKNFYQKLHLIQHQRTHSGEKPYECSYCGKSFCQKTHLTQHQRTHSGERPYVCHDCGKTFSQKSALNDHQKIHTGVKLYKCSECGKCFCRKSTLTTHLRTHTGEKPYECNECGKFFSRLSYLTVHYRTHSGEKPYECNECGKTFYLNSALMRHQRVHTGEKPYECNECGKLFSQLSYLTIHHRTHSGVKPYECSECGKTFYQNSALCRHRRIHKGEKPYECYICGKFFSQMSYLTIHHRIHSGEKPYECSECGKTFCQNSALNRHQRTHTGEKAYECYECGKCFSQMSYLTIHHRIHSGEKPFECNECGKAFSRMSYLTVHYRTHSGEKPYECTECGKKFYHKSAFNSHQRIHRRGNMNVIDVGRLL

SEQ ID NO: 6597 - DNA, 4514 bp, Homo sapiens
gtgttcgcgcatgcgcgccgcggccgcagtgccctcgcttcctgtgcgtccccaggtcaccgctcgccctagttcccaggctttggcctccggtgggcgagaatcgcggagcctgcggggctgggcgccgaagagccgggccggcacccaagcgggcgcggggctgtgcgggccaggcggaggctcaagcggggatccccgagcacgacccccggagccgacggcgctggggcccaaggggccggccgggcggtgacgacggcggaggcgaaggggcggcgggacccgggcccggcccgtgtgcgtcctcgacggcccggccccggctccgcaggacggtgagccccagggagacggatctgggctccgggagggacgccccgcctggatttgtcccgtaggcccggcccgggcccctctggagcagaacggccttggtgaggtggacaggaagggacctcgcgagcagacgcgcgcccgcgacagcaatcccgccccggcctgtcgggagcggtggggcagaggctgcggagccccaggaggatctgcctccgctttcacagtcctccagatttttccaagagcagcagaaaatgaataaatccctggggccagtgtcattcaaggacgtggctgtggacttcacccaggaggaatggcagcagctggatcctgagcagaagataacttacagggatgtgatgctggagaactacagcaatctagtttctgtggggtatcacattatcaaaccggatgttatcagcaagttggagcaaggagaagagccatggatagtagaaggagaattcctacttcagagctatccagatgaagtctggcaaactgatgacctaatagagagaatccaggaagaggaaaataaaccttcaaggcaaactgtgttcattgagaccctgattgaagagagaggtaatgttcctggtaaaacttttgatgtagaaacgaaccctgttccttcaagaaaaatagcctataaaaatagcctctgtgactcatgtgaaaagtgtttaacgtctgtttcagaatatattagtagtgatggaagctatgcaagaatgaaagctgatgaatgtagtggatgtgggaaatcactcctccatattaagcttgagaaaactcatccaggagatcaagcttatgaatttaatcaaaatggggaaccttatactctaaatgaagaaagtctttatcagaaaattcgtattttggagaaaccttttgaatatattgaatgccagaaagccttccaaaaggacactgtttttgttaatcacatggaagaaaagccctataagtggaatggatctgaaatagcctttctccagatgtcggacctcactgtacatcagacatctcatatggaaatgaagccctatgaatgcagtgaatgtgggaaatccttctgtaaaaagtcaaaatttattatacatcagaggactcacacaggagagaaaccttacgaatgtaatcagtgtgggaaatccttctgccagaagggaacccttactgtgcatcagagaacacacacaggggagaagccctatgaatgtaatgaatgtgggaagaacttttaccagaagttacacctcattcagcatcagagaactcactcaggagagaagccctatgaatgtagttattgtggaaaatccttttgccagaagacacacctcacacaacatcagagaacacattcaggagagagaccttatgtttgtcatgactgtgggaaaaccttctcgcagaagtcagcacttaatgaccatcagaaaattcacacaggtgtgaaactctacaagtgtagtgaatgtgggaaatgcttctgccgcaagtctactctcacgacccacctgaggacccacacaggagagaaaccgtatgaatgtaatgagtgtggaaaattcttctctcggttgtcatatctcactgtacattatagaactcattcaggagagaaaccctatgaatgtaatgaatgtggaaaaaaattctaccacaaatcagcattcaacagccatcagagaattcataggagaggcaatatgaatgtaatagatgtgggaaggcttctctgaagtcagacctcattttatatcagagaaccctttcagtatagtgaatcagaaactcctgcctgaagtcaaacaccttgtacatcagagagttcacacaggttagtgtggacatccccttgtgtgttggactcataatctgaagactcacagaatggaaaccatgattataacaagaccacatggtataacaatactagactatagacaagtaaaaatttataaatattaagaatgtatatacatgtcaccatggattggaactgttttgcatatcagggaaatcatagccaaggggaaatctatcagtataaggaatgtggaagacataatcctttggaaactgttaatactaaaagatatgtttctgatacaatagcaaacttgaaaaaaaaaaaagaaatagaagattcctgctgtgaataaacatacttcttgtgtaaatagaaactgtaaagtcatcaggatagctagttaagtcggtaaccttaaactcatgtaagcagttcccaaagaacataggacttatgtttggggagagggttgtttttattacagtacattacaggaattgtatgttcacttcgaatcatgtttgaaaaaacgttgtatccttattttgtaattcatatagtaagagtattctaaacagcactacattaatatcatttgataggtataaagtatactttttcttgcactcttctctaggatttaatgcattgatcattcttaatgaacaatatcagctctaaaggaccaatgcttttataatgttttcaactgtatctgagtcagccagagagataaatatccatgtataaaatagatagaaaactttgcttggtaatttaaaattaataatgccagttttccaagagtgagaaaatcattgcactctatacagttttaagatatacttaaaatattcccatttgtatctatttttttttctactgttttttatttggacacttacataacagtgcagagcacaatgctgtgtaacataggaattcactgtgttttcatttgatgtcgtactggttttaaaccttgtgctctactccttcctgttaatgaattaagaacacattctaacaagggtctgtggcagacattgccgagtgactttctaacataggaattcactgtgttttcatttgatgtcgtactggttttaaaccttgtgctctactccttcctgttaatgaattaagaacacattctaacaagggtctgtggcagacattgccgagtgactttcttagtcactcccttactctgctggcggagtttggttatccatttatcctcaaaaggaagtgagataaatcctgattagttttaaccagtgacactccccttctcgttgccagcagttgatttacagtggtcacagggcccaattctagacataaaacaaaggatatacctgacagactacttctggaaaaggttttctcaaaggcccaaggattcaagcaaagggaagtggaatcttgtggtgaacagtaccttgtctggatgtggtgcctggtaaccatctttcagcaatggattatagtttaatcatggcctgagcagaaatactgaaagaccctgagacctggatgatgtctttgagccaccaaaccaagcagccttgtagccactcctcctttggactgtttcttttgtgagagactaaacttatttttaagccagttgatttaggatgctctattactaataactgaagacattctaattggtacagactgaaacctttataggagttatgcagttcagaagtggactttaggtaagtcatttattttaagctgttgatatagagatttattttctgtaaattttgacgtaaatagtttgagcattagaaatcaacttgaaacaataaaatgtatgcttccttgaactgtcatatcgttgacctgcaaaattcacctttggaacgtgacacaatgttaggcatacctccttttttctaatacatggaatacattttgttggaggtaatttatgtgattcatataccactgctacagtgttagctgacaacatatagtatgaggtaaggatctaattctgtttcctctcacatgattacttgatagctaagcatctgattggtttactgctttaccactgagctgaaatgccgtgttttccatttattaaaatcacacatggctcctgtttttgtcactcagcactttttctccatattcttcaagacgattgtgagtatggtacgtaacaggaattacatctggtaagttgtatagttttgtgtaggaactctatattcatagcatatttgtggaaatgatacctatggaggtttctcacactggtgtgtcattatacattaattgtacaatatgcattttcagtaaaatatttgaaaactgtaaa

SEQ ID NO: 6598 - protein, 501 aa, Homo sapiens [sequence omitted]

SEQ ID NO: 6599 - DNA, 5102 bp, Homo sapiens
gtgttcgcgcatgcgcgccgcggccgcagtgccctcgcttcctgtgcgtccccaggtcaccgctcgccctagttcccaggctttggcctccggtgggcgagaatcgcggagcctgcggggctgggcgccgaagagccgggccggcacccaagcgggcgcggggctgtgcgggccaggcggaggctcaagcggggatccccgagcacgacccccggagccgacggcgctggggcccaaggggccggccgggcggtgacgacggcggaggcgaaggggcggcgggacccgggcccggcccgtgtgcgtcctcgacggcccggccccggctccgcaggacggtgagccccagggagacggatctgggctccgggagggacgccccgcctggatttgtcccgtaggcccggcccgggcccctctggagcagaacggccttggtgaggtggacaggaagggacctcgcgagcagacgcgcgcccgcgacagcaatcccgccccggcctgtcgggagcggtggggcagaggctgcggagccccaggaggatctgcctccgctttcacagtcctccagatttttccaagagcagcagaaaatgaataaatccctggggccagtgtcattcaaggacgtggctgtggacttcacccaggaggaatggcagcagctggatcctgagcagaagataacttacagggatgtgatgctggagaactacagcaatctagtttctgtggggtatcacattatcaaaccggatgttatcagcaagttggagcaaggagaagagccatggatagtagaaggagaattcctacttcagagctatccagatgaagtctggcaaactgatgacctaatagagagaatccaggaagaggaaaataaaccttcaaggcaaactgtgttcattgagaccctgattgaagagagaggtaatgttcctggtaaaacttttgatgtagaaacgaaccctgttccttcaagaaaaatagcctataaaaatagcctctgtgactcatgtgaaaagtgtttaacgtctgtttcagaatatattagtagtgatggaagctatgcaagaatgaaagctgatgaatgtagtggatgtgggaaatcactcctccatattaagcttgagaaaactcatccaggagatcaagcttatgaatttaatcaaaatggggaaccttatactctaaatgaagaaagtctttatcagaaaattcgtattttggagaaaccttttgaatatattgaatgccagaaagccttccaaaaggacactgtttttgttaatcacatggaagaaaagccctataagtggaatggatctgaaatagcctttctccagatgtcggacctcactgtacatcagacatctcatatggaaatgaagccctatgaatgcagtgaatgtgggaaatccttctgtaaaaagtcaaaatttattatacatcagaggactcacacaggagagaaaccttacgaatgtaatcagtgtgggaaatccttctgccagaagggaacccttactgtgcatcagagaacacacacaggggagaagccctatgaatgtaatgaatgtgggaagaacttttaccagaagttacacctcattcagcatcagagaactcactcaggagagaagccctatgaatgtagttattgtggaaaatccttttgccagaagacacacctcacacaacatcagagaacacattcaggagagagaccttatgtttgtcatgactgtgggaaaaccttctcgcagaagtcagcacttaatgaccatcagaaaattcacacaggtgtgaaactctacaagtgtagtgaatgtgggaaatgcttctgccgcaagtctactctcacgacccacctgaggacccacacaggagagaaaccgtatgaatgtaatgagtgtggaaaattcttctctcggttgtcatatctcactgtacattatagaactcattcaggagagaaaccctatgaatgtaatgaatgtggaaaaaccttctacctgaattcagccctcatgagacatcagagagtgcacacaggagagaaaccttacgaatgtaatgaatgtggaaagttattctcccagttgtcatacctcactatccatcatagaactcattcaggagtaaaaccctatgaatgtagtgaatgtgggaaaaccttctaccagaactcagccctttgtagacatcggagaatacacaaaggagagaagccctatgaatgctatatatgtggaaaattcttctctcagatgtcatacctcactatacatcatagaattcattcaggagagaagccctatgaatgtagtgaatgtgggaaaaccttctgccagaattcagcccttaatcgacatcagagaacacacacaggagagaaagcctacgaatgttatgaatgtgggaagtgcttctctcagatgtcctatctcactatacatcatcgaattcattcaggagagaaaccctttgaatgtaatgagtgtggaaaagccttctctcggatgtcatacctcactgtacattatagaactcattcaggagagaaaccctatgagtgtactgaatgtggaaaaaaattctaccacaaatcagcattcaacagccatcagagaattcataggagaggcaatatgaatgtaatagatgtgggaaggcttctctgaagtcagacctcattttatatcagagaaccctttcagtatagtgaatcagaaactcctgcctgaagtcaaacaccttgtacatcagagagttcacacaggttagtgtggacatccccttgtgtgttggactcataatctgaagactcacagaatggaaaccatgattataacaagaccacatggtataacaatactagactatagacaagtaaaaatttataaatattaagaatgtatatacatgtcaccatggattggaactgttttgcatatcagggaaatcatagccaaggggaaatctatcagtataaggaatgtggaagacataatcctttggaaactgttaatactaaaagatatgtttctgatacaatagcaaacttgaaaaaaaaaaaagaaatagaagattcctgctgtgaataaacatacttcttgtgtaaatagaaactgtaaagtcatcaggatagctagttaagtcggtaaccttaaactcatgtaagcagttcccaaagaacataggacttatgtttggggagagggttgtttttattacagtacattacaggaattgtatgttcacttcgaatcatgtttgaaaaaacgttgtatccttattttgtaattcatatagtaagagtattctaaacagcactacattaatatcatttgataggtataaagtatactttttcttgcactcttctctaggatttaatgcattgatcattcttaatgaacaatatcagctctaaaggaccaatgcttttataatgttttcaactgtatctgagtcagccagagagataaatatccatgtataaaatagatagaaaactttgcttggtaatttaaaattaataatgccagttttccaagagtgagaaaatcattgcactctatacagttttaagatatacttaaaatattcccatttgtatctatttttttttctactgttttttatttggacacttacataacagtgcagagcacaatgctgtgtaacataggaattcactgtgttttcatttgatgtcgtactggttttaaaccttgtgctctactccttcctgttaatgaattaagaacacattctaacaagggtctgtggcagacattgccgagtgactttctaacataggaattcactgtgttttcatttgatgtcgtactggttttaaaccttgtgctctactccttcctgttaatgaattaagaacacattctaacaagggtctgtggcagacattgccgagtgactttcttagtcactcccttactctgctggcggagtttggttatccatttatcctcaaaaggaagtgagataaatcctgattagttttaaccagtgacactccccttctcgttgccagcagttgatttacagtggtcacagggcccaattctagacataaaacaaaggatatacctgacagactacttctggaaaaggttttctcaaaggcccaaggattcaagcaaagggaagtggaatcttgtggtgaacagtaccttgtctggatgtggtgcctggtaaccatctttcagcaatggattatagtttaatcatggcctgagcagaaatactgaaagaccctgagacctggatgatgtctttgagccaccaaaccaagcagccttgtagccactcctcctttggactgtttcttttgtgagagactaaacttatttttaagccagttgatttaggatgctctattactaataactgaagacattctaattggtacagactgaaacctttataggagttatgcagttcagaagtggactttaggtaagtcatttattttaagctgttgatatagagatttattttctgtaaattttgacgtaaatagtttgagcattagaaatcaacttgaaacaataaaatgtatgcttccttgaactgtcatatcgttgacctgcaaaattcacctttggaacgtgacacaatgttaggcatacctccttttttctaatacatggaatacattttgttggaggtaatttatgtgattcatataccactgctacagtgttagctgacaacatatagtatgaggtaaggatctaattctgtttcctctcacatgattacttgatagctaagcatctgattggtttactgctttaccactgagctgaaatgccgtgttttccatttattaaaatcacacatggctcctgtttttgtcactcagcactttttctccatattcttcaagacgattgtgagtatggtacgtaacaggaattacatctggtaagttgtatagttttgtgtaggaactctatattcatagcatatttgtggaaatgatacctatggaggtttctcacactggtgtgtcattatacattaattgtacaatatgcattttcagtaaaatatttgaaaactgtaaa

SEQ ID NO: 6600 - protein, 697 aa, Homo sapiens; identical to SEQ ID NO: 833

SEQ ID NO: 6601 - DNA, 4988 bp, Homo sapiens
gtgttcgcgcatgcgcgccgcggccgcagtgccctcgcttcctgtgcgtccccaggtcaccgctcgccctagttcccaggctttggcctccggtgggcgagaatcgcggagcctgcggggctgggcgccgaagagccgggccggcacccaagcgggcgcggggctgtgcgggccaggcggaggctcaagcggggatccccgagcacgacccccggagccgacggcgctggggcccaaggggccggccgggcggtgacgacggcggaggcgaaggggcggcgggacccgggcccggcccgtgtgcgtcctcgacggcccggccccggctccgcaggacggtgagccccagggagacggatctgggctccgggagggacgccccgcctggatttgtcccgtaggcccggcccgggcccctctggagcagaacggccttggtgaggtggacaggaagggacctcgcgagcagacgcgcgcccgcgacagcaatcccgccccggcctgtcgggagcggtggggcagaggctgcggagccccaggaggatctgcctccgctttcacagtcctccagatttttccaagagcagcagaaaatgaataaatccctggggccagtgtcattcaaggacgtggctgtggacttcacccaggaggaatggcagcagctggatcctgagcagaagataacttacagggatgtgatgctggagaactacagcaatctagtttctgtggggtatcacattatcaaaccggatgttatcagcaagttggagcaaggagaagagccatggatagtagaaggagaattcctacttcagagctatccagatgaagtctggcaaactgatgacctaatagagagaatccaggaagaggaaaataaaccttcaaggcaaactgtgttcattgagaccctgattgaagagagagaatatattagtagtgatggaagctatgcaagaatgaaagctgatgaatgtagtggatgtgggaaatcactcctccatattaagcttgagaaaactcatccaggagatcaagcttatgaatttaatcaaaatggggaaccttatactctaaatgaagaaagtctttatcagaaaattcgtattttggagaaaccttttgaatatattgaatgccagaaagccttccaaaaggacactgtttttgttaatcacatggaagaaaagccctataagtggaatggatctgaaatagcctttctccagatgtcggacctcactgtacatcagacatctcatatggaaatgaagccctatgaatgcagtgaatgtgggaaatccttctgtaaaaagtcaaaatttattatacatcagaggactcacacaggagagaaaccttacgaatgtaatcagtgtgggaaatccttctgccagaagggaacccttactgtgcatcagagaacacacacaggggagaagccctatgaatgtaatgaatgtgggaagaacttttaccagaagttacacctcattcagcatcagagaactcactcaggagagaagccctatgaatgtagttattgtggaaaatccttttgccagaagacacacctcacacaacatcagagaacacattcaggagagagaccttatgtttgtcatgactgtgggaaaaccttctcgcagaagtcagcacttaatgaccatcagaaaattcacacaggtgtgaaactctacaagtgtagtgaatgtgggaaatgcttctgccgcaagtctactctcacgacccacctgaggacccacacaggagagaaaccgtatgaatgtaatgagtgtggaaaattcttctctcggttgtcatatctcactgtacattatagaactcattcaggagagaaaccctatgaatgtaatgaatgtggaaaaaccttctacctgaattcagccctcatgagacatcagagagtgcacacaggagagaaaccttacgaatgtaatgaatgtggaaagttattctcccagttgtcatacctcactatccatcatagaactcattcaggagtaaaaccctatgaatgtagtgaatgtgggaaaaccttctaccagaactcagccctttgtagacatcggagaatacacaaaggagagaagccctatgaatgctatatatgtggaaaattcttctctcagatgtcatacctcactatacatcatagaattcattcaggagagaagccctatgaatgtagtgaatgtgggaaaaccttctgccagaattcagcccttaatcgacatcagagaacacacacaggagagaaagcctacgaatgttatgaatgtgggaagtgcttctctcagatgtcctatctcactatacatcatcgaattcattcaggagagaaaccctttgaatgtaatgagtgtggaaaagccttctctcggatgtcatacctcactgtacattatagaactcattcaggagagaaaccctatgagtgtactgaatgtggaaaaaaattctaccacaaatcagcattcaacagccatcagagaattcataggagaggcaatatgaatgtaatagatgtgggaaggcttctctgaagtcagacctcattttatatcagagaaccctttcagtatagtgaatcagaaactcctgcctgaagtcaaacaccttgtacatcagagagttcacacaggttagtgtggacatccccttgtgtgttggactcataatctgaagactcacagaatggaaaccatgattataacaagaccacatggtataacaatactagactatagacaagtaaaaatttataaatattaagaatgtatatacatgtcaccatggattggaactgttttgcatatcagggaaatcatagccaaggggaaatctatcagtataaggaatgtggaagacataatcctttggaaactgttaatactaaaagatatgtttctgatacaatagcaaacttgaaaaaaaaaaaagaaatagaagattcctgctgtgaataaacatacttcttgtgtaaatagaaactgtaaagtcatcaggatagctagttaagtcggtaaccttaaactcatgtaagcagttcccaaagaacataggacttatgtttggggagagggttgtttttattacagtacattacaggaattgtatgttcacttcgaatcatgtttgaaaaaacgttgtatccttattttgtaattcatatagtaagagtattctaaacagcactacattaatatcatttgataggtataaagtatactttttcttgcactcttctctaggatttaatgcattgatcattcttaatgaacaatatcagctctaaaggaccaatgcttttataatgttttcaactgtatctgagtcagccagagagataaatatccatgtataaaatagatagaaaactttgcttggtaatttaaaattaataatgccagttttccaagagtgagaaaatcattgcactctatacagttttaagatatacttaaaatattcccatttgtatctatttttttttctactgttttttatttggacacttacataacagtgcagagcacaatgctgtgtaacataggaattcactgtgttttcatttgatgtcgtactggttttaaaccttgtgctctactccttcctgttaatgaattaagaacacattctaacaagggtctgtggcagacattgccgagtgactttctaacataggaattcactgtgttttcatttgatgtcgtactggttttaaaccttgtgctctactccttcctgttaatgaattaagaacacattctaacaagggtctgtggcagacattgccgagtgactttcttagtcactcccttactctgctggcggagtttggttatccatttatcctcaaaaggaagtgagataaatcctgattagttttaaccagtgacactccccttctcgttgccagcagttgatttacagtggtcacagggcccaattctagacataaaacaaaggatatacctgacagactacttctggaaaaggttttctcaaaggcccaaggattcaagcaaagggaagtggaatcttgtggtgaacagtaccttgtctggatgtggtgcctggtaaccatctttcagcaatggattatagtttaatcatggcctgagcagaaatactgaaagaccctgagacctggatgatgtctttgagccaccaaaccaagcagccttgtagccactcctcctttggactgtttcttttgtgagagactaaacttatttttaagccagttgatttaggatgctctattactaataactgaagacattctaattggtacagactgaaacctttataggagttatgcagttcagaagtggactttaggtaagtcatttattttaagctgttgatatagagatttattttctgtaaattttgacgtaaatagtttgagcattagaaatcaacttgaaacaataaaatgtatgcttccttgaactgtcatatcgttgacctgcaaaattcacctttggaacgtgacacaatgttaggcatacctccttttttctaatacatggaatacattttgttggaggtaatttatgtgattcatataccactgctacagtgttagctgacaacatatagtatgaggtaaggatctaattctgtttcctctcacatgattacttgatagctaagcatctgattggtttactgctttaccactgagctgaaatgccgtgttttccatttattaaaatcacacatggctcctgtttttgtcactcagcactttttctccatattcttcaagacgattgtgagtatggtacgtaacaggaattacatctggtaagttgtatagttttgtgtaggaactctatattcatagcatatttgtggaaatgatacctatggaggtttctcacactggtgtgtcattatacattaattgtacaatatgcattttcagtaaaatatttgaaaactgtaaa

SEQ ID NO: 6602 - protein, 659 aa, Homo sapiens
MNKSLGPVSFKDVAVDFTQEEWQQLDPEQKITYRDVMLENYSNLVSVGYHIIKPDVISKLEQGEEPWIVEGEFLLQSYPDEVWQTDDLIERIQEEENKPSRQTVFIETLIEEREYISSDGSYARMKADECSGCGKSLLHIKLEKTHPGDQAYEFNQNGEPYTLNEESLYQKIRILEKPFEYIECQKAFQKDTVFVNHMEEKPYKWNGSEIAFLQMSDLTVHQTSHMEMKPYECSECGKSFCKKSKFIIHQRTHTGEKPYECNQCGKSFCQKGTLTVHQRTHTGEKPYECNECGKNFYQKLHLIQHQRTHSGEKPYECSYCGKSFCQKTHLTQHQRTHSGERPYVCHDCGKTFSQKSALNDHQKIHTGVKLYKCSECGKCFCRKSTLTTHLRTHTGEKPYECNECGKFFSRLSYLTVHYRTHSGEKPYECNECGKTFYLNSALMRHQRVHTGEKPYECNECGKLFSQLSYLTIHHRTHSGVKPYECSECGKTFYQNSALCRHRRIHKGEKPYECYICGKFFSQMSYLTIHHRIHSGEKPYECSECGKTFCQNSALNRHQRTHTGEKAYECYECGKCFSQMSYLTIHHRIHSGEKPFECNECGKAFSRMSYLTVHYRTHSGEKPYECTECGKKFYHKSAFNSHQRIHRRGNMNVIDVGRLL

SEQ ID NO: 6603 - DNA, 2091 bp, Homo sapiens
atgagcctacgcgctccccaaatttaggagccatttgaaatgtctctatctggtctagcggttaagaggctctatgctaagagaattggcaacgccgaaccccagactcaaatttctccttagtttaagggaacgtcttcatggggatgtcttgactatctttaagggaacgtctagaaagtctctgcttcctgtagcatctcgtagaccatgcctgggccagtcctgccttaccggagagctcaaggcttaaaatcaatgtccatgtgcaaccgtgacaaatggaacaagagggtgcatcatgctagcttatgatcacaatgacacatttaacgaaaacttcagtaaatagagcccatggatgaaataatagaggattagcctgggacaggataccatcctcgccccaacaaggagaaaaagaattccagcttttccaaatcactttgaattagtgatagctagaaaactcagagaatatgtacagaattgaaagaagaaaaaaattagccagaactctacttcctgaagaggatgaggcaagcagaagaagaaatttgcgtcttaatggaaaacgaagcacatttagaaagccatgttacttgattccaaccctgttccttatctttgaggtattttacacctctttgaaaactgtaggtaatcgatgcaagttatgttctgtctggtggaagttggttgacttcccacaatccccactagagaaaatgcagttttgactgcatttctccatttacataatcatttcaatattcctgatctgaaaatatgtctgtttctcagattctctctctctctctctttttttttttaattttgagacagggtctcactctgctgtgcatgctggagttcagtggcgagatcttggctcactggttcaaggaattctcctgcctcagcctcccaagtaactgggattacaggtgcacaccaccaagcccgactaatttttgaatttttagtagagatgggggtttcaccatgttggccaggctggtcttaaactcctgacctcaagtgatccacccgcctcagcctcccaaagtgctgggattacaggcatgagccaccatgtccagccctcagattctcttttgaaccagttataatatctgcctgtttcctcttgaattaaataaaatctttagcatgtgctcatttttatatctgtatcagagtcatgattttacttttatgttttaaggttttccaggtctttgcagaagtccctgatggaatcacatgactgagccaggaaaacctcaggactggagtgcctcatgaactgttgaagcccaggtgaatcttttcttggctcccaggaatgagtccaaagtgccagtagaaatttgctggcttctcatttttcagtaatttccccatttaccaatcctgtgttttactttggtttgcatttgtttacattgctagcatcactgattgggactttgtttgtttttgttgtttcaaggcaaagtctcactctgccgcccaggctggagtgcaggggtacgatctcggctcactgcaacttctgcctcccaagttcaagtgattctcctgcctcaacctcctgagtagctgggactataggtgcatgccaccatgcccgactaatttttgtatttttagtagagacggggtttttccatgttggccagactggtctcgaactcctgacctcaggtggtagactcgcctcagcttcccaaagtggtgggattacaggcgtgaagcaccgcgctgggctaggaatttggttttatggtctgatcacatggtgatctctgtaatgagattaatgtttgcaaagacctaatctctgttgggtgagagacatcagagtctgatttgttattctatttctctgtctattttgagctgaaatcaattaagaatttcatgcccactgggaggagaagagctctttcatatctggaaggccagacgtgcctgcttccacttcgccttctgccatgactgtccgtttcctgaggcctccccagccatgcttcctgtacggcctgcagaactgtgagtcaattaaacctcttttcttcataaatt

SEQ ID NO: 6604 - protein, 86 aa, Homo sapiens
MYRIERRKKLARTLLPEEDEASRRRNLRLNGKRSTFRKPCYLIPTLFLIFEVFYTSLKTVGNRCKLCSVWWKLVDFPQSPLEKMQF

SEQ ID NO: 6605 - DNA, 1000 bp, Homo sapiens
agctccagtcactgaaagggctaaactgatttccttgccaactagtaaaagctggaccttcggaccccaggacgtcgatgaactgatcttcatgctgagcgacagccctggggtcatgtgccggccttcccgagtcaagcagatgtttgcctcccaaagtgctgggattacaggtgtgagccatcatgcctggctgagttaaggatcttgcaacagagagattatcctggattgtctgggtgggcccagtccattgggtgagtccttcaaaggtggagacctttccctgctggccagagagaggctgccttgctggttttggagatggaaggaggtaccactagtcaaggattgcaagcagtctctagaacagggattccaacactccggacacagaccagtagtggtccatggcctattaggaagtggggtgcacagcaggttaggggccggcaagccagcgaagcttcatctgtatttatagccactccccgtcgctggcgttaccacccgagctccgcctcctgtcacatcagcggtgggcattagattctcatagcagcacgagccctattgtgaactgcacacacgagggatgtaggttgcacgctccttatgagaatctgatgcctgatgatctgtcactgtctcccgtcacccccagatggggctgtctagttgcaggaaaacaagctcagggctcccactgagtctctgtgatggtgagttgtagaattatttaattatatgttacaatgtaataatagtagaaataaagtgcacaataaatgcaatgcacttgaatcgtcctgaaaccatccctccccgaccccaatccatggaaaaattgtgttccgcgaaaccggtctctggtgccaaaaaggttggggaccgcttctggaaaagctggaaaaggcaagaaaacgcattctctccctcagcctctggaaggaaccagcactgtgggactaatttacatactgtagggtaataaatttgt

SEQ ID NO: 6606 - protein, 36 aa, Homo sapiens
MLSDSPGVMCRPSRVKQMFASQSAGITGVSHHAWLS

SEQ ID NO: 6607 - DNA, 2231 bp, Homo sapiens
gctccagtcactgaaagggctaaactgatttccttgccaactagtaaaagctggaccttcggaccccaggacgtcgatgaactgatcttcatgctgagcgacagccctggggtcatgtgccggccttcccgagtcaagcagatgtttgcctccagagcctgccggaagtcggtgatgattgggactgctcttaacacaagcgagatgaagaaactgatcacccacatgggggagatggaccacccctggaactgtccccatggaaggccaaccatgagacacatcgccaacctgggtgtcatttctcagaactgaccgtagtcactgtatggaataattggttttatcgcagatttttatgttttgaaagacagagtcttcactaaccttttttgttttaaaatgaaacctgctacttaaaaaaaatacacatcacacccatttaaaagtgatcttgagaaccttttcaaaccagatggagcattgcttgcaaattttttttctctatgtttgcatgcgctcgtgtgtgtgtgtccaggcaagaacacattttataaaaataagaacacttgggctgggcatggtggctcatgcctgtgatcgcagcactttgggaggccgaggccggcagatcacctgagatcagaagttcgagaccagcctgaccaacatggagaaaccctgcctctactaaaaatacaaaattagccaggtgtgctggcgcatgcctgtaatccccgctacccaggaggctgaggcaggagaatcgcttgaacccgggagacggaggttgcagtgaaccgagattgcgccactgcgctccagcctgggtgagatagagcaagactgtgtctcaaaaaacaaaacaaaacaaaacaaaacaaaaaaaaccaaaccactttggaagttactcaggcctctgctctggctggacatagtttagtctataactttcaacccttaacaataattaaattcatctttgtttaatttcataaatttaaaagtagggtccttttcagttagtgattctcagccctgattcacattaaatttttaaacacgggggattctctgcccggctggaagaaaatgactggatgggacaggggtcactatttgaaacattcctctgtgcggccaaggtcgcaaaatgctgtcctcgcaggggaacaaaaagagtttgatttcccataatttgatgctgtgatttggtttcctcaggatgtgaactgtagaacattccagttactggccttgaatggttctgggaatataagaatccctgtctgtcttttcaaatagttttcatggaaccttgtcctgtttgaacttggctgaaaatggaagtaaagatgccctcttgggggcccagagatgacagatgtggctccccctgctgcccccaccccttctccagactgtgggcggctccccttcctgctttagaatccttcagatggaggaggcagtacagtagtcactgtgccatcgtgtctggcactgtgctggcgtggtctgcaggatcccacttatgaactctccagattgggagctgtggcaggataacagcccccaagacagctgtgtcctaatccccagaacctgtgaccacgctgcctcacgtggcagaagggactcggcaggtgtgattgagtgaaggatcttttttttttttttctttgagatgaagtttcgctcttgttgcccaggctggagttcaatagcatgatctcagctcactgcagcctctgcctcccaggttcaagtgattctcccacctcagcctcccgagtagctgggattacaggtgtccagaaccatactggctaatttttgtatttttagtagagacagggtttcaccatgttgaccaggctggtctcgaactcctgacctcaggtgatccgaccgcctcggcctcccaaagtgctgggattacaggtgtgagccatcatgcctggctgagttaaggatcttgcaacagagagattatcctggattgtctgggtgggcccagtccattgggtgagtccttcaaaggtggagacctttccctgctggccagagagaggctgccttgctggttttggagatggaaggaggtaccactagtcaaggattgcaagcagtctctagaacagggattccaacactccggacacagaccagtagtggtccatggcctattaggaagtggggtgcacagcaggttaggggccggcaagcca

SEQ ID NO: 6608 - protein, 74 aa, Homo sapiens
MLSDSPGVMCRPSRVKQMFASRACRKSVMIGTALNTSEMKKLITHMGEMDHPWNCPHGRPTMRHIANLGVISQN

SEQ ID NO: 6609 - DNA, 3106 bp, Homo sapiens; identical to SEQ ID NO: 835

SEQ ID NO: 6610 - protein, 870 aa, Homo sapiens; identical to SEQ ID NO: 836

SEQ ID NO: 6611 - DNA, 676 bp, Homo sapiens
aacacctcagcccgagcccggcgaggtctctgggctcctggagcgagggcgactttgtgaagaatgtcccgatgaaccacggcgtgtacacgtggccggacggcagcatgtatgaaggcgaagtggtcaacggcatgaggaacggattcgggatgttcaagtgcagcacccagcctgtgtcctacatcggccactggtgcaatggcaagcggcacgggaagttataaatctggaaatatatacgaaggccagtgggaagacaacatgcgccacggggaggggaggatgaggtggctgaccaccaacgaagagtacaccgggcggtgggagaggggcatccagaatggctttggaacacacacatggtttctaaagagaatccgcagttcccatttttctgtctgcagggccgattaactttcaagaacgggcgtgtgtacgaaggcgcattctccaatgaccacatagctgggtttccggatcttgaagttgaattcatcagctgcctggacctgtcttcaggagttgccccaagactgtccaggagcgccgaactgatcagaaagcttgatggcagtgaaagtcattctgtgttgggatcgagcattgagctggatctaaatttgctcctggacatgtaccctgagacagtccaacctgaagaaaagaagcaggt

SEQ ID NO: 6612 - protein, 103 aa, Homo sapiens
MVSKENPQFPFFCLQGRLTFKNGRVYEGAFSNDHIAGFPDLEVEFISCLDLSSGVAPRLSRSAELIRKLDGSESHSVLGSSIELDLNLLLDMYPETVQPEEKK

SEQ ID NO: 6613 - DNA, 564 bp, Homo sapiens
ggtgttctgccaggaacagagaccaaatattcattcctttttatgtcaacgacgcccataggaaattacggcttgtccggaaagcacttggtcctgatgcgttctggcagctacggaagacaggaagagagcgagcagctggggaaggagaggagggacctcgaactgtgcgtcttgattacggcaccgcaggaatgccctgtctctgctgggatgctgagctctgcgggagaaaatgacacaacccacagatttgcaccagagggagaagaaacctaggatgacgaggggtcacagaggccgaatctctgtgaagagtatttcaagaagctgacgcttttcctgactatggagagatcggttcaagtgacagcaggattcctggcggtggcaacacggagtcactgctgatgaaaaggggccttcagtggcctggggaggacagtgccacgtggagcaaaagctaagggacacacaggagaggtcctggagaaggtgagcacgtacacagcccaccaagatgcctagcagcaaaggtgtacatgtacacagccccccaagata

SEQ ID NO: 6614 - protein, 78 aa, Homo sapiens
MSTTPIGNYGLSGKHLVLMRSGSYGRQEESEQLGKERRDLELCVLITAPQECPVSAGMLSSAGENDTTHRFAPEGEET

SEQ ID NO: 6615 - DNA, 2305 bp, Homo sapiens
aacaggctgggcggtggtgtctcacgcctgtaatcggagcactttgggaggccgaagtgggagaccatttgaggccaggagttcgagagcagcctgggcaacacagaccccacctctacaaaaaaataaaactggccttggtggcgcgcgcctgtaatcctagctacttgggaggctgaggcagggggattgcttgagtgtcggacgttgaggctgcagtgagctgagatcgcgccactacactccagcctggatgacaaactgagaccctatcagaaaaaacaacaacaacaaaaaaacagtgcccgctcggtttttcctgaaacgcgcagccctcgcctgtagccaggagaaaactccgcgagccagcaaaacacaaactcggccaggaaacagacaacaaggccacccgggggtgcctgaagaggacgctgcgaggcggattctttttccgggcctgcggcgagtgcttccggggcggtggcgacggaggcggaagtgcggtgttttagccggtggctgctgtctctgggcgggccgtgggaggctcccgaggtgggggccggggcgggatggctgcagcggcggccggggccgggagcgggccctgggcggcccaggagaagcagttcccgccggcgctgctgagtttcttcatctacaacccgcgcttcgggccgcgcgaaggacaggaggaaaataagattttattttatcatccaaatgaggtagaaaagaatgagaagattagaaatgtcggattgtgtgaagctattgtacagtttacaaggacatttagcccatcaaaacctgcaaaatctttacatacacagaagaacagacagttcttcaatgaaccagaagaaaatttctggatggtcatggttgttcggaatcctataattgaaaaacagagtaaagatggaaaaccagttattgaatatcaagaggaggagttgttggacaaggtttatagctcggtgctgcggcagtgctacagcatgtacaagctttttaatggtacatttctgaaagccatggaagacggaggcgtcaagcttctgaaagaaagattagagaaattcttccatcggtatttgcaaacgctacatttgcagtcatgtgacctacttgacatttttggtggaatcagcttcttcccgttggataaaatgacttatttgaaaatccagtcctttattaatagaatggaggaaagcctgaatatagtcaaatacactgcttttctctataacgatcagctcatctggagtggattagaacaagatgacatgagaattttatacaaataccttaccacctcccttttcccaaggcacatcgaacctgagttagcaggaagggattctccaataagagcagaaatgccaggaaatcttcaacactatggaagatttcttaccggacccttgaacctcaatgatccagatgcaaaatgcagattccccaaaatttttgtaaatacagatgacacttatgaagagctccatttaatcgtttataaggccatgagtgcggctgtgtgctttatgatcgacgcctctgtccacccaacgttggatttttgccgaagactggacagcatcgttgggccccagctcacagtgctggcctctgacatctgtgaacagtttaacatcaacaagaggatgtctgggtctgagaaagaaccccagtttaagtttatctacttcaaccacatgaatctcgccgagaagagcacagttcacatgaggaaaacgcccagcgtgtcgctcacttccgtgcacccggatttaatgaagattctcggtgacatcaacagtgactttaccagagtggatgaagatgaggagatcattgtgaaggccatgagtgattactgggttgttggaaagaagtctgatcggcgggagctctatgttattttgaatcaaaaaaatgcaaacctgattgaagtaaatgaagaggtcaagaaactttgtgcaacgcagttcaacaacatcttcttcttggattgacggatgacggctcaccgagagcatatctaaaaaacactctgcaaacatttggtcacatgcaagttagtggtcatatgacggactgcattcaggacaagggtaaagcaatacttgctttgaagaatcagatttcgactcggtctgctgatctgaggtttttagattttaaatatttatgtggaattaattaaaggtagttggctatatcgctatcatttcattcttttgacattatttgaatattttactggaaaataagactaataaattgttaaaagttttta

SEQ ID NO: 6616 - protein, 482 aa, Homo sapiens; identical to SEQ ID NO: 838

SEQ ID NO: 6617 - DNA, 771 bp, Homo sapiens
gaaacagagtcttgctctgtcgcacaggctgggctcaaactccaggcctcaagtgatcctctggcctcccaaagagctgggattacaggcgtgagccaccttgcccagcccaaaatgtccttttttaatatcctgtgataaaaacatatcttttgtagggagaagtgatagctcggctgccctggagagaggggacctcacctcggcagagctgcccccttgggagatgccccacgtgtacactgtgtggaaattcagtgtaagcgtttttttccccttgtatcttgggcatactacatttttctctttattagtaatacctgtgttagtcattgtgcgcactagaaacatcagttaatgcaagcctgatctaaactgtgaatgtggtaagatcaaaatcctgacccctctgcggagcacttggtctgcagctcaaggttgctgtccgtttctttgttgttccattagttgtcccaggatgacaaccttgtgcttggtgtgtgtcaccagccttgtgcttctaaccccctcccctgggtgtcccgggcactttgcagtttctcaggccccgggcagcagtgttgataggctcaaaactcctgaggcctggtaggttttgtaggtggattttttcccctcttctacttgttaacatttcttggctgggcacagtggttcatgcctgtaatcccagcactttgggagaccaaggtgggcggatcacttgaggttaggagttcgagaccagcctggccaacatggcgaaaccct

SEQ ID NO: 6618 - protein, 44 aa, Homo sapiens
MTTLCLVCVTSLVLLTPSPGCPGHFAVSQAPGSSVDRLKTPEAW

SEQ ID NO: 6619 - DNA, 2617 bp, Homo sapiens
aacaggctgggcggtggtgtctcacgcctgtaatcggagcactttgggaggccgaagtgggagaccatttgaggccaggagttcgagagcagcctgggcaacacagaccccacctctacaaaaaaataaaactggccttggtggcgcgcgcctgtaatcctagctacttgggaggctgaggcagggggattgcttgagtgtcggacgttgaggctgcagtgagctgagatcgcgccactacactccagcctggatgacaaactgagaccctatcagaaaaaacaacaacaacaaaaaaacagtgcccgctcggtttttcctgaaacgcgcagccctcgcctgtagccaggagaaaactccgcgagccagcaaaacacaaactcggccaggaaacagacaacaaggccacccgggggtgcctgaagaggacgctgcgaggcggattctttttccgggcctgcggcgagtgcttccggggcggtggcgacggaggcggaagtgcggtgttttagccggtggctgctgtctctgggcgggccgtgggaggctcccgaggtgggggccggggcgggatggctgcagcggcggccggggccgggagcgggccctgggcggcccaggagaagcagttcccgccggcgctgctgagtttcttcatctacaacccgcgcttcgggccgcgcgaaggacaggaggaaaataagattttattttatcatccaaatgaggtagaaaagaatgagaagattagaaatgtcggattgtgtgaagctattgtacagtttacaaggacatttagcccatcaaaacctgcaaaatctttacatacacagaagaacagacagttcttcaatgaaccagaagaaaatttctggatggtcatggtatttacacacacagtgtatctttctgaaattgtatggtgaagttatgggtgatctttactgttcagaatttaggaaagttctctggctgttgcatccaagtaaaattaaaataaaattggttgcaattttaaaatcaagttcttcctatttgctttattcattcttggggctgttttaagaagttgtgtttctggtgctgtagcatgttcaaagtttttaaattaaggcaaaataaacatggtctaatgaattcattgtataatttcagtttatcaaactttgtaggttgttcggaatcctataattgaaaaacagagtaaagatggaaaaccagttattgaatatcaagaggaggagttgttggtaatgtgtcattgtttgtttatttatttatttttttaaatgtattgctgagtatgttgaatgccttacttggtcggatttaaactaggaggcttttgcagaagtttctcggggtatatagcaaaggtttatgtttatcatttacatgagcacaatctttttaaaatgtatatgcacccaatctcactaataccttctactcttcatctatattgaaagccctcctaaagtaaggcttactgattgacaaattagagtttaaacacttctggctgggaacagtggctcacacctgtaatcctagtactttgggaggtcaaggcaggcagattacttgaggtcaggggttcgagaccagcctggccaatatggcggaaccctgtctctactaaaactacaaaaactggccagggatggtggcgcacacctgtcatcccggcttctcaggaggctgaggcaggagaatcgcttgaaccggggacgcaaatgttgcagtgagccaggattgtaccactgcgctccagcctggacaacagagcgagactccatctcaaaaaaaaaaaaaaaaaaaaagaacgcaaacactttttttcagcacgcaactattgtgggatgaagtttataaacattatactgtttggccaagagtcagtgtacctttgccatctatccagtagacattgtttttcccttgaactgagctgtgtgctgtgttttcgcgtctgcaggacaaggtttatagctcggtgctgcggcagtgctacagcatgtacaaggtaagcgtggcgttctttctcaactcagagtccaaccacttacccctatctctaggctccagggttgtttaaagagaagtctataaatgactgcaaagtgactctgtatttgtcttagagaagaaaataatgaggcctttgaaacaggtagtgaggtttatgcctacatttattcagtaagtattgaactcccttctcttttctcagccttatagtaggaatgtgtccccattgatgaaaaagtgtatctatgtgctcaaggaacatacagaatgcagataattttatgatttaaaagtttcagtgaggcagggcacagtggatcacacctgtaatttcagcattctgggaggctaaggtgggaggattgcttgagcccaggaattcaggaccagtctgggcaatatagcaagaccccatctctacaaaaaaattttataaaagttagccaggtatcatggtgcatgcctgtagtcccagctacctgggaggctgaggtgggaggatcgctcgcaccttggaggtcgaggctgcagtgaactgtgattgcaccactgcactctaccctgggcaacagcgagattccatctc

SEQ ID NO: 6620 - protein, 117 aa, Homo sapiens
MAAAAAGAGSGPWAAQEKQFPPALLSFFIYNPRFGPREGQEENKILFYHPNEVEKNEKIRNVGLCEAIVQFTRTFSPSKPAKSLHTQKNRQFFNEPEENFWMVMVFTHTVYLSEIVW

SEQ ID NO: 6621 - DNA, 1514 bp, Homo sapiens
aacaggctgggcggtggtgtctcacgcctgtaatcggagcactttgggaggccgaagtgggagaccatttgaggccaggagttcgagagcagcctgggcaacacagaccccacctctacaaaaaaataaaactggccttggtggcgcgcgcctgtaatcctagctacttgggaggctgaggcagggggattgcttgagtgtcggacgttgaggctgcagtgagctgagatcgcgccactacactccagcctggatgacaaactgagaccctatcagaaaaaacaacaacaacaaaaaaacagtgcccgctcggtttttcctgaaacgcgcagccctcgcctgtagccaggagaaaactccgcgagccagcaaaacacaaactcggccaggaaacagacaacaaggccacccgggggtgcctgaagaggacgctgcgaggcggattctttttccgggcctgcggcgagtgcttccggggcggtggcgacggaggcggaagtgcggtgttttagccggtggctgctgtctctgggcgggccgtgggaggctcccgaggtgggggccggggcgggatggctgcagcggcggccggggccgggagcgggccctgggcggcccaggagaagcagttcccgccggcgctgctgagtttcttcatctacaacccgcgcttcgggccgcgcgaaggacaggaggaaaataagattttattttatcatccaaatgaggtagaaaagaatgagaagattagaaatgtcggattgtgtgaagctattgtacagtttacaaggacatttagcccatcaaaacctgcaaaatctttacatacacagaagaacagacagttcttcaatgaaccagaagaaaatttctggatggtcatggttgttcggaatcctataattgaaaaacagagtaaagatggaaaaccagttattgaatatcaagaggaggagttgttggtaatgtgtcattgtttgtttatttatttatttttttaaatgtattgctgagtatgttgaatgccttacttggtcggatttaaactaggaggcttttgcagaagtttctcggggtatatagcaaaggtttatgtttatcatttacatgagcacaatctttttaaaatgtatatgcacccaatctcactaataccttctactcttcatctatattgaaagccctcctaaagtaaggcttactgattgacaaattagagtttaaacacttctggctgggaacagtggctcacacctgtaatcctagtactttgggaggtcaaggcaggcagattacttgaggtcaggggttcgagaccagcctggccaatatggcggaaccctgtctctactaaaactacaaaaactggccagggatggtggcgcacacctgtcatcccggcttctcaggaggctgaggcaggagaatcgcttgaaccggggacgcaaatgttgcagtgagccaggattgtaccactgcgctccagcctggacaacagagcgagactccatctc

SEQ ID NO: 6622 - protein, 142 aa, Homo sapiens
MAAAAAGAGSGPWAAQEKQFPPALLSFFIYNPRFGPREGQEENKILFYHPNEVEKNEKIRNVGLCEAIVQFTRTFSPSKPAKSLHTQKNRQFFNEPEENFWMVMVVRNPIIEKQSKDGKPVIEYQEEELLVMCHCLFIYLFF

SEQ ID NO: 6623 - DNA, 1505 bp, Homo sapiens
atgtacttcttcgtctccaagctgtgctgggctgacatcggtttcacctcggccacggttcccaagatgattgtggacatgcagtcgcatagcagagtcatctctcatgcgggctgcctgacacagatgtctttcttggtcctttttgcatgtatagaaggcatgctgctgagtgcgatggcctatgactgctttgtagccatctgtcgccctctgcactacccagtcatcgtgaatcttcacctctgtgtcttcttcattttggtgtcctttttccttagcctgttggattcccagctgcacagttggattgtgttacaattcaccatcatcaagaatgtggaaatctctaattttggttatggtgtgtgctcggtggggctggagtggctggcttacctcctcgtggcttacagcctgggcgcctcagccgcctcactcctggttctgctgggcctgtggctgccacacccggtgcccctcgtggctggagaaggggtgcacctgctgctcaccttcatcctctttttctgggcccctgtgcctcaggtcctgcaacacagctggatcctctgtgtggcagccgccctttggggtgtgggcagcgccctgaacaagactggactcagcacactcctgggaatcttgtacgaagacaaggagagacaggacttcatcttcaccatctaccactggtggcaggctgtggccatcttcaccgtgtacctgggctccagcctgcacatgaaggctaagctggcggtgctgctggtgacgctggtggtggccgcggtctcctacctgcggatggagcagaagctgcggcggggcgtggccccgcgccagccccgcatcccgcggccccagcacaaggtgcgcggtgacggctacttggaggaggacaactcggacgagagcgacgcggagggcgagcatggggacggcgcggaggaggaggcgccgcccccggggcccaggcctggccccgagcccgctggactcggccgccggccctgcccgtacgaacaggcgcaggggggcgacgggccggaggagcagtgaggggccgcctggtccccggactcagcctcgctcctcgccggcctcagtttaccacgtcttaggtcggggggaccccctccgagtctcgcgctgtcttcgaaggcccctgtctcccttcccccacgttggggacgcccctcccagagcccgggtcacctccgggcttccgcagccccctccaaggcggagtggagccttgggaactccccggccaagcacaggggttcgaaaatacagctgataccccgcgggcccttagcacgcgccccagcgccggagcagggtcagggtcttcttgcgacccggccccgctccagatccccccagctctcggccgcggacccgggccgcgtgtgagcgccctttgcacctcctatctccagggtccgccgagagccacgattttttacagaaaatgagcgataaagagattttgtactgtc

SEQ ID NO: 6624 - protein, 353 aa, Homo sapiens
MYFFVSKLCWADIGFTSATVPKMIVDMQSHSRVISHAGCLTQMSFLVLFACIEGMLLSAMAYDCFVAICRPLHYPVIVNLHLCVFFILVSFFLSLLDSQLHSWIVLQFTIIKNVEISNFGYGVCSVGLEWLAYLLVAYSLGASAASLLVLLGLWLPHPVPLVAGEGVHLLLTFILFFWAPVPQVLQHSWILCVAAALWGVGSALNKTGLSTLLGILYEDKERQDFIFTIYHWWQAVAIFTVYLGSSLHMKAKLAVLLVTLVVAAVSYLRMEQKLRRGVAPRQPRIPRPQHKVRGDGYLEEDNSDESDAEGEHGDGAEEEAPPPGPRPGPEPAGLGRRPCPYEQAQGGDGPEEQ

SEQ ID NO: 6625 - DNA, 762 bp, Homo sapiens
atgcagacacaaggctgggtattggtttacttgtttctgatttttcaaccatcttttccaggcaaaaggtgtccaaactatacagacccacagagtctaacagatgtctctatattcctcctcctcaaactctcagaggatccagaactgcagccggtcgttgctgggctgttcctgtccatgtgcctggtcacagtgctggggaacctgctcatcatcctggccatcagccctgactcccacctccacatccccatgtacttcttcctctccaacctgcccttgcctgacatcggtttcacctccaccacggtccccaagatgattgtggacatccagtctcacagcagagtcctctcctatgcgggctgcctgactcagatgtctctctttgccatttttggaagcatggaagagaggcatgctcctgatcttctagactcccacctgcacaacttgattgccttacaaatgacctgctccaaggatgtggaaattcctaatttcttctgggaaccttctcaactcccccatcttgcatgttgtgacaccttcaccaggaacatcaacatgtatttccctgctgccatatttggcgttggagggtacctcggttcagatgtgtcatcttccccgagaaagagtgcagtggcctcagtgatgtacacggtggtcacccccatgctgaaccccttcatgtacagcctgagaaacagggatatgaaaagtgtcctgcggcggccgcacggcagcacagtctaa

SEQ ID NO: 6626 - protein, 253 aa, Homo sapiens
MQTQGWVLVYLFLIFQPSFPGKRCPNYTDPQSLTDVSIFLLLKLSEDPELQPVVAGLFLSMCLVTVLGNLLIILAISPDSHLHIPMYFFLSNLPLPDIGFTSTTVPKMIVDIQSHSRVLSYAGCLTQMSLFAIFGSMEERHAPDLLDSHLHNLIALQMTCSKDVEIPNFFWEPSQLPHLACCDTFTRNINMYFPAAIFGVGGYLGSDVSSSPRKSAVASVMYTVVTPMLNPFMYSLRNRDMKSVLRRPHGSTV

SEQ ID NO: 6627 - DNA, 1508 bp, Homo sapiens
atggtgcacgacggatgctcagactccatcctcaaggctggcaagaagacaggggctgtgaccgtctatgacaagccggcatctttctttaaagggacacctctggacctgcagcacaggctcttcatgaagctgggcggcatgcactctccgttcagggcccgtttagaacctgaggaaccagccacggagccgtcggccttcatggagcgggatgctgggagcgggctggtgatgtgtctctgcgagtggccagccctgctggtcagcagcacaggctggacagaggacgaagacttctccatcctgctggcagctttagaaaagtttgagcaactgactcttgatggacacaaccttccttctctcgtctgtataacaggcaaagggcctctgacggagtattacagctgcctcatccaccagaagcatttccagcacatccaggtcagcaccccttggctggaggccgaggactagcccctgcttctagggtcggtggacctgggtgtctgtctgcacacgttctccagtggcctggacctgcccatgaaggtggtggacatgttcgggtgctatttgcctgcgtgtgccgtgaacttcaagtgtttaaatgagctggtgaaacatgaagaaaatggcctggtctttgaggactcagaggaactggcagctcagctgcagatgcttttctcaaactttcctgatcctgcaggcaagctaaaccagttccggaagaacctgcggtaatcgcagcagctcggatgggatgagagctgggtgcagactgtgctccctttggttatggacacataactcctgggccagaggctaaaaccccgggacccctgctgtccttcccgcagcttcttctcggagtctcagggcaaaccctttcgagcagcgcctcccagtggccagaaggtgaaatgacggcagtggtgccgcctggtgaatgaattggttctgtgacccgggaagctgtgcttggttctgatttcttttctggaggctcagaaacacttcctctcttcttctgttcttcatgccccatgcccctgctagcgtattactgttctgtgacttctgcagtactccttatcctgcgtttggtctccaggtgtcatctttctgccgtgttcctaacattttgattcctgtcttgaaaaaagcacctgctgcaccgtaagcccagggatgtggcagctgcagcgggcttggctttgtgaagaaccgagttgtgtccacgttgggggaacatcatacttgatacacactttttatttgcacaaagaaaatgctgtttttggagccagagttttcatgtctgattgatggcgattttcttcagaaccagaactgctggcagaaagggagcacccacacgcttagatagctgatgtcttattagagggcagtttgtggttcctgatttggaaattaacattctccaaacattccagtccaatgaaagttttatctgctttcccatataaaaactcttccca

SEQ ID NO: 6628 - protein, 159 aa, Homo sapiens
MVHDGCSDSILKAGKKTGAVTVYDKPASFFKGTPLDLQHRLFMKLGGMHSPFRARLEPEEPATEPSAFMERDAGSGLVMCLCEWPALLVSSTGWTEDEDFSILLAALEKFEQLTLDGHNLPSLVCITGKGPLTEYYSCLIHQKHFQHIQVSTPWLEAED

SEQ ID NO: 6629 - DNA, 3117 bp, Homo sapiens
gtgagggtgtgagggtcgcgctcctgctgtctggactttttctgtcctactgagacacggccgacatgagatgatgaacctcaagtaccaccccagacaacaaggctgcttcatcaggacacaaacctgcctgtaccaggacctctgacctgtgtgcagcagagacactgaggataccattggcatcaatgtcaaaagtgacttcaatctgaggaacaccttggggttcaggaggtatgcccgtgaattcaaacttgccaagcaggttgttatccttggacatggcacgctcaccttcataaacctgaataagcacaccaggctggttgtcagaataggtaatgaaggtctgtgtctgcttggtaggaatggtggtattacagttgatgaggatggtcatgactccactagcagtttcaataccaagggaaagaggagtgacgtccaagagcagcaaatcttgaacattttcagacttgtctccagacaggatggctgcctggacagccataagcaacagcttcatcatggctgatgctcttattcagttcttttccattgaagaagtcttggagaagcttctgaatcttggggatactaatagaaccaccaaccaggacaatatcatgaatttgtgacttgtctggtttggcatctcgaagggctttctctactgggtccagggtgccacagaacaggtcagcattcaattcttcaaactgggcacaggtaatggaggtatagaagtcaattcctacatagagagaatcgatctcaatactgacttgggtgctggaagagagagtacgcttagcatgttcacaagcagtacggaggcatcttacagctctcttgctctcactgatgtccttcttatgcttgcgcttgagctcagcaataaaatggttgaccattcggttgtcaaaatcttctccacccaagtggttgtctctggctgtagacttgacctcaaagattccatcctcaatagtgaggattgacacaccgaaagtgccaccccccaggtcaaagataagcacgtttctttgtgctccaacctttttgtctgaacttttgtaaacaatagcagcaacagttggctcattaataattctaagtacattgagaccagcaatagttccagcatctttggtaacctgaaactgagagtcattaaagtaagctggcactgtgaccacagcactggtaacagtcttcccaaggtaggcttctgcaatttccttcatctttgtcagaacaatagaggatacctcctctggatagaagcttttggtctctcccttgtattctacttggacctggggcctgtcagcatcattcactaccatgaagggccaatgcttcatatcagactggacaacagcatcatcaaatctgcgtccaatcagacgtttggcatcaaaaactgtgttggtggggttcattgcaacttgatgctttgcggcatcaccaatcaactgtttagtgtccataaaggcgacatagcttggagtggttcagtttccctgatcattggcaattatctctacttttccgtgctggaaaacacccacgtaagagtaggtggtgctaagatcaataccaactgcaggtcccttggacatggttgctggcatgtagccctggctccgataaagaagaaagccacaggaacccgagagctgcaggcgagttcaatgagctaggatttcttaatatatatgtgataatgttttaactttgataattgacttttataatgacttgagtagtcttaaattgtctttcatttaaaacttttgttcttttaaaaaagcaccaagtctatgctactaacaaaaatttccttttaccatgtagactacttgggatgaaaataacttttcataattactatcatgaagggaggagagtggaaagttgccagatactgcagcaagatataaagatgaattcttcaaatgaggaagcaaactttatcaagtggttgaatttcttagatcaccttgttggacataatttcttgtaaacaaattatgcagtcagtgtcacgttcatgcagagtcttttaacttaaaattcattacaggtaacactttcaaaaagaagttctgtagtcttgcatactatttaccacaccatatttactgcacttagcttcattatggaggaaagaacaatagtaaactatcaataactgagacaataatcatattcattagtgatgagtcaaacaggttatacttattttttaaaataaaaacatttgtaaatttttctctacgtttttaaaacaacagtttaacaatagcagttctgttattttagctttaattttttgtaccaacagttaatttgctcatgcccaaagatttacatttataaaaaatgttctgccatgcaagttttaagagatttttgaattgttgacaatactcagcacagtcacatgtctctcataaatccacccagacttaagaaccaattttcagtgcaactcatgaagacaaagaatagccattataaacacattgttgaaaatcatttaaaaaatcattaaatttttttgcatttaatattttttcagctttcttaagatataattaacaaaaattgtatatattcaagttgtgttatgtgaggttttgatacatgtatacatagtaaaataattaccacagttaagctaattatactatacatagtaaaataattaccacaatcaagctaattaatatatttattatcacacataattctttttcttgttgtggtgagaatacttaagatctactctcttagaaaatttcaggtatataatacattattattaaccatagttgccatgctatacattagggctccagaacttattcatttcataacttcaagttataaaagtcacgataaaagtttgtgccttttgcaagtttgtaccttttgatgaacatcttcccatatcttcccattttcctcagtcccctgcacctggaaaccacccttctaaactgtttatatgagttcaccttttttcagattccacatataagtgagatcatgcagtgcttgtgtttctgtgtctggcttatttcacttagcataaagtcttccaagttc

SEQ ID NO: 6630 - protein, 115 aa, Homo sapiens
MLHIRLDNSIIKSASNQTFGIKNCVGGVHCNLMLCGITNQLFSVHKGDIAWSGSVSLIIGNYLYFSVLENTHVRVGGAKINTNCRSLGHGCWHVALAPIKKKATGTRELQASSMS

SEQ ID NO: 6631 - DNA, 804 bp, Homo sapiens
agctatgatcttgaagaacaagaacaaagtaacagaaactgttaaaagatctgcttcactgaaggcaacaagacacaaatttcaggaagggcctatatcagaaagaaggaacggacgcacacctccccaaggagccctggcactaactacaacacacacagggtttggccagacctggaccagcttttggaaaacactaactcaactgtcatccaacttgctgcagttaaccacccgtcagtcacccatcagggggcatgaagctctggtttgatcactttgctaagggctgcacaaggaagaaaaaaagtcataaaacactatattgtcaagcagtactcactgcttctcctcttcactgtcctctaccttgagtccctcaaaatatttcacctgcatgacatttcttcacttgagatgctgtttgccctttaaatggcatcttagcatttgaggtcctctagctgtcttctttcttttccttaggctgacaattctgctgaaagtttgtgaaaagacttgacattcacaaaatctaaggtcttctggtgataccaaatgtaacaggaatggaagcatcatcagcactgtgcaacattatgtttctttagcatggtttggctcaggttacaaaacctgggcagctgtaccacagacagaggctatggccatttcccctctattttatgatcatccctgtttcattactttgtgctttcactacatcctggcctagcagtctgtagcagcaggctagagagataaggccttctggtaataaataaagtagaaggttaaaaccac

SEQ ID NO: 6632 - protein, 89 aa, Homo sapiens
MILKNKNKVTETVKRSASLKATRHKFQEGPISERRNGRTPPQGALALTTTHTGFGQTWTSFWKTLTQLSSNLLQLTTRQSPIRGHEALV

SEQ ID NO: 6633 - DNA, 519 bp, Homo sapiens
cagacagttctcgttcacacaacagagacagctcgtcttagatatttcatggagttgttgcttgagaaaggaaaacctctaatgctagtaggaaatgcaggagtgggaaaaacagtctttgtaggtgacacattggcaagtctctctgaggattacatagtatcccgtgtgcctttcaactactacacgacatccacagctctgcaaaaaattcttgagaaacccctagagaaaaaagctggtcataactatggtcctggaggaaataaaaaattgatttattttatcgacgacatgaacatgcctgaagtggacttatatggcaccgttcagcctcacaccctgatccggcagcatattgattatggacattggtatgatagacagaaggtgatgcttaaagaaatccataactgccagtatgtcgcctgcatgaatccgatggtgggcagcttcaccatcaatcccaggctacagggtatagatagtcacatgctgcttcaacagcccctcatttat

SEQ ID NO: 6634 - protein, 156 aa, Homo sapiens
MELLLEKGKPLMLVGNAGVGKTVFVGDTLASLSEDYIVSRVPFNYYTTSTALQKILEKPLEKKAGHNYGPGGNKKLIYFIDDMNMPEVDLYGTVQPHTLIRQHIDYGHWYDRQKVMLKEIHNCQYVACMNPMVGSFTINPRLQGIDSHMLLQQPLI

SEQ ID NO: 6635 - DNA, 1282 bp, Homo sapiens
gacccaggtggctggggtggcagctgatcatgtcaggaggactcctctgcacaacatcacaagcacaggagagaatgctaaacttgattgggagctcacagaagacccctggaacccagagcaataagggaaatttggacccagagatacattcagagagaagatgatgtgaaggcacaggaaggatgccctgtgaacatcaggaccaatgcctgcaaacctaggagagaggtctacaacagatccttccctcgcagccctcagatcgaactgaccctgcaagtaccttgattttggacttctggcttccagaactgagcaacaataactttctgttgaagccgtccagttttgaagccacccagtctgtggtgcttggttaccgcggccctagcaaacttgcctgaggctttccaaatcacagccccgttttgtcacaggggaagaattctaagaagttctttatttggccaagtgagggatagaagaataatgagcatttccctcatcacagctctgacaactgcctcagccacacacggcttaggagattggccacttcctccgccttcagcttgcagggggcttcagtaataaatgtgtagaagtgtttggtcttctcaatgctgggaatccagggagtatggcctggcatacatggaaaccagtcccctaaagacctcattgacacaggcctcatttgggggtctcctcaggcacttcccccttggctcctgaggccagaacccgaccctgctgtgtctctcttccatgcatctttttgccatctctgctctctggaatctgcaacaatatgagggtgctcaggactttgatgttgctactgacctcagcatgccccagtccaaacctaccttcttcctcctgggcccacatccgcttctgctccccacttccccagtgtcttcattcttttcatcacatgctgaccaaagactcatctttaggcactctctatgtcccttctgctacatccactctgttgccacatctcctgaattcttctgtctgatttcttctcactcttcctttccaccctggatcagtccattggggccgcatgtcaggacaccggatgacactgtttggacacctggaaggatcgggtaaaagatacagagaagtctaaggagggatagggtgagtctgggatgggctgtggattaggcaccaggtaaagctaattggggggtgggtgaggaatggggtgagggtatctattgcatctattttatggtaataaaaggaagttgaaagttca

SEQ ID NO: 6636 - protein, 45 aa, Homo sapiens
MSGGLLCTTSQAQERMLNLIGSSQKTPGTQSNKGNLDPEIHSERR

SEQ ID NO: 6637 - DNA, 1362 bp, Homo sapiens
ctgagatgccgtcgaggatgtaccgaatttgtttgtcaattcgttctgaagagccccccaagcctgggattatgaagaaggtaatactaccagtcatctgagttcttctgtgttctggctctccctgtgagcggctgttgtagaactgcctggccatcctcaaatttcgtgcagttacttcaaggcgtctccaggtggagtgtgtgactcctttttgccaccgcgtggcttctgccactttcttcacctgcttcagcccacttagaggaggttggctgctgccctgccctctcccaagtgaccccttgggaatcctcccagtgaggactttgctctctgtgccagaggtttgccttgtgctgccagtgctctccccattgccactgagtctcttcaccactgtttcactggggcacctgcatgggccccaggtctcctggagccctgaaattactgaagcccacttggttcagggcagaaagggggagaatactactcacctctttgttggggatgtcaaaggaggaccttgtggcatcttgcagagtttgtgtttatcgctccctctccctgtaagtcttgatttgaaatcaaaagaagctagaaggaaactacggacgcaggcacggctctaggctctgaatctgcttccgcgtcggcacccaagaatttcttattgggtcaagctggttcagaagccctcttccctcaggatggtgtctcttgcaggaggatccttggtctcatgcaaatgggctctagactaggttgtccctccagtctccagagacccagacagctctgagatggcttcaggctgaaaccagacccttgcacaacaccaaaacacttatttaccaaacatggtgttaccttcacaatcggtttctttgctttgctaagaagagatctcttcaagatcgataaaacagtgacctctgttgggcatttactcaagttttgtttcgtgcataacatttcaggacccgcctgttggggaaagtgaggtcatccattcttcaccgattgtctaaacagagacggtggtcctctgccgcggtgggattctttggtgtgaaaatgaaaatgggggaggatggctggatggtttcatttttagtgctctcctgtcttaagcaacgtagacactcctgaaccaagttctctttcctgcatgaaacgaagccactgctcccagctccgcagccgtgcactgtgatccgtctatgtaatgtgagcttgcttttactcaactatctattttttagaaaatacaattcaataaatttcaagtacttgaactgagtgacacaatacaacacacagatttatcttttcaataaaaagtgttttttaaatagg

SEQ ID NO: 6638 - protein, 31 aa, Homo sapiens
MPSRMYRICLSIRSEEPPKPGIMKKVILPVI

SEQ ID NO: 6639 - DNA, 1527 bp, Homo sapiens
aggtaacaccatgtttggtaaataagtgttttggtgttgtgcaagggtctggtttcagcctgaagccatctcagagctgtctgggtctctggagactggagggacaacctagtctagagcccatttgcatgagaccaaggatcctcctgcaagagacaccatcctgagggaagagggcttctgaaccagcttgacccaataagaaattcttgggtgccgacgcggaagcagattcagagcctagagccgtgcctgcgtccgtagtttccttctagcttcttttgatttcaaatcaagacttacagggagagggagcgataaacacaaactctgcaagatgccacaaggtcctcctttgacatccccaacaaagaggactggagatgtctgaggctcattctgccctcgagcccaccgggaacgaaagagaagctctatctcccctccaggagcccagctatgaactccttctccacaagcgccttcggtccagttgccttctccctggggctgctcctggtgttgcctgctgccttccctgccccagtacccccaggagaagattccaaagatgtagccgccccacacagacagccactcacctcttcagaacgaattgacaaacaaattcggtacatcctcgacggcatctcagccctgagaaaggagacatgtaacaagagtaacatgtgtgaaagcagcaaagaggcactggcagaaaacaacctgaaccttccaaagatggctgaaaaagatggatgcttccaatctggattcaatgaggagacttgcctggtgaaaatcatcactggtcttttggagtttgaggtatacctagagtacctccagaacagatttgagagtagtgaggaacaagccagagctgtgcagatgagtacaaaagtcctgatccagttcctgcagaaaaaggcaaagaatctagatgcaataaccacccctgacccaaccacaaatgccagcctgctgacgaagctgcaggcacagaaccagtggctgcaggacatgacaactcatctcattctgcgcagctttaaggagttcctgcagtccagcctgagggctcttcggcaaatgtagcatgggcacctcagattgttgttgttaatgggcattccttcttctggtcagaaacctgtccactgggcacagaacttatgttgttctctatggagaactaaaagtatgagcgttaggacactattttaattatttttaatttattaatatttaaatatgtgaagctgagttaatttatgtaagtcatatttatatttttaagaagtaccacttgaaacattttatgtattagttttgaaataataatggaaagtggctatgcagtttgaatatcctttgtttcagagccagatcatttcttggaaagtgtaggcttacctcaaataaatggctaacttatacatatttttaaagaaatatttatattgtatttatataatgtataaatggtttttataccaataaatggcattttaaaaaattcagcaa

SEQ ID NO: 6640 - protein, 212 aa, Homo sapiens; identical to SEQ ID NO: 846

SEQ ID NO: 6641 - DNA, 808 bp, Homo sapiens
ctgccctcgagcccaccgggaacgaaagagaagctctatctcccctccaggagcccagctatgaactccttctccacaagcgccttcggtccagttgccttctccctggggctgctcctggtgttgcctgctgccttccctgccccagtacccccaggagaagattccaaagatgtagccgccccacacagacagccactcacctcttcagaacgaattgacaaacaaattcggtacatcctcgacggcatctcagccctgagaaaggagacatgtaacaagagtaacatgtgtgaaagcagcaaagaggcactggcagaaaacaacctgaaccttccaaagatggctgaaaaagatggatgcttccaatctggattcaatgaggagacttgcctggtgaaaatcatcactggtcttttggagtttgaggtatacctagagtacctccagaacagatttgagagtagtgaggaacaagccagagctgtgcagatgagtacaaaagtcctgatccagttcctgcagaaaaaggtgggtgtgtcctcattccctcaacttggtgtgggggaagacaggctcaaagacagtgtcctggacaactcagggatgcaatgccacttccaaaagagaaggctacacgtaaacaaaagagtctgagaaatagtttctgattgttattgttaaatctttttttgtttgtttggttggttggctctcttctgcaaaggacatcaataactgtattttaaactatatattaactgaggtggattttaacatcaatttttaatagtgcaagagatttaaa

SEQ ID NO: 6642 - protein, 198 aa, Homo sapiens
MNSFSTSAFGPVAFSLGLLLVLPAAFPAPVPPGEDSKDVAAPHRQPLTSSERIDKQIRYILDGISALRKETCNKSNMCESSKEALAENNLNLPKMAEKDGCFQSGFNEETCLVKIITGLLEFEVYLEYLQNRFESSEEQARAVQMSTKVLIQFLQKKVGVSSFPQLGVGEDRLKDSVLDNSGMQCHFQKRRLHVNKRV

SEQ ID NO: 6643 - DNA, 926 bp, Homo sapiens
cccaccgggaacgaaagagaagctctatctcccctccaggagcccagctatgaactccttctccacaaacatgtaacaagagtaacatgtgtgaaagcagcaaagaggcactggcagaaaacaacctgaaccttccaaagatggctgaaaaagatggatgcttccaatctggattcaatgaggagacttgcctggtgaaaatcatcactggtcttttggagtttgaggtatacctagagtacctccagaacagatttgagagtagtgaggaacaagccagagctgtgcagatgagtacaaaagtcctgatccagttcctgcagaaaaaggcaaagaatctagatgcaataaccacccctgacccaaccacaaatgccagcctgctgacgaagctgcaggcacagaaccagtggctgcaggacatgacaactcatctcattctgcgcagctttaaggagttcctgcagtccagcctgagggctcttcggcaaatgtagcatgggcacctcagattgttgttgttaatgggcattccttcttctggtcagaaacctgtccactgggcacagaacttatgttgttctctatggagaactaaaagtatgagcgttaggacactattttaattatttttaatttattaatatttaaatatgtgaagctgagttaatttatgtaagtcatatttatatttttaagaagtaccacttgaaacattttatgtattagttttgaaataataatggaaagtggctatgcagtttgaatatcctttgtttcagagccagatcatttcttggaaagtgtaggcttacctcaaataaatggctaacttatacatatttttaaagaaatatttatattgtatttatataatgtataaatggtttttataccaataaatggcattttaaaaaattcagcaa

SEQ ID NO: 6644 - protein, 136 aa, Homo sapiens
MCESSKEALAENNLNLPKMAEKDGCFQSGFNEETCLVKIITGLLEFEVYLEYLQNRFESSEEQARAVQMSTKVLIQFLQKKAKNLDAITTPDPTTNASLLTKLQAQNQWLQDMTTHLILRSFKEFLQSSLRALRQM

SEQ ID NO: 6645 - DNA, 1038 bp, Homo sapiens
acgaaagagaagctctatctcccctccaggagcccagctatgaactccttctccacaatacccccaggagaagattccaaagatgtagccgccccacacagacagccactcacctcttcagaacgaattgacaaacaaattcggtacatcctcgacggcatctcagccctgagaaaggagacatgtaacaagagtaacatgtgtgaaagcagcaaagaggcactggcagaaaacaacctgaaccttccaaagatggctgaaaaagatggatgcttccaatctggattcaatgaggagacttgcctggtgaaaatcatcactggtcttttggagtttgaggtatacctagagtacctccagaacagatttgagagtagtgaggaacaagccagagctgtgcagatgagtacaaaagtcctgatccagttcctgcagaaaaaggcaaagaatctagatgcaataaccacccctgacccaaccacaaatgccagcctgctgacgaagctgcaggcacagaaccagtggctgcaggacatgacaactcatctcattctgcgcagctttaaggagttcctgcagtccagcctgagggctcttcggcaaatgtagcatgggcacctcagattgttgttgttaatgggcattccttcttctggtcagaaacctgtccactgggcacagaacttatgttgttctctatggagaactaaaagtatgagcgttaggacactattttaattatttttaatttattaatatttaaatatgtgaagctgagttaatttatgtaagtcatatttatatttttaagaagtaccacttgaaacattttatgtattagttttgaaataataatggaaagtggctatgcagtttgaatatcctttgtttcagagccagatcatttcttggaaagtgtaggcttacctcaaataaatggctaacttatacatatttttaaagaaatatttatattgtatttatataatgtataaatggtttttataccaataaatggcattttaaaaaattcagcaa

SEQ ID NO: 6646 - protein, 189 aa, Homo sapiens
MNSFSTIPPGEDSKDVAAPHRQPLTSSERIDKQIRYILDGISALRKETCNKSNMCESSKEALAENNLNLPKMAEKDGCFQSGFNEETCLVKIITGLLEFEVYLEYLQNRFESSEEQARAVQMSTKVLIQFLQKKAKNLDAITTPDPTTNASLLTKLQAQNQWLQDMTTHLILRSFKEFLQSSLRALRQM

SEQ ID NO: 6647 - DNA, 1094 bp, Homo sapiens
gctgtgctgtcagctcacccctgcgctcgctcccctccggcacaggcgccttcggtccagttgccttctccctggggctgctcctggtgttgcctgctgccttccctgccccagtacccccaggagaagattccaaagatgtagccgccccacacagacagccactcacctcttcagaacgaattgacaaacaaattcggtacatcctcgacggcatctcagccctgagaaaggagacatgtaacaagagtaacatgtgtgaaagcagcaaagaggcactggcagaaaacaacctgaaccttccaaagatggctgaaaaagatggatgcttccaatctggattcaatgaggagacttgcctggtgaaaatcatcactggtcttttggagtttgaggtatacctagagtacctccagaacagatttgagagtagtgaggaacaagccagagctgtgcagatgagtacaaaagtcctgatccagttcctgcagaaaaaggcaaagaatctagatgcaataaccacccctgacccaaccacaaatgccagcctgctgacgaagctgcaggcacagaaccagtggctgcaggacatgacaactcatctcattctgcgcagctttaaggagttcctgcagtccagcctgagggctcttcggcaaatgtagcatgggcacctcagattgttgttgttaatgggcattccttcttctggtcagaaacctgtccactgggcacagaacttatgttgttctctatggagaactaaaagtatgagcgttaggacactattttaattatttttaatttattaatatttaaatatgtgaagctgagttaatttatgtaagtcatatttatatttttaagaagtaccacttgaaacattttatgtattagttttgaaataataatggaaagtggctatgcagtttgaatatcctttgtttcagagccagatcatttcttggaaagtgtaggcttacctcaaataaatggctaacttatacatatttttaaagaaatatttatattgtatttatataatgtataaatggtttttataccaataaatggcattttaaaaaattcagcaa

SEQ ID NO: 6648 - protein, 136 aa, Homo sapiens; identical to SEQ ID NO: 6644

SEQ ID NO: 6649 - DNA, 1396 bp, Homo sapiens
ggatgataaagtcaaatccctcctctgtagcttgatatgttatagaagttcaatgactgctgaacaagttttaaatgctgaatgtttcttgatgccaaaggagcaatcagttccaaacccagaaaaagatactgaatacaccctatataaaaaggaagaagaaataaagacggagaacttggataaatgtatggagaagacaagaaatgtttctaggagctaatactgtgtccagaattggtgggttcttggtctcactgacttcaagaatgacgccgtggaccctcgcggtgagtgttacagttcttaaaggcggcgtgtccggagtttgttccttctgatgttcggatgtgttcagagtttcttccttctggtggggttcgtggtctcgctggctcaggagtgaagctgcggaccttcgctgtgagtgttacagctcttaaggcggcgcgtctgaagttgtttgttcctccgggtgggttcgtggtctcactggcttcaggagtgaagctgcagaccttcgctgtgagtgttacagctcttaaggccgcgcgtctgaagttgtttgttcctccgggtgggtggtctcactggcttcaggagtgaagctgcagaccttcgcagtgagtgttacagctcataaaggcagtgtggacccaaagagtgagcagcagcaagatttattgcaaagagcgaaagaacaaagcttccacagtgtggcccggcggctccaagtgcggggccgccaagcccacgcccacccggaactctagctggcccgcaagcgccacgcgcagccctggttccgcccgtgccttttcctccatgcctccccgcaagccgagggagccggctccggcctcggccagcccagagaagggctcccatggtccagcggcgggctgaagggctcctcaagcacggccagaatgggtgccgaggccgaggaggcaccgagagcgagtgagggccacgagggctgccagcatgctgtcacctctcaatacctctcctggcttccgggaccttaaagctgtccataaccaagatgtggaaaattgaggctcagaaaaaatgaacttgttgaaatctatccaggtggcacatggcatgattccacttcttggctcccatagggaaaagaagacaagtaaagagatgaagacttcttccaggaacctgaggtacttcattgtctgcagagatgcctcatcctacacccctcagtcactcatatctggatacattggaccttgtcaacatcaataatggacatacctctgatatttgaactctgaatctcactctgtgaccacaactttgtatctttctaagtctttaatcttcaacctcacagaactcttcataccctaaaatatagtattttcacctggtc

SEQ ID NO: 6650 - protein, 64 aa, Homo sapiens
MNLLKSIQVAHGMIPLLGSHREKKTSKEMKTSSRNLRYFIVCRDASSYTPQSLISGYIGPCQHQ

SEQ ID NO: 6651 - DNA, 701 bp, Homo sapiens
gaggcgcggctggaagaaccagactgagaaagtgccacagggcgggggccgcatccgcccctcggcttctggttactgacccgacggctttgtgagtgaaagtgaagagacacttcgaggcaggtcctggaaccaatcccctctgatactgagagacaactattacacaagagaaatattctaccattcacaaaatctcgtttaagtgttgtgaaatacaaacaccagggaatcaagaactttagaaaattgtggctgtgttcccatatgtggtacaaagaaccagtgagtcccatttgttgtggttcctgcattcgatgactccagatgtgccaccaccgagctagtcttatgacaacctagaaggcaaattgggatggccctatatttgtcactgagagcagaagggttgagaacttagatcctgacaggaggcccacctttattggagaaatggctctgcaacttagctcatgtaagactgctgggatttgaaatttatcctattatttgaagactgaaatcaaaatatgaaggtggagcatcatgtgtgccttctgtcttgttctctactagggtgtaaaccatttaactaaaaatagtctccaatttgacaccttcccaacatttcactagtatactccaaatctccatgcagggttacagacctatttcagctggctccatttactctgaggcag

SEQ ID NO: 6652 - protein, 41 aa, Homo sapiens
PDGFVSESEETLRGRSWNQSPLILRDNYYTREIFYHSQNLV

SEQ ID NO: 6653 - DNA, 314 bp, Homo sapiens
gaggggatgtcggtcagtgcgagatccgctgctgctgaggagaggagcgtcaacagcagcaccatggcaacagaagaaccttgaaggctatgtgggatttgccaatctcccaaatcaagtatacagaaaatcggtgaagagaggttttgaattcacgcttatggtagtggaggtgatgtttcaccatgttgcccgtggctaatcttgaactcctgggctcaagcgatccatccgccttggcctcccaaagtgctaggattacaggtgaatctggattgggaaagtcgacattaatcaactcattattcctcaca

SEQ ID NO: 6654 - protein, 42 aa, Homo sapiens
MLPVANLELLGSSDPSALASQSARITGESGLGKSTLINSLFL

SEQ ID NO: 6655 - DNA, 2312 bp, Homo sapiens
agtgcgagatccgctgctgctgaggagaggagcgtcaacagcagcaccatggcaacagaagaaccttgaaggctatgtgggatttgccaatctcccaaatcaagtatacagaaaatcggtgaagagaggttttgaattcacgcttatggtagtgggtgaatctggattgggaaagtcgacattaatcaactcattattcctcacagatttgtattctccagagtatccaggtccttctcatagaattaaaaagactgtacaggtggaacaatccaaagttttaatcaaagaaggtggtgttcagttgctgctcacaatagttgataccccaggatttggagatgcagtggataatagtaattgctggcagcctgttatcgactacattgatagtaaatttgaggactacctaaatgcagaatcacgagtgaacagacgtcagatgcctgataacagggtgcagtgttgtttatacttcattgctccttcaggacatggacttaaaccattggatattgagtttatgaagcgtttgcatgaaaaagtgaatatcatcccacttattgccaaagcagacacactcacaccagaggaatgccaacagtttaaaaaacagataatgaaagaaatccaagaacataaaattaaaatatacgaatttccagaaacagatgatgaagaagaaaataaacttgttaaaaagataaaggaccgtttacctcttgctgtggtaggtagtaatactatcattgaagttaatggcaaaagggtcagaggaaggcagtatccttggggtgttgctgaagttgaaaatggtgaacattgtgattttacaatcctaagaaatatgttgataagaacacacatgcaggacttgaaagatgttactaataatgtccactatgagaactacagaagcagaaaacttgcagctgtgacttataatggagttgataacaacaagaataaagggcagctgactaagagccctctggcacaaatggaagaagaaagaagggagcatgtagctaaaatgaagaagatggagatggagatggagcaggtgtttgagatgaaggtcaaagaaaaagttcaaaaactgaaggactctgaagctgagctccagcggcgccatgagcaaatgaaaaagaatttggaagcacagcacaaagaattggaggaaaaacgtcgtcagttcgaggatgagaaagcaaactgggaagctcaacaacgtattttagaacaacagaactcttcaagaaccttggaaaagaacaagaagaaagggaagatcttttaaactctctattgaccaccagttaacgtattagttgccaatatgccagcttggacatcagtgtttgttggatccgtttgaccaatttgcaccagttttatccataatgatggatttaacagcatgacaaaaattatttttttttttgttcttgatggagattaagatgccttgaattgtctagggtgttctgtacttagaaagtaagagctctaagtacctttcctacattttctttttttattaaacagatatcttcagtttaatgcaagagaacattttactgttgtacaatcatgttctggtggtttgattgtttacaggatattccaaaataaaaggactctggaagattttcattgaggataaattgccataatatgatgcaaactgtgcttctctatgataattacaatacaaaggttccattcagtgcagcatatacaataatgtaatttagtctaacacagttgaccctattttttgacacttccattgtttaaaaatacacatggaaaaaaaaaaaaccctatatgcttactgtgcacctagagcttttttataacaacgtctttttgtttgtttgttttggattctttaaatatatattattctcatttagtgccctctttagccagaatctcattactgcttcatttttgtaataacatttaatttagatattttccatatattggcactgctaaaatagaatatagcatctttcatatggtaggaaccaacaaggaaactttcctttaactccctttttacactttatggtaagtagcagggggggaaatgcatttatagatcatttctaggcaaaattgtgaagctaatgaccaacctgtttctacctatatgcagtctctttattttactagaaatgggaatcatggcctcttgaagagaaaaaagtcaccattctgcatttagctgtattcatatattgcatttctgtattttttgtttgtattgtaaaaaattcacataataaacgatgttgtgatgt

SEQ ID NO: 6656 - protein, 384 aa, Homo sapiens
MVVGESGLGKSTLINSLFLTDLYSPEYPGPSHRIKKTVQVEQSKVLIKEGGVQLLLTIVDTPGFGDAVDNSNCWQPVIDYIDSKFEDYLNAESRVNRRQMPDNRVQCCLYFIAPSGHGLKPLDIEFMKRLHEKVNIIPLIAKADTLTPEECQQFKKQIMKEIQEHKIKIYEFPETDDEEENKLVKKIKDRLPLAVVGSNTIIEVNGKRVRGRQYPWGVAEVENGEHCDFTILRNMLIRTHMQDLKDVTNNVHYENYRSRKLAAVTYNGVDNNKNKGQLTKSPLAQMEEERREHVAKMKKMEMEMEQVFEMKVKEKVQKLKDSEAELQRRHEQMKKNLEAQHKELEEKRRQFEDEKANWEAQQRILEQQNSSRTLEKNKKKGKIF

SEQ ID NO: 6657 - DNA, 4118 bp, Homo sapiens
agtgcgagatccgctgctgctgaggagaggagcgtcaacagcagcaccatggcaacagaagaaccttgaaggctatgtgggatttgccaatctcccaaatcaagtatacagaaaatcggtgaagagaggttttgaattcacgcttatggtagtgggtgaatctggattgggaaagtcgacattaatcaactcattattcctcacagatttgtattctccagagtatccaggtccttctcatagaattaaaaagactgtacaggtggaacaatccaaagttttaatcaaagaaggtggtgttcagttgctgctcacaatagttgataccccaggatttggagatgcagtggataatagtaattgctggcagcctgttatcgactacattgatagtaaatttgaggactacctaaatgcagaatcacgagtgaacagacgtcagatgcctgataacagggtgcagtgttgtttatacttcattgctccttcaggacatggacttaaaccattggatattgagtttatgaagcgtttgcatgaaaaagtgaatatcatcccacttattgccaaagcagacacactcacaccagaggaatgccaacagtttaaaaaacagataatgaaagaaatccaagaacataaaattaaaatatacgaatttccagaaacagatgatgaagaagaaaataaacttgttaaaaagataaaggaccgtttacctcttgctgtggtaggtagtaatactatcattgaagttaatggcaaaagggtcagaggaaggcagtatccttggggtgttgctgaagttgaaaatggtgaacattgtgattttacaatcctaagaaatatgttgataagaacacacatgcaggacttgaaagatgttactaataatgtccactatgagaactacagaagcagaaaacttgcagctgtgacttataatggagttgataacaacaagaataaagggcagctgactaagagccctctggcacaaatggaagaagaaagaagggagcatgtagctaaaatgaagaagatggagatggagatggagcaggtgtttgagatgaaggtcaaagaaaaagttcaaaaactgaaggactctgaagctgagctccagcggcgccatgagcaaatgaaaaagaatttggaagcacagcacaaagaattggaggaaaaacgtcgtcagttcgaggatgagaaagcaaactgggaagctcaacaacgtattttagaacaacagaactcttcaagaaccttggaaaagaacaagaagaaagggaagatcttttaaactctctattgaccaccagttaacgtattagttgccaatatgccagcttggacatcagtgtttgttggatccgtttgaccaatttgcaccagttttatccataatgatggatttaacagcatgacaaaaattatttttttttttgttcttgatggagattaagatgccttgaattgtctagggtgttctgtacttagaaagtaagagctctaagtacctttcctacattttctttttttattaaacagatatcttcagtttaatgcaagagaacattttactgttgtacaatcatgttctggtggtttgattgtttacaggatattccaaaataaaaggactctggaagattttcattgaggataaattgccataatatgatgcaaactgtgcttctctatgataattacaatacaaaggttccattcagtgcagcatatacaataatgtaatttagtctaacacagttgaccctattttttgacacttccattgtttaaaaatacacatggaaaaaaaaaaaaccctatatgcttactgtgcacctagagcttttttataacaacgtctttttgtttgtttgttttggattctttaaatatatattattctcatttagtgccctctttagccagaatctcattactgcttcatttttgtaataacatttaatttagatattttccatatattggcactgctaaaatagaatatagcatctttcatatggtaggaaccaacaaggaaactttcctttaactccctttttacactttatggtaagtagcagggggggaaatgcatttatagatcatttctaggcaaaattgtgaagctaatgaccaacctgtttctacctatatgcagtctctttattttactagaaatgggaatcatggcctcttgaagagaaaaaagtcaccattctgcatttagctgtattcatatattgcatttctgtattttttgtttgtattgtaaaaaattcacataataaacgatgttgtgatgtaatattgtgtgaggtcttaaatatcctacagtcgatgtacaagagtagagtatgtttgggaagaaacttttcagcttaagtttgcctcctctacaatgacatcttttatatgcttgtctcatttagaatgcatatgtgctgattttctaatttaagagataccatatctctctattcatttctatctctcatttgtatgcttatttttctgagaacattttttttttcccccagacagggtcttgcttcattgcccaggctggagtgcggtggcacaaacacgacttgactgcagcctcaaccctctgggctcaagcagtcctcctgcctcagccccctgagtatctgggattgcaggcgtgcaccaccacgcctggctaatttttgtattttttgcagcctcccaaagttctgggattacaggcatgagccgtcatgcctggcctctgagaacagtttctgactcattcagattaggtatactctcaagtccctggaaactgaaattttttttaactgtaaagagggtagtgtcatttcttttcttaaggtcaagtgacatagattttaatgtaatgcataatttaggtaagaaattaattaatgtagcctagtttattatcttgaaatgttttaccctatttactttttaaaattaatgacctaagcggagggaataattataagtcaatagcagagagattgttgtttgggtgtttatttttttcagtttttgttttgagagattgggttaacacctctagccaaaattgtttggttttagggaggctaacaataacctactgaatttggaaaatgcaaaggtaaaaaatgtatatagactgcctgctgaactggttaagtactactgcttctgggaaatactatttcaaaattctatgtattataataataaatttgtaagacattcattattctaccatcctaatgaaaactttcagaagtctttctttatccatggcatgcccagggttttacctgaatctgatacaggatctatataactttactaggacttttgattgttgactccaggcttaggtatatcagaaggttctttttgccatttggcctgtggatgtctgagaagatcattcacaatacatgtaaaattcaggtaggcctaaggaaaggccagcctgtagaaagcaaaatggcagtgtctgttctccactgttggaggcattatgtaatttaagtatcctgttagccactgtctttctgctaattaagtggggctgaacaagtaagcactaataataccagtgaaccacttgggcaccttgtgggtagagttttgctgccacctagtggaatgggatatcattgcttccatatcaggttcacaagcaagttaagtgggcacagtttatttctgtgtagctcaggctgtaatcttgaaagctgaggagatacccatgcctctcagactcattagctgggtgtcacattaccacctgcacattctgacccaccgcatcttaatatgttttgtcctcttggagaaactaggagtagaagtcaggatatggtaggtaagggggaaaaaggaaagacggcttgatagctatgaatgcatgaggagcgaaatgttgactcagttatctagatcatggtctccaaacctgatgctatttccttacaaaaatatttgttgagcatgtgtccataattatatgtattgaacaatgaaaatatgtgtcaacaaatgtactgctacactaatgtgaacattatggaacaaaatttgaaagagtgaaataaaaggtttacactttccccaag

SEQ ID NO: 6658 - protein, 384 aa, Homo sapiens; identical to SEQ ID NO: 6656

SEQ ID NO: 6659 - DNA, 613 bp, Homo sapiens
gagtatactacataatttatagagtttttttcagtctcagttaacttaaatttaatttatagttggatgaaatatgagccaaggaaaccttaggtttaatgcatatttctaactccactcatagcagactttcaaatatttgacttaaaaatgttagattctgattagtctcctaattattatgtttatagttagcttttcattttaatgggcttcgtttttaaaatttggcttaagaattagttttatgaaatgaacaaaagagccaaagattatggatggaatatttagctacatgactagtaaacattgtagacttctgttctttgttaaatccaaatgtattgaattgatgttttgatcccatgattgctttttaaatgagaatttaaatgtggcagaaacttttaagagaatgtgtgcctctttttgctattttttaatgttgagataagactgcctccaaagtaaaattaaccaatgagactctgcttattcaaatagtcttaactacggacagcatttctcacccatggcaacagaagaaccttgaaggctatgtgggatttgccaatctcccaaatcaagtatacagaaaatcggtgaagagagg

SEQ ID NO: 6660 - protein, 53 aa, Homo sapiens
DKTASKVKLTNETLLIQIVLTTDSISHPWQQKNLEGYVGFANLPNQVYRKSVK

SEQ ID NO: 6661 - DNA, 958 bp, Homo sapiens
ggtgaatctggattgggaaagtcgacattaatcaactcattattcctcacagatttgtattctccagagtatccaggtccttctcatagaattaaaaagactgtacaggtggaacaatccaaagttttaatcaaagaaggtggtgttcagttgctgctcacaatagttgataccccaggatttggagatgcagtggataatagtaattgctggcagcctgttatcgactacattgatagtaaatttgaggactacctaaatgcagaatcacgagtgaacagacgtcagatgcctgataacagggtgcagtgttgtttatacttcattgctccttcaggacatgggtcagtaccttgatacttctgattccttttttgttgttgttgcttactgttacctttatgtgcatactttagtaatctttaagtttgtgaagtacacacaactatagccattatgaagtactaaatttcatgtagaaatgtcttagttgaaaagccattttaagtcctatataagctaacagtgattttactccttagttcttcattcataaggattttccctgcttcatgaaataaacagtgttgccaccatggtttgaggtctcaatgtggcaaatttagctttcatgttgaccactctgctactaatagaaataccaaataaagagaagcagccataccagttagacatattcaaaataaatccaaagatgctatttattataagtttcatagaaatgattatcaaaaacacttgcatgccaatgttttcttgtgccatttctttctacaataaatctatttggcttctgtttcaccttagctgtcatagacgtgttgttcaggtatcatattgtcagtactaatcttttgtttattaggacttaagacctaagaatctagacattaatctaatctgattgttctgtttgttatagttagcctgtactccc

SEQ ID NO: 6662 - protein, 79 aa, Homo sapiens
MLTTLLLIEIPNKEKQPYQLDIFKINPKMLFIISFIEMIIKNTCMPMFSCAISFYNKSIWLLFHLSCHRRVVQVSYCQY

SEQ ID NO: 6663 - DNA, 1338 bp, Homo sapiens
agataatgaaagaaatccaagaacataaaattaaaatatacgaatttccagaaacagatgatgaaaagatggagatggagatggagcaggtgtttgagatgaaggtcaaagaaaaagttcaaaaactgaaggactctgaagctgagctccagcggcgccatgagcaaatgaaaaagaatttggaagcacagcacaaagaattggaggaaaaacgtcgtcagttcgaggatgagaaagcaaactgggaagctcaacaacgtattttagaacaacagaactcttcaagaaccttggaaaagaacaagaagaaagggaagatcttttaaactctctattgaccaccagttaacgtattagttgccaatatgccagcttggacatcagtgtttgttggatccgtttgaccaatttgcaccagttttatccataatgatggatttaacagcatgacaaaaattatttttttttttgttcttgatggagattaagatgccttgaattgtctagggtgttctgtacttagaaagtaagagctctaagtacctttcctacattttctttttttattaaacagatatcttcagtttaatgcaagagaacattttactgttgtacaatcatgttctggtggtttgattgtttacaggatattccaaaataaaaggactctggaagattttcattgaggataaattgccataatatgatgcaaactgtgcttctctatgataattacaatacaaaggttccattcagtgcagcatatacaataatgtaatttagtctaacacagttgaccctattttttgacacttccattgtttaaaaatacacatggaaaaaaaaaaaaccctatatgcttactgtgcacctagagcttttttataacaacgtctttttgtttgtttgttttggattctttaaatatatattattctcatttagtgccctctttagccagaatctcattactgcttcatttttgtaataacatttaatttagatattttccatatattggcactgctaaaatagaatatagcatctttcatatggtaggaaccaacaaggaaactttcctttaactccctttttacactttatggtaagtagcagggggggaaatgcatttatagatcatttctaggcaaaattgtgaagctaatgaccaacctgtttctacctatatgcagtctctttattttactagaaatgggaatcatggcctcttgaagagaaaaaagtcaccattctgcatttagctgtattcatatattgcatttctgtattttttgtttgtattgtaaaaaattcacataataaacgatgttgtgatgt

SEQ ID NO: 6664 - protein, 106 aa, Homo sapiens
MKEIQEHKIKIYEFPETDDEKMEMEMEQVFEMKVKEKVQKLKDSEAELQRRHEQMKKNLEAQHKELEEKRRQFEDEKANWEAQQRILEQQNSSRTLEKNKKKGKIF

SEQ ID NO: 6665 - DNA, 3076 bp, Homo sapiens
atggagatggagatggagcaggtgtttgagatgaaggtcaaagaaaaagttcaaaaactgaaggactctgaagctgagctccagcggcgccatgagcaaatgaaaaagaatttggaagcacagcacaaagaattggaggaaaaacgtcgtcagttcgaggatgagaaagcaaactgggaagctcaacaacgtattttagaacaacagaactcttcaagaaccttggaaaagaacaagaagaaagggaagatcttttaaactctctattgaccaccagttaacgtattagttgccaatatgccagcttggacatcagtgtttgttggatccgtttgaccaatttgcaccagttttatccataatgatggatttaacagcatgacaaaaattatttttttttttgttcttgatggagattaagatgccttgaattgtctagggtgttctgtacttagaaagtaagagctctaagtacctttcctacattttctttttttattaaacagatatcttcagtttaatgcaagagaacattttactgttgtacaatcatgttctggtggtttgattgtttacaggatattccaaaataaaaggactctggaagattttcattgaggataaattgccataatatgatgcaaactgtgcttctctatgataattacaatacaaaggttccattcagtgcagcatatacaataatgtaatttagtctaacacagttgaccctattttttgacacttccattgtttaaaaatacacatggaaaaaaaaaaaaccctatatgcttactgtgcacctagagcttttttataacaacgtctttttgtttgtttgttttggattctttaaatatatattattctcatttagtgccctctttagccagaatctcattactgcttcatttttgtaataacatttaatttagatattttccatatattggcactgctaaaatagaatatagcatctttcatatggtaggaaccaacaaggaaactttcctttaactccctttttacactttatggtaagtagcagggggggaaatgcatttatagatcatttctaggcaaaattgtgaagctaatgaccaacctgtttctacctatatgcagtctctttattttactagaaatgggaatcatggcctcttgaagagaaaaaagtcaccattctgcatttagctgtattcatatattgcatttctgtattttttgtttgtattgtaaaaaattcacataataaacgatgttgtgatgtaatattgtgtgaggtcttaaatatcctacagtcgatgtacaagagtagagtatgtttgggaagaaacttttcagcttaagtttgcctcctctacaatgacatcttttatatgcttgtctcatttagaatgcatatgtgctgattttctaatttaagagataccatatctctctattcatttctatctctcatttgtatgcttatttttctgagaacattttttttttcccccagacagggtcttgcttcattgcccaggctggagtgcggtggcacaaacacgacttgactgcagcctcaaccctctgggctcaagcagtcctcctgcctcagccccctgagtatctgggattgcaggcgtgcaccaccacgcctggctaatttttgtattttttgcagcctcccaaagttctgggattacaggcatgagccgtcatgcctggcctctgagaacagtttctgactcattcagattaggtatactctcaagtccctggaaactgaaattttttttaactgtaaagagggtagtgtcatttcttttcttaaggtcaagtgacatagattttaatgtaatgcataatttaggtaagaaattaattaatgtagcctagtttattatcttgaaatgttttaccctatttactttttaaaattaatgacctaagcggagggaataattataagtcaatagcagagagattgttgtttgggtgtttatttttttcagtttttgttttgagagattgggttaacacctctagccaaaattgtttggttttagggaggctaacaataacctactgaatttggaaaatgcaaaggtaaaaaatgtatatagactgcctgctgaactggttaagtactactgcttctgggaaatactatttcaaaattctatgtattataataataaatttgtaagacattcattattctaccatcctaatgaaaactttcagaagtctttctttatccatggcatgcccagggttttacctgaatctgatacaggatctatataactttactaggacttttgattgttgactccaggcttaggtatatcagaaggttctttttgccatttggcctgtggatgtctgagaagatcattcacaatacatgtaaaattcaggtaggcctaaggaaaggccagcctgtagaaagcaaaatggcagtgtctgttctccactgttggaggcattatgtaatttaagtatcctgttagccactgtctttctgctaattaagtggggctgaacaagtaagcactaataataccagtgaaccacttgggcaccttgtgggtagagttttgctgccacctagtggaatgggatatcattgcttccatatcaggttcacaagcaagttaagtgggcacagtttatttctgtgtagctcaggctgtaatcttgaaagctgaggagatacccatgcctctcagactcattagctgggtgtcacattaccacctgcacattctgacccaccgcatcttaatatgttttgtcctcttggagaaactaggagtagaagtcaggatatggtaggtaagggggaaaaaggaaagacggcttgatagctatgaatgcatgaggagcgaaatgttgactcagttatctagatcatggtctccaaacctgatgctatttccttacaaaaatatttgttgagcatgtgtccataattatatgtattgaacaatgaaaatatgtgtcaacaaatgtactgctacactaatgtgaacattatggaacaaaatttgaaagagtgaaataaaaggtttacactttccccaag

SEQ ID NO: 6666 - protein, 85 aa, Homo sapiens
MEMEMEQVFEMKVKEKVQKLKDSEAELQRRHEQMKKNLEAQHKELEEKRRQFEDEKANWEAQQRILEQQNSSRTLEKNKKKGKIF

SEQ ID NO: 6667 - DNA, 1345 bp, Homo sapiens
cttgaccagagtacttccaggtagtactctgaatttacaacagggctattcaaatagtgctcatactccttatcattagggtgtctggatgaaacatacctctgcttctgatttcttaaatagttttgttttatatattgtgctatgatttagctccagcggcgccatgagcaaatgaaaaagaatttggaagcacagcacaaagaattggaggaaaaacgtcgtcagttcgaggatgagaaagcaaactgggaagctcaacaacgtattttagaacaacagaactcttcaagaaccttggaaaagaacaagaagaaagggaagatcttttaaactctctattgaccaccagttaacgtattagttgccaatatgccagcttggacatcagtgtttgttggatccgtttgaccaatttgcaccagttttatccataatgatggatttaacagcatgacaaaaattatttttttttttgttcttgatggagattaagatgccttgaattgtctagggtgttctgtacttagaaagtaagagctctaagtacctttcctacattttctttttttattaaacagatatcttcagtttaatgcaagagaacattttactgttgtacaatcatgttctggtggtttgattgtttacaggatattccaaaataaaaggactctggaagattttcattgaggataaattgccataatatgatgcaaactgtgcttctctatgataattacaatacaaaggttccattcagtgcagcatatacaataatgtaatttagtctaacacagttgaccctattttttgacacttccattgtttaaaaatacacatggaaaaaaaaaaaaccctatatgcttactgtgcacctagagcttttttataacaacgtctttttgtttgtttgttttggattctttaaatatatattattctcatttagtgccctctttagccagaatctcattactgcttcatttttgtaataacatttaatttagatattttccatatattggcactgctaaaatagaatatagcatctttcatatggtaggaaccaacaaggaaactttcctttaactccctttttacactttatggtaagtagcagggggggaaatgcatttatagatcatttctaggcaaaattgtgaagctaatgaccaacctgtttctacctatatgcagtctctttattttactagaaatgggaatcatggcctcttgaagagaaaaaagtcaccattctgcatttagctgtattcatatattgcatttctgtattttttgtttgtattgtaaaaaattcacataataaacgatgttgtgatgt

SEQ ID NO: 6668 - protein, 52 aa, Homo sapiens
MKKNLEAQHKELEEKRRQFEDEKANWEAQQRILEQQNSSRTLEKNKKKGKIF

SEQ ID NO: 6669 - DNA, 3151 bp, Homo sapiens
cttgaccagagtacttccaggtagtactctgaatttacaacagggctattcaaatagtgctcatactccttatcattagggtgtctggatgaaacatacctctgcttctgatttcttaaatagttttgttttatatattgtgctatgatttagctccagcggcgccatgagcaaatgaaaaagaatttggaagcacagcacaaagaattggaggaaaaacgtcgtcagttcgaggatgagaaagcaaactgggaagctcaacaacgtattttagaacaacagaactcttcaagaaccttggaaaagaacaagaagaaagggaagatcttttaaactctctattgaccaccagttaacgtattagttgccaatatgccagcttggacatcagtgtttgttggatccgtttgaccaatttgcaccagttttatccataatgatggatttaacagcatgacaaaaattatttttttttttgttcttgatggagattaagatgccttgaattgtctagggtgttctgtacttagaaagtaagagctctaagtacctttcctacattttctttttttattaaacagatatcttcagtttaatgcaagagaacattttactgttgtacaatcatgttctggtggtttgattgtttacaggatattccaaaataaaaggactctggaagattttcattgaggataaattgccataatatgatgcaaactgtgcttctctatgataattacaatacaaaggttccattcagtgcagcatatacaataatgtaatttagtctaacacagttgaccctattttttgacacttccattgtttaaaaatacacatggaaaaaaaaaaaaccctatatgcttactgtgcacctagagcttttttataacaacgtctttttgtttgtttgttttggattctttaaatatatattattctcatttagtgccctctttagccagaatctcattactgcttcatttttgtaataacatttaatttagatattttccatatattggcactgctaaaatagaatatagcatctttcatatggtaggaaccaacaaggaaactttcctttaactccctttttacactttatggtaagtagcagggggggaaatgcatttatagatcatttctaggcaaaattgtgaagctaatgaccaacctgtttctacctatatgcagtctctttattttactagaaatgggaatcatggcctcttgaagagaaaaaagtcaccattctgcatttagctgtattcatatattgcatttctgtattttttgtttgtattgtaaaaaattcacataataaacgatgttgtgatgtaatattgtgtgaggtcttaaatatcctacagtcgatgtacaagagtagagtatgtttgggaagaaacttttcagcttaagtttgcctcctctacaatgacatcttttatatgcttgtctcatttagaatgcatatgtgctgattttctaatttaagagataccatatctctctattcatttctatctctcatttgtatgcttatttttctgagaacattttttttttcccccagacagggtcttgcttcattgcccaggctggagtgcggtggcacaaacacgacttgactgcagcctcaaccctctgggctcaagcagtcctcctgcctcagccccctgagtatctgggattgcaggcgtgcaccaccacgcctggctaatttttgtattttttgcagcctcccaaagttctgggattacaggcatgagccgtcatgcctggcctctgagaacagtttctgactcattcagattaggtatactctcaagtccctggaaactgaaattttttttaactgtaaagagggtagtgtcatttcttttcttaaggtcaagtgacatagattttaatgtaatgcataatttaggtaagaaattaattaatgtagcctagtttattatcttgaaatgttttaccctatttactttttaaaattaatgacctaagcggagggaataattataagtcaatagcagagagattgttgtttgggtgtttatttttttcagtttttgttttgagagattgggttaacacctctagccaaaattgtttggttttagggaggctaacaataacctactgaatttggaaaatgcaaaggtaaaaaatgtatatagactgcctgctgaactggttaagtactactgcttctgggaaatactatttcaaaattctatgtattataataataaatttgtaagacattcattattctaccatcctaatgaaaactttcagaagtctttctttatccatggcatgcccagggttttacctgaatctgatacaggatctatataactttactaggacttttgattgttgactccaggcttaggtatatcagaaggttctttttgccatttggcctgtggatgtctgagaagatcattcacaatacatgtaaaattcaggtaggcctaaggaaaggccagcctgtagaaagcaaaatggcagtgtctgttctccactgttggaggcattatgtaatttaagtatcctgttagccactgtctttctgctaattaagtggggctgaacaagtaagcactaataataccagtgaaccacttgggcaccttgtgggtagagttttgctgccacctagtggaatgggatatcattgcttccatatcaggttcacaagcaagttaagtgggcacagtttatttctgtgtagctcaggctgtaatcttgaaagctgaggagatacccatgcctctcagactcattagctgggtgtcacattaccacctgcacattctgacccaccgcatcttaatatgttttgtcctcttggagaaactaggagtagaagtcaggatatggtaggtaagggggaaaaaggaaagacggcttgatagctatgaatgcatgaggagcgaaatgttgactcagttatctagatcatggtctccaaacctgatgctatttccttacaaaaatatttgttgagcatgtgtccataattatatgtattgaacaatgaaaatatgtgtcaacaaatgtactgctacactaatgtgaacattatggaacaaaatttgaaagagtgaaataaaaggtttacactttccccaag

SEQ ID NO: 6670 - protein, 52 aa, Homo sapiens; identical to SEQ ID NO: 6668

SEQ ID NO: 6671 - DNA, 1167 bp, Homo sapiens
atggctcaagaacgtcccccaattcccacagcagaaattccagttgctgcagataaagaaatccaagaacataacgttaaaatacatgaatttccagaaacagatgatgaagaagaaaaaaaacttgttaaaaagataaaggaccatttacctcttgctgtggtgggtagtaatactatcattgaagttaatggcaaaagggtcataggaaggcagtatccttggagtgttgctgaagaacacacgcaggacttgaaagatgttactaataatgtccactacgagaactatggaatcagaaaactggcagctgtgacttatcatggagttgataacaagaagaataaagggcagtttgctaagagccctctggcacaaatggaagaagaaagaagggagcaagtagctaaaattaagaagatggagatggagatggagcaggtgtttgaaatgaaggtcaaagaaaaagttcaaaaactgaaggactctgaagctgagcttggacgccgctgccgccggggtccaatgccggtcatgcccatcccgcgggggttgtgctccttccatggtccacacaccacctgcctgcatgcggtctgtgggcccgtgggcgcctcccacctggcccgcaccaagtacaacagcttcgagtacttgggcgttagcgtcctcctgtgcttccagcacaagctgtgggtgctgctgctgctgctgggccgctggcgcgtggaattccgcctggtgaacgagctgctcatctacagcatccacgtcaccatgctgctggatgggggcctgggctggtgcctcatggtcttcgtggacatcccaggcatcgtcagtctccatgtccaggagctcatccacatcaatctccagttctgggatctactcttcctggcagtcgcagaggcaccgcccccgcgcggtgccgctgtccgccttggcggccgccgggaccacgagcacgcgtcgggccgttccctgcgccgccgccttcgggaggccggccggctggctctgctccagcggcgccatgagcaaatgaaaaagaatttggaagcacagcacaaagaattggaggaaaaacgtcgtcagtttgaggatgagaaagcaaactgggaagctcaacaacgtattttagaacaacagaactcttcaaggtaa

SEQ ID NO: 6672 - protein, 388 aa, Homo sapiens
MAQERPPIPTAEIPVAADKEIQEHNVKIHEFPETDDEEEKKLVKKIKDHLPLAVVGSNTIIEVNGKRVIGRQYPWSVAEEHTQDLKDVTNNVHYENYGIRKLAAVTYHGVDNKKNKGQFAKSPLAQMEEERREQVAKIKKMEMEMEQVFEMKVKEKVQKLKDSEAELGRRCRRGPMPVMPIPRGLCSFHGPHTTCLHAVCGPVGASHLARTKYNSFEYLGVSVLLCFQHKLWVLLLLLGRWRVEFRLVNELLIYSIHVTMLLDGGLGWCLMVFVDIPGIVSLHVQELIHINLQFWDLLFLAVAEAPPPRGAAVRLGGRRDHEHASGRSLRRRLREAGRLALLQRRHEQMKKNLEAQHKELEEKRRQFEDEKANWEAQQRILEQQNSSR

SEQ ID NO: 6673 - DNA, 463 bp, Homo sapiens
ctgggctcaagcaatcctcccacctcagcctcatgagtagcttggactacaggcgattgtcagcactgttgcccgggtgctgttctgcccactgtttggagactttccaccctcgtgactgcctagagagagcccttctctgagctgagctgctgaacattctggaagacgtgtgctctgatgagtggagaaagtggagtagggcaaattgcattctaggtggagctgtcaaaaggcatccatccattcatatgtttattcatggtccctttgggttctcagatttttcagatcagctgcttggcagcttgcactttgatgttgcagtggaggctctgttcaggcttctgccccataagaaaaatcaaagcttcattccctgccgatgcattgactgggacatcatccaggtccctggggcaggaatgttattagacactcaataaatatttgttgaatcttg

SEQ ID NO: 6674 - protein, 36 aa, Homo sapiens
MSSLDYRRLSALLPGCCSAHCLETFHPRDCLERALL

SEQ ID NO: 6675 - DNA, 677 bp, Homo sapiens
gagcatggaaatgacccagctgccctgctgttgaaacagaatcctatttggaaggcagacatgtggcccatctctgtagccatcactgagaaatctggattttcaagcaatgattttcaacaattataaaatggaagttgtagactggataagagatgctcagctaagggagttcctggatggtctttagattgatacaccaatcctctgaaattgcatgcaaaaatggcctttctctctgttgcccaggctggagtttagcgactcaatcatggctcactgactgcagcatcgacctccggggctcaagtgatcctttcatctcagcctcctcagtagctgagactacaggtgacttcccaagtatgcctggccacaatacctccaggaattcctcttgcgatcctatagtgacaccccacttaatcagcctctacttcatagtgcttattggcgggctggtgggtgtcatttccattcttttcctcctggtgaaaatgaacacccggtcagtgaccaccatggcggtcattaacttggtggtggtccacagcgtttttctgctgacagtgccatttcgcttgacctacctcatcaagaagacttggatgtttgggctgcccttctgcaaatttgtgagtgccatgctgcacatccacatgtacctcacgttccta

SEQ ID NO: 6676 - protein, 165 aa, Homo sapiens
MVFRLIHQSSEIACKNGLSLCCPGWSLATQSWLTDCSIDLRGSSDPFISASSVAETTGDFPSMPGHNTSRNSSCDPIVTPHLISLYFIVLIGGLVGVISILFLLVKMNTRSVTTMAVINLVVVHSVFLLTVPFRLTYLIKKTWMFGLPFCKFVSAMLHIHMYLTF

SEQ ID NO: 6677 - DNA, 412 bp, Homo sapiens
atctctgtagccatcactgagaaatctggattttcaagggcctttctctctgttgcccaggctggagtttagcgactcaatcatggctcactgactgcagcatcgacctccggggctcaagtgatcctttcatctcagcctcctcagtagctgagactacagacatggataaaagaaatccctgtaaaaggcagcttaactggatgtttccctccaatggcaaagtgactctcaatgggccaagagatctcattatgttacccaggctggtctcaaactcctgggctcaagcaatccttctaccttggcctctcaaagtgctgcagttacagatgtgagccactgtgcctggcctgatgttaatttataatgctttcctatgaataaactgttaaaacactttagtcaatgt

SEQ ID NO: 6678 - protein, 57 aa, Homo sapiens
MDKRNPCKRQLNWMFPSNGKVTLNGPRDLIMLPRLVSNSWAQAILLPWPLKVLQLQM

SEQ ID NO: 6679 - DNA, 478 bp, Homo sapiens
gtagccatcactgagaaatctggattttcaagcaatgattttcaacaattataaaatggaagttgtagactggataagagatgctcagctaagggagttcctggatggtctttagattgatacaccaatcctctgaaattgcatgcaaaaatgttttcctgggatcagctgcactccttagcaaaagtatattggagaatcaactgagaaagtaactgagacatttcaatcatttctaggtgtaaagaaagaccagatcccaggaaaatattacggtgacttcccaagtatgcctggccacaatacctccaggaattcctcttgcgatcctatagtgacaccccacttaatcagcctctacttcatagtgcttattggcgggctggtgggtgtcatttccattcttttcctcctggtgaaaatgaacacccggtcagtgaccaccatggcggtcattaacttggtggtggtccacagc

SEQ ID NO: 6680 - protein, 36 aa, Homo sapiens
MVFRLIHQSSEIACKNVFLGSAALLSKSILENQLRK

SEQ ID NO: 6681 - DNA, 918 bp, Homo sapiens; identical to SEQ ID NO: 862

SEQ ID NO: 6682 - protein, 305 aa, Homo sapiens; identical to SEQ ID NO: 863

SEQ ID NO: 6683 - DNA, 2336 bp, Homo sapiens
aaagtacctatctagggaggagccaagatggccgcataggaacagctccagtccacagctcccagcgtgagcgacgcagaagacgggtgatttctgcatttccatctgaggtaccgggttcttctcactagggagttccagacagtgggcgcagcaggcttttcttcttggagctgaaacaggcgcactggcgagggttgtgaggaaaggtttgcagccccctgccttggtctgctatagccagtgacacgatcaataccagggtgagcagcagaggaagctcagggaagattatgaagatgagaattcattacctatcaaagaaaatgcgtaaactctagaagtattgcttgctcctttgccacaaagtgtacattcaagagtaaattgtttaaagccaaagggccttgcgccacgtccttagcctcagctttctacttgctaaaatggaaataacaacagtacctaccttacagacctggcgtgaggattaaattataccagcaaagtgcctggcacctagaatttgcctgagttctgatcaatgctaaaaacaccatttaacagtgccctttcctgcctgggaagcccacaaagatttcgcttttcacttattactcatcaaactgactctggttcacagtggaaaagagaagaaaagctgatggagaaatggcagtgaagaaggagaacaaaatgtcagagcaatacttttgagcgactatatcctctgttctgcaatatttgcaaaagtcagtctatagacgtgaagccaacagggaccctcaggcctgtgcatcaggatggtgggctgcctaagtcctctggggacagcagtgccagaaggagtattggacacagtgacccgactgtatgagatgagaaaaaacaaaaacaggaggtccgcagtactgatgaactaatctgtcactcacaagctcaggtctgcaaaaaaaagaaacgaagcactaaacatggccataagagatggaaatgcaagtcttcatttctaaatgataatcaaaccaacgatcagaaactgattaactgtgtaattgaattgaattgaaaatcatcccatgaataacaatccatcctaccttcaaggggttaggaagctaactacaggtaattgctatcagaaatctgatttgatttccaaaaattgtgtgaatgaaccaagtttcttcatcttgatatactaggcagggagtttgttcttccaagtactagactgcttaattgcttgcttgggggaggagaaatcctaggggaaaggcatatatgagcaatttctactctgtgaagccagcgctgtgtcctgagctggatcatggccagaaacagaaaagtctactcttccctacagtggaagcaactgtggatatttcatcctaggagtgaatgaaaaaacctaaagctcatacttcatgggaatctttcaatattctgactgaaaactggttatttgctcctccaacccaaagccatctaggaacagcactcagaacaggaaaaaaaaaagacaaaaataataattattccaaaacgtatttgagcagaaacaaacacaaacatttgcattattaaatgggcttgttcacacctgctgagtagatataagacgatatttaagacaagagctaaaaaataaaccatccctttctggttttgagtgacagcagagcaataaaaattattttcacattcttttccctattgttagaagtaatcatttgagtaaatacacttatctgtgctgtaactattgaaatgaatccacttcaaatatgtataccacctttcttttttatatttctagatatggtttcaatatagactttctgacttttatggtatacatataggacaatattctattcttctttccttttaaatacttactgtttcaatttcaaataaaaaatcagcattctagtttgtacattttagcacagaaatgtttacaaccttcagcacaattgcttttgtaatttactgacttggcattttgaggcgtttttaacaaattatgagaaataacaccttcagaaagcatgtgactactttgatgcaactatttacaatgtattcataagaagtcattaacctgtagagttcttagacatgtggaacctttaacaattatactaaagagtacatacaaaatacagagctatgtaataataactaattttaaatcctgacaaattagaagttaagcctactatctgtaaaaatatgtcctgattcatttttttaagtatatacctgagcctttaaaaagtatatgcctttacaattgatttccaataaacaatactgaataacaaact

SEQ ID NO: 6684 - protein, 45 aa, Homo sapiens
MLKTPFNSALSCLGSPQRFRFSLITHQTDSGSQWKREEKLMEKWQ

SEQ ID NO: 6685 - DNA, 2536 bp, Homo sapiens
gctgaaagaatgttcttataatgatccaagaggaagtggcaaatgagtgctcttcttcaggatccaatgatagctggacaagtcagtaagcccttgctgtcagtgcggagtgaaatgaatgcggagttgagaggtgaggacaaggctgctacttcagacagcgagctgaatgagcccctgcttgcgcctgtggaatcaaatgacagcgaggacactcccagcaagctcttcggggctagaggaaacccagcattatcagacccaggcactcctgaccaacaccaggccagtcagacccaccccccatttccagttgggccacagccacttctgacggcacagcagttagcttctgctgtggccggcgtgatgccgggaggccccccagccctcaaccagccaatcctcattcccttcaacatggcgggacagctaggaggccagcaaggactggttctcacactgccaacagcgaatctcaccaacatccaagggctggtggcagcagctgcagccggaggcattatgactctgccactgcaaaatctacaagctacctcatccctgaactcccagctccagcagctccagctccagctccagcagcagcagcagcagcagcagcagcagcctcccccgtcaaccaaccagcacccgcaaccagccccacaggcgccctcgcagtcccagcagcagccgctgcagcccaccccaccccagcagccaccacccgcctctcagcagccgccagctcctacatctcagctgcaacaggcgcctcagccccagcagcaccaaccccactcccactcccagaaccagaaccaaccatctccaacccagcagagctccagccccccgcagaaacctagtcagtctccaggacatggcctgccttcaccgctcacgccacccaatcctctacagctggttaataatccactagcaagtcaggctgcagcggctgcagcagccatgagctccatagcaagctcacaggcctttggcaatgccctctccagtcttcagggggtcacaggtcaactagttactaatgcacaaggacagattatcgggaccattccactgatgcctaatccagggccatcgagccaagcagcaagcggcactcagggcttgcaagtgcagccaatcaccccccagctcctcacaaacgcccagggccagatcatcgccacagtcattgggaaccagatcctgcccgtgatcaacacccagggcatcacgctgtcacccatcaagcccggccagcagctccaccaaccctcccagacgtcagtgggtcaagcagcctcccaaggcaaccttctgcacctggctcacagccaagcatccatgtctcaaagtcccgtccggcaggcttcctcttcttcctcctcatcctcctcttcttcagctttgagcgtgggccagttagtcagcaatcctcaaacggcagcgggtgaggtggatggggttaatctggaggagatccgagaatttgccaaagcttttaaaatccggcgcctgtcccttggcctgacccagactcaggtgggacaggctctcagtgctacagagggccccgcgtacagccagtcggccatctgcaggtttgaaaagctggacatcacccctaaaagtgcccagaagatcaagccggtgcttgagcggtggatggctgaggctgaggcccgccatcgagcaggtatgcagaacctgaccgagtttatcgggagtgaaccatccaaaaagcgcaagcggcgcacctccttcacaccccaggcccttgagatcctcaatgcccactttgagaagaacacacacccttctgggcaggaaatgaccgaaattgctgagaagctgaactatgaccgagaagtagttagagtttggttctgcaataagaggcaagccctgaagaacacaattaaacgcttaaaacagcacgagccggccacggcagtccctttggagcccttaacagactctctggaagaaaactcctaaagagatgcccacccataatcagaagcaaaattcacagaaactaaactccacccttgggactccacaacaacaacaacaacaaaatttaatttaatttaaaaatagccccagtcgtcatcacccttgtaagtaaatgactaagaaaactaccaagtggacagaatggtttctacatgtccgttggttttccaaaaaggaaagaagaaaatttttagaaaatttttaaacaaggaatacaccacactgaaggtgtgtgtggtaggatagttcccttcccccacctgtctcccccaaagccagttttttaatggacttaaagcaaaccaaataaccacgtacttttttctgtatattatgaaaatgtgaacacattttaaggaaaaagaaaaaaaaaaactaaaccaaaaaccaacaacgaaggaacaaaaactttgatctgttcaaagcgaatacaagcctgccacctggaggaaggactgcaccccttcaggtactaagtgctgattcactatgaaacctattaacc

SEQ ID NO: 6686 - protein, 655 aa, Homo sapiens
MSALLQDPMIAGQVSKPLLSVRSEMNAELRGEDKAATSDSELNEPLLAPVESNDSEDTPSKLFGARGNPALSDPGTPDQHQASQTHPPFPVGPQPLLTAQQLASAVAGVMPGGPPALNQPILIPFNMAGQLGGQQGLVLTLPTANLTNIQGLVAAAAAGGIMTLPLQNLQATSSLNSQLQQLQLQLQQQQQQQQQQPPPSTNQHPQPAPQAPSQSQQQPLQPTPPQQPPPASQQPPAPTSQLQQAPQPQQHQPHSHSQNQNQPSPTQQSSSPPQKPSQSPGHGLPSPLTPPNPLQLVNNPLASQAAAAAAAMSSIASSQAFGNALSSLQGVTGQLVTNAQGQIIGTIPLMPNPGPSSQAASGTQGLQVQPITPQLLTNAQGQIIATVIGNQILPVINTQGITLSPIKPGQQLHQPSQTSVGQAASQGNLLHLAHSQASMSQSPVRQASSSSSSSSSSSALSVGQLVSNPQTAAGEVDGVNLEEIREFAKAFKIRRLSLGLTQTQVGQALSATEGPAYSQSAICRFEKLDITPKSAQKIKPVLERWMAEAEARHRAGMQNLTEFIGSEPSKKRKRRTSFTPQALEILNAHFEKNTHPSGQEMTEIAEKLNYDREVVRVWFCNKRQALKNTIKRLKQHEPATAVPLEPLTDSLEENS

SEQ ID NO: 6687 - DNA, 528 bp, Homo sapiens
atccaatgatagctggacaagtcagtaagcccttgctgtcagtgcggagtgaaatgaatgcggagttgagaggtgaggacaaggctgctacttcagacagcgagctgaatgagcccctgcttgcgcctgtggaatcaaatgacagcgaggacactcccagcaagctcttcgccttgatcctcattggaatctgatacaggagtgccaggactggtgagaatcacataaactggagaaattggccatactctcgttcaaggctaatcagagaggcaaatgatgaccctacaatttcagaaataatgtttgcatcatttgtggttgagctttggcatgtgagcgagtgttcctaaagtggaaccagtgtgtaccagcccagcacaaagtcagcactcagcatttgtcaccgtgtgaggtatggcaaggaagagcagctcctttcagactcaactgtagctctaagtgaaatcaatggccgaacaatctaacacaattggtcacatattgatagaattaaacactgctgtt

SEQ ID NO: 6688 - protein, 62 aa, Homo sapiens
MIAGQVSKPLLSVRSEMNAELRGEDKAATSDSELNEPLLAPVESNDSEDTPSKLFALILIGI

SEQ ID NO: 6689 - DNA, 838 bp, Homo sapiens
gcgaggagccagcggcttctcccatcacagtggttcccaccgttgtcttagaaaccagtccccgaggcttggcaaagcaggagccctccatggaggtgcttgggtgtcggggcaaaccccaggcggagtccgggggaagcagcacggcatcccagcctcaggcctgcccggacggtgttggttgggctacattgaggccaggtgcagtggctcacacctctaatcccagttctttgggaggctgaggccagcggatcacgaagtcaggagatcaagaccatcctggacaacacggtgaaaccctgtctcttcaaatatacaaagaattaaccagagaagcagggaatctggaattttgggtgaaatgtctgtttccagaagctgaaaatgctctcaaatggaaaattcagggtcagaatggcctggggtactgcacacttcctgccaggaatagaaggccccacagctataggacctctcttccgtttagttctttggaaggatgagcaaattattcagcctctctgagcctcagttttctcatccataaaatgaggacagtacaccaacctcgcaggtcacaaggatgttatgaaatcagagtgcagtgaatagaagacacttctctgcaccccaaaagctccatgctgattgcgagaaggaaatgctggatggaggggttcctggaactactgtgagggaaatggtaacagaactttggatgtggaacgtgcagtaggagttacacgaagtgcgggtctgcacttggggtggtcagcacggcggatgcccagcaaacgcactgcctggtccacatcccggagtggtctctacgccc

SEQ ID NO: 6690 - protein, 51 aa, Homo sapiens [sequence omitted]

SEQ ID NO: 6691 - DNA, 5811 bp, Homo sapiens
actgttgcccggggatgggtttctgagactttgcgaagtaggagccccgtgtgatagtgcgtcagggtcaagtctgagagcagtcctggccagggcattaacaggatggtctccggagcctgggattctcggagggtcgaccaccaggaagaaacctcacaaggaagaaacctcaggcggatcacctgggcggcagcgcgagatcccagcctcaggcctggattcggggagagttgacgaggcctctctcccaatcttcacttcacccgccgccgccctactcccgcagccgccgctccacggtcatttttcttttctttctttttttttttttttttttatagtcagagtctcactctgtcgctcagtcgagtgcagtggtgggatctcagctgactgcaaactctgccgcctgtgttcaagtgattctcttgcctccgcctcccgagtacctgggactacagggattagtcagagtcggggctaagaccagtcatggccggggctaagaccagtcatggccagggcatcaacaggatagtctctggaggccgggattcacggagggtcgtccaggaggaagaagctgcgggcggagggccggggaagcagtgcgggatcccagcctcaggcctgcacggacagtgtgccagtgagtctcttcaaaaaaggagaggttttcttgtgtgcccctgggctgctctctcaccagtgggttgtagtcgtggagagcagaaccctgaaaattcaggggctacctgggggtaggtgttaccgtgccactgctgtatgtctttgtgcgtttgtgtgtgtacgtatatctctctcttgtttctctctctcccctttctcactcttttgctctgtgtccgtctgtgtgtgcgtgttgggacacatgtgccctgtgcgccagagggtggtattttctacgtcctcctttcttgtggtcagcctctccccgcgtctctgcctggcttgtgtggccggttgtcagtcatttttccggcggttccagtttaggtttgtgaaggtccagatgaggtggggagctgcgtctctctcataagaatttaaatcgcctccccaccctgaaaggcctcttttctaggattaaggcctccaccccccagccaaggataatagccttaccggagaggtcgttgtctacctgcaggaacagtgcagagcaccctgaaagaagatggttctcattcgtctctctctttcatctccttgagaaatctagccacagggtaacacaggttttgagaggatgggacgtggcaaggatctgtgagtgtgcaggctgtgtttcacatatcattaaacatagtctagtgagggttctgcagatagctggcatttaagtttgttttattgaatcaaggaaaagaaaaaatgctaagaaaaaaaatgacacaacttgcctgccagcccatctgactgttacaaatttaatagtaattttaatttatcttctcatgtaaaggtctttggcagtgatacctaatttcctaagatagccttgctttatattgtatgattaagatgtcatgcatatcagagtatctggaaattcttcccaacgtccttgacatacgtgattaatcacatttccaaaataacataccaaaacgcataacagaaaatcattttaagttgtggttccttcatgcacaaaacatttcatgtgtgtctggcactcttccggccacagatttcatcttaacctaagtattgaaatgcttgtgccctttgattaatttttctatgtaaatactttgataataagctacattgaggccaggtgcagtggctcacacctctaatcccagttctttgggaggctgaggccagcggatcacgaagtcaggagatcaagaccatcctggacaacacggtgaaaccctgtctcttcaaatatacaaagaattaaccagagaagcagggaatctggaattttgggtgaaatgtctgtttccagaagctgaaaatgctctcaaatggaaaattcaggtaaggttggggaagatgtcaggtgatagaatgtaccctgcctctgacagcatccaatctggagcaaaggcttctttcaaccctcccccaaactcccaatacaagcccaagttctggaacaagtactttccaacacctccttcagagaagctccctggctccaggcagtgcttggtcccctcactgcagcaggaagcccagcttgtgaactgcaggtgtgctccaggtggttgctggatgcagggtattgatagatggatctcatcgatacccccactgcataaccatgtaagcatatcatcccccacttgcacatgaggaagcgaaggtccacagggtggggaagggaagacataatctgtccttcaaatgcgatactggtgagatgtgagaggcagcattcctcataactcagcgaggcagtgggcataccaggaccctcccaggcagatcgggtgtgtggttggccccattgcatagcatgggagggagtgtgggagaccacacatgggtcttgcaacctctccactggcctgacctccctgcagaccccaaggacagggttaagcatctgcttgctggcaggcctggacaccagaggtctttgcttatgtctaaggtccctgtagttgtggttcacaggatgggggctgctcctgagattcagcaccacacaggcactgcacagcactgtgccatggtggtggcactcactttccagatagggcccatgttgccagcaggcatgatgcatcatttaccctaccctgagtgcaataggtggttttatagaaaaaaacttgggccagacgcggtggctcacacctgtaatcccagcactttaggaggccaaggtgggcggatcacaaggtcaggagctcaagacaagcctggctaatatagtgaaaccttgtcagcatgaaaaatacaaaaattagccagatgtggtggtgggcacctgtagtcccagctactcgggaggctgaggcaggagaatcgcttgaacccaggaggcggaggttgtggtgagccaagatcatgccactgcactccagcctaggcaacagagcaagactccatctcaaaaaaaaaaaaaaacaaaaacaaaaacaaacaaaaaaaaaaaaacaaaagaaaaggaaaagtatttgtagatgaatgaaggtgactcctttgaatattgaaaatgattttattgtagccattggtctggcactcattctgatggggtgacatgtgtccctgccttagccagcagagcacaggagtgtgctacacctcccctcatctgaagattcagcccatgagcaggaatgcctgtctttgtgtcatatcaacacagaggatgtgtctggtttcaccattcactgcagaggcagaaattacccagaaagaagagatagtctgttcctgggagtgtgtccttttgacccagcatgggggtcatctcccttccttggccaggacccccaacctgaacacagaggcagagaacatgtgaagggctcccattcccaggtggtccagggtgcaagctctgagcctgtggtcctggtcactgcccttttctccacagcatggctgccaccatcctgggctggggcacagcggggctttgcagagatcagaataacaaaagcattactgagatgctgcaataggagactgtgataccttcgtgggctgccaaggcagcctaagctatttcttgctgcacccagtgtccccccagacagctgtgtggctgtcactgcctctcttgtgtccattttacttctcttctccttcctgagcttctgctctgaactctgtctctaacttacaagaaatcaagctcactggattctgagctcttcagtgtcaaggactgtgtcagtagttcatatctctttctagagatcacagtttagtatctggcacagagcagatactcagtcaatgccaaatgattcatttgccagaaagctgaatttcatccataatgctagtcaatgcaaatacattctgccagtggggtgtgtttgtcctctgaaggcgttttcccaggctttgtaaatacatacacgccatttagaaatttgaatgtcaaagagtaaaggagcttagaaagtaaacattggagaagtgtgggagggtggtgttatttgcaaaacattcctgggtccttgtgagttctatacaccttcgatgagcaccgattctgggccaggccagacacccagctggacccaggagatactgaggtgagtaaagccaaaatgcctcccttcagcaggaggcaggcagtcacaccaaagtgataaaggcacaaaacccagaggcagcagaggagcaaagactgccttgttccaggactctgtgacctcagggagagctttcagaggaggacatctgtgcagggcttggaaggatgaacacaaatttgcctagcagaaaagggagccaaggaaatcctgatggagaacagcttgggtgagagtgtgagtcacaggattgaggggtgcaggcatggaactggaggagcagaaagaatgaggggggataaagttgggaggtcagcagaggtcagtcacagaaggttttgaatcctggtgagggagcagtgggtgctgcacaagggacatggacctggagaagatgcagttagctttgagtgaagatggagcatgccatccactaaggaaccacaagatgcaatagaaataagaaccctgagaagcctgcacaaaggatgagaggcccaggggtagtgccaagaaggtccctgtcagaggccagctttgaacagagacagaaaagactcttgagggcctcagctgctgcaaacctcctcaacaaatcatattttaccttcaaatatttgctaaagaatactaactattggaagagcaatggtccattgataataattattccctcactgtacattttttacaattctcaaaatgctctgggtccagtgtctcattggaacccccataaaatcccattttacaaatagggaaatgaggccctgtgatgtcatgccgaggtttgcagcagttccaggatagaaaatagggagcactttcatctcagccctgggtataagtctcaaagttccttttctgggaggggatccttgaggccatccagcagcccatagtctgagtcttcttcttcctccttgggcttctccacacctgtgtccaaagcctccttctcctcctttgttctcaggtaccactaccagttgttgggcagggagacctcccgctgctgcccatcctagggtgcatcctccaacatgggtgcattttggttcagccagcacctacaccacctgcagcccaggtctcctgtggtgggcctgagcttcctccctatcaaatggaggtgttttggggttgctacctttgctgaagcccatgtccaggtcatcttggaggtggccaagggtacagggccctggggacaggtcagagggctgcaggggcaaaaaccacgaggatgaggggatctctaagtcagactgcctggatccacatcccagagactagctgcaaggcctggggaagactgattcacctctctgggcatcagtttcctcccctgtaaagtgggaggtataacagattcactcctacagttgtctctgagctttacagcaggtaatgtgtgcaaagtactttgcacaatgcctggcacatggtaggtgataataaatagggttactatgatatcatcatctgagctaggtcactcatgcacttctccaatgcttcagggttcccctccatccctcacagggtagca

SEQ ID NO: 6692 - protein, 138 aa, Homo sapiens
MGGSVGDHTWVLQPLHWPDLPADPKDRVKHLLAGRPGHQRSLLMSKVPVVVVHRMGAAPEIQHHTGTAQHCAMVVALTFQIGPMLPAGMMHHLPYPECNRWFYRKKLGPDAVAHTCNPSTLGGQGGRITRSGAQDKPG

SEQ ID NO: 6693 - DNA, 510 bp, Homo sapiens
ccaggagccgaccaggatgaggaaaccacaggcgtagtccgagggtagcagcacagcatctcagcctcaggcctgcccggatgatgttggggatcaagatgaacacactgcagccaaggacaagagccccagaggagctctttgtcctgcaggagagggccggacacacgtcagagaagatggttgtatcttttcacggctcttctctgagaaatgaagccacaccatgttacagtctggaagaggaagccgggaatgggagatggcaacaatccctgtcattggaacgctggcctctctggacaagccacccttttggaaccccttcccttatgcctgtggcggtggcatggtgctgtatcctgcctgggctctgggctctggcctctgctctgtcctccctcttgctctccctaccctgtttctcaggggcctggatgcctctcgctctggtcaaatgtcttcaacaaagatgacttcccagtctgtcagggagacacttcctggaga

SEQ ID NO: 6694 - protein, 131 aa, Homo sapiens
MMLGIKMNTLQPRTRAPEELFVLQERAGHTSEKMVVSFHGSSLRNEATPCYSLEEEAGNGRWQQSLSLERWPLWTSHPFGTPSLMPVAVAWCCILPGLWALASALSSLLLSLPCFSGAWMPLALVKCLQQR

SEQ ID NO: 6695 - DNA, 560 bp, Homo sapiens
ccggatgccaggagtcacaaagggccgaccaggatgaggaaacaccaggcggagtccggaggaagcagcaccgcatcccagccccaggccttcccggacggtgttggttgggagtgcagtgaatagaagacacttctctgcaccccaaaagctccatgctgattgcgagaaggaaatgctggatggaggggttcctggaactactgtgagggaaatggtaacagaactttggatgtggaacgtgcagtaggagttacacgaagtgcgggtctgcacttggggtggtcagcacggcggatgcccagcaaaggcactgcctggtccacatcccggagtggtctctacgccccagtcggcatcgcagctgatggtgaaacttttggtgtggcagaagagtgtccacaaactttggaagttgctagagaaaaatgaaacgactagttttgaaagccttacttctgccaatggaagcacattccagcatgtcgccaacgcaatccattttccaccactttcacaagaaaagttacggcacaattatactatcctacccttatata

SEQ ID NO: 6696 - protein, 63 aa, Homo sapiens
MVKLLVWQKSVHKLWKLLEKNETTSFESLTSANGSTFQHVANAIHFPPLSQEKLRHNYTILPL

SEQ ID NO: 6697 - DNA, 393 bp, Homo sapiens
ggaaaagcgtggaatttagaagcattgctcgctccttcagtttctaacaatctggttcccactgctccccgctgcagacagcccatagctggttgcatcttgtcagaggcaaacacccggagatggagatgtgtgtctcagtcctaagcccaagtctccagagaagggcatctggagggccctccagggtccatcccaacccaaatcttctgtagtcaagaacaaggagccagtggtgcagacacagatgcagttccatcgcttgggccccaccaaggagagaagaagttctcagagactagagtggaggatggagacaggctgggcccacacccccatgccccacaggtacctactacgactccccagaaataaacatttccccagtcctga

SEQ ID NO: 6698 - protein, 47 aa, Homo sapiens
MQFHRLGPTKERRSSQRLEWRMETGWAHTPMPHRYLLRLPRNKHFPS

SEQ ID NO: 6699 - DNA, 418 bp, Homo sapiens
ccggtgggctccggcggctgcgccgcggcggacaaagatgctgaaggccaagatcctcttcgtggggctttgcgagtctggttcccactgctccccgctgcagacagcccatagctggttgcatcttgtcagaggcaaacacccggagatggagatgtgtgtctcagtcctaagcccaagtctccagagaagggcatctggagggccctccagggtccatcccaacccaaatcttctgtagtcaagaacaaggagccagtggtgcagacacagatgcagttccatcgcttgggccccaccaaggagagaagaagttctcagagactagagtggaggatggagacaggctgggcccacacccccatgccccacaggtacctactacgactccccagaaataaacatttccccagtcctg

SEQ ID NO: 6700 - protein, 67 aa, Homo sapiens
MLKAKILFVGLCESGSHCSPLQTAHSWLHLVRGKHPEMEMCVSVLSPSLQRRASGGPSRVHPNPNLL

SEQ ID NO: 6701 - DNA, 2104 bp, Homo sapiens
agaggcggaagtaaaagcgaactacagtggatgggtgcagttcaggcatttcaaaaggtttgaactacctaaccattatggcaccaggaaacctctggcatatgagaaataactttctctttggttcaagatgttggatgactcgattttcagcagaaaacatcttcaaatcagtttcatttaggctttttggtgtgaagtgtcataatacagacagtgagcctttgaaaaatgaggacctactgaaaaacttacttactatgggagtagatattgacatggcaaggaaacgacagcctggagtttttcataggatgattaccaatgagcaggacctgaagatgttccttctttccaaaggagctagcaaagaagtgatcgctagcatcatatcaagatatccacgagcaataacacgtactcccgagaatctttcaaaacggtgggatctgtggagaaagattgtgacatcagaccttgaaattgtaaatattttggaacgttctcctgaatccttttttcggtccaataacaacctaaacttagagaataatataaagttcctctactcagttggattgacccgtaaatgcctttgtcgattgttgaccaatgcccctcgtaccttctccaatagtcttgatctgaataaacagatggttgaatttttgcaggcagccggtttgtcattgggtcacaatgatcccgcagattttgtcagaaagataatttttaaaaacccttttatcttaattcagagcaccaagcgggtgaaagctaacattgaattcttacggtcaactttcaatttgaacagtgaggaactgctggttctgatatgtggtccaggagctgaaatcctagacctttccaatgactatgccagaagaagctacgcaaacatcaaagagaagctgttttctcttggatgtactgaagaagaggtacagaagtttgtcttaagctatccagatgtgatcttcttggcagagaaaaagtttaatgataaaatagactgcctcatggaagaaaacattagcatttcacaaataatcgaaaatcctcgggttctggattcaagcataagtactttaaaaagtcgaatcaaagaattggtaaatgctggctgtaacttgagtactttaaacatcactcttctatcttggagtaaaaaaagatatgaagctaaattgaaaaagttaagcagatttgcctaaggatgccaatgtttttaattctcaggaactgtgaatatgttatgccacattgcaaaagaattttgcagaagtgattaatttaaaatgttattaagggccttgagatggggagattatcctgaattactttggagggcctaatataattgtagggatctttaaaagttgaagagggaggcaaaagaggaggtcagagtgatcctgtataagaaagacaactacttttgaaggaagttaaaaggtggctttgaaggaggaagacaccttgagccaaggaatgaagggggcctgtaaaaaaagattgaaaaggcaaggaaacagattctccattagagtccccagaaaggaatgcagccttgctggcacctttttagcccagtgagatcaatgtcaaacttctgacccacagaaccataagatggtaaatttgtgttgttttaaaccactgagtcagtgataatttgctgaagaagcaaatagattaacatagcaactaagtagatgattagttgcattataggtgaagtcaaaaatacagtcctttagtaaagtctctatttcttccttttataagagtaattatatttaaaaaatctacctacccttctggaattgctaatgttagtgtttataaagtcttaaatgtgtgcataaaaaactaaatgtgaatataaaatctaaataaaggaatatgtttgcctaatatagtttaaggaaatgataatcatttctgtgcattttgttggcatttcagctaatattaaagagtaattttcagaggcattgacttaaaaaatggcaaatcagataatgtcggtattttcaagatacaatctagctctgacataaactgaaagacgtgagacaaattatatgaccttaatttt

SEQ ID NO: 6702 - protein, 379 aa, Homo sapiens
MAPGNLWHMRNNFLFGSRCWMTRFSAENIFKSVSFRLFGVKCHNTDSEPLKNEDLLKNLLTMGVDIDMARKRQPGVFHRMITNEQDLKMFLLSKGASKEVIASIISRYPRAITRTPENLSKRWDLWRKIVTSDLEIVNILERSPESFFRSNNNLNLENNIKFLYSVGLTRKCLCRLLTNAPRTFSNSLDLNKQMVEFLQAAGLSLGHNDPADFVRKIIFKNPFILIQSTKRVKANIEFLRSTFNLNSEELLVLICGPGAEILDLSNDYARRSYANIKEKLFSLGCTEEEVQKFVLSYPDVIFLAEKKFNDKIDCLMEENISISQIIENPRVLDSSISTLKSRIKELVNAGCNLSTLNITLLSWSKKRYEAKLKKLSRFA

SEQ ID NO: 6703 - DNA, 2181 bp, Homo sapiens
ctagccgctccggaccccagaggcggaagtaaaagcgaactacagtggatgggtgcagttcaggagatagctgttctccagcctttctggagggatgcagagcctttccttaggacaaacaagcatttcaaaaggtttgaactacctaaccattatggcaccaggaaacctctggcatatgagaaataactttctctttggttcaagatgttggatgactcgattttcagcagaaaacatcttcaaatcagtttcatttaggctttttggtgtgaagtgtcataatacagacagtgagcctttgaaaaatgaggacctactgaaaaacttacttactatgggagtagatattgacatggcaaggaaacgacagcctggagtttttcataggatgattaccaatgagcaggacctgaagatgttccttctttccaaaggagctagcaaagaagtgatcgctagcatcatatcaagatatccacgagcaataacacgtactcccgagaatctttcaaaacggtgggatctgtggagaaagattgtgacatcagaccttgaaattgtaaatattttggaacgttctcctgaatccttttttcggtccaataacaacctaaacttagagaataatataaagttcctctactcagttggattgacccgtaaatgcctttgtcgattgttgaccaatgcccctcgtaccttctccaatagtcttgatctgaataaacagatggttgaatttttgcaggcagccggtttgtcattgggtcacaatgatcccgcagattttgtcagaaagataatttttaaaaacccttttatcttaattcagagcaccaagcgggtgaaagctaacattgaattcttacggtcaactttcaatttgaacagtgaggaactgctggttctgatatgtggtccaggagctgaaatcctagacctttccaatgactatgccagaagaagctacgcaaacatcaaagagaagctgttttctcttggatgtactgaagaagaggtacagaagtttgtcttaagctatccagatgtgatcttcttggcagagaaaaagtttaatgataaaatagactgcctcatggaagaaaacattagcatttcacaaataatcgaaaatcctcgggttctggattcaagcataagtactttaaaaagtcgaatcaaagaattggtaaatgctggctgtaacttgagtactttaaacatcactcttctatcttggagtaaaaaaagatatgaagctaaattgaaaaagttaagcagatttgcctaaggatgccaatgtttttaattctcaggaactgtgaatatgttatgccacattgcaaaagaattttgcagaagtgattaatttaaaatgttattaagggccttgagatggggagattatcctgaattactttggagggcctaatataattgtagggatctttaaaagttgaagagggaggcaaaagaggaggtcagagtgatcctgtataagaaagacaactacttttgaaggaagttaaaaggtggctttgaaggaggaagacaccttgagccaaggaatgaagggggcctgtaaaaaaagattgaaaaggcaaggaaacagattctccattagagtccccagaaaggaatgcagccttgctggcacctttttagcccagtgagatcaatgtcaaacttctgacccacagaaccataagatggtaaatttgtgttgttttaaaccactgagtcagtgataatttgctgaagaagcaaatagattaacatagcaactaagtagatgattagttgcattataggtgaagtcaaaaatacagtcctttagtaaagtctctatttcttccttttataagagtaattatatttaaaaaatctacctacccttctggaattgctaatgttagtgtttataaagtcttaaatgtgtgcataaaaaactaaatgtgaatataaaatctaaataaaggaatatgtttgcctaatatagtttaaggaaatgataatcatttctgtgcattttgttggcatttcagctaatattaaagagtaattttcagaggcattgacttaaaaaatggcaaatcagataatgtcggtattttcaagatacaatctagctctgacataaactgaaagacgtgagacaaattatatgaccttaatttt

SEQ ID NO: 6704 - protein, 399 aa, Homo sapiens; identical to SEQ ID NO: 873

SEQ ID NO: 6705 - DNA, 1932 bp, Homo sapiens
agaggcggaagtaaaagcgaactacagtggatgggtgcagttcaggcatttcaaaaggtttgaactacctaaccattatggcaccaggaaacctctggcatatgagaaataactttctctttggttcaagatgttggatgactcgattttcagcagaaaacatcttcaaatcagtttcatttaggctttttggtgtgaagtgtcataatacagacagtgagcctttgaaaaatgaggacctactgaaaaacttacttactatgggagtagatattgacatggcaaggaaacgacagcctggagtttttcataggatgattaccaatgagcaggacctgaagatgttccttctttccaaaggagctagcaaagaagtgatcgctagcatcatatcaagatatccacgagcaataacacgtactcccgagaatctttcaaaacggtgggatctgtggagaaagattgtgacatcagaccttgaaattgtaaatattttggaacgttctcctgaatccttttttcggtccaataacaacctaaacttagagaataatataaagttcctctactcagttggattgacccgtaaatgcctttgtcgattgttgaccaatgcccctcgtaccttctccaatagtcttgatctgaataaacagatggttgaatttttgcaggcagccggtttgtcattgggtcacaatgatcccgcagattttgtcagaaagataatttttaaaaacccttttatcttaattcagagcaccaagcgggtgaaagctaacattgaattcttacggtcaactttcaatttgaacagtgaggaactgctggttctgatatgtggtccaggagctgaaatcctagacctttccaatgactatgccagaagaagctacgcaaacatcaaagagaagctgttttctcttggatgtactgaagaagaggtacagaagtttgtcttaagctatccagatgtgatcttcttggcagagaaaaagtttaatgataaaatagactgcctcatggaagaaaacattagcatttcacaaataatcgaaaatcctcgggttctggattcaagcataagtactttaaaaagtcgaatcaaagaattggtaaatgctggctgtaacttgagtactttaaacatcactcttctatcttggagtaaaaaaagatatgaagctaaattgaaaaagttaagcagatttgcctaaggatgccaatgtttttaattctcaggaactgtgaatatgttatgccacattgcaaaagaattttgcagaagtgattaatttaaaatgttattaagggccttgagatggggagattatcctgaattactttggagggcctaatataattgtagggatctttaaaagttgaagagggaggcaaaagaggaggtcagagtgatcctgtataagaaagacaactacttttgaaggaagttaaaaggtggctttgaaggaggaagacaccttgagccaaggaatgaagggggcctgtaaaaaaagattgaaaaggcaaggaaacagattctccattagagtccccagaaaggaatgcagccttgctggcacctttttagcccagtgagatcaatgtcaaacttctgacccacagaaccataagatggtaaatttgtgttgttttaaaccactgagtcagtgataatttgctgaagaagcaaatagattaacatagcaactaagtagatgattagttgcattataggtgaagtcaaaaatacagtcctttagtaaagtctctatttcttccttttataagagtaattatatttaaaaaatctacctacccttctggaattgctaatgttagtgtttataaagtcttaaatgtgtgcataaaaaactaaatgtgaatataaaatctaaataaaggaatatgtttgcctaatatagtttaagg

SEQ ID NO: 6706 - protein, 379 aa, Homo sapiens; identical to SEQ ID NO: 6702

SEQ ID NO: 6707 - DNA, 2009 bp, Homo sapiens
ctagccgctccggaccccagaggcggaagtaaaagcgaactacagtggatgggtgcagttcaggagatagctgttctccagcctttctggagggatgcagagcctttccttaggacaaacaagcatttcaaaaggtttgaactacctaaccattatggcaccaggaaacctctggcatatgagaaataactttctctttggttcaagatgttggatgactcgattttcagcagaaaacatcttcaaatcagtttcatttaggctttttggtgtgaagtgtcataatacagacagtgagcctttgaaaaatgaggacctactgaaaaacttacttactatgggagtagatattgacatggcaaggaaacgacagcctggagtttttcataggatgattaccaatgagcaggacctgaagatgttccttctttccaaaggagctagcaaagaagtgatcgctagcatcatatcaagatatccacgagcaataacacgtactcccgagaatctttcaaaacggtgggatctgtggagaaagattgtgacatcagaccttgaaattgtaaatattttggaacgttctcctgaatccttttttcggtccaataacaacctaaacttagagaataatataaagttcctctactcagttggattgacccgtaaatgcctttgtcgattgttgaccaatgcccctcgtaccttctccaatagtcttgatctgaataaacagatggttgaatttttgcaggcagccggtttgtcattgggtcacaatgatcccgcagattttgtcagaaagataatttttaaaaacccttttatcttaattcagagcaccaagcgggtgaaagctaacattgaattcttacggtcaactttcaatttgaacagtgaggaactgctggttctgatatgtggtccaggagctgaaatcctagacctttccaatgactatgccagaagaagctacgcaaacatcaaagagaagctgttttctcttggatgtactgaagaagaggtacagaagtttgtcttaagctatccagatgtgatcttcttggcagagaaaaagtttaatgataaaatagactgcctcatggaagaaaacattagcatttcacaaataatcgaaaatcctcgggttctggattcaagcataagtactttaaaaagtcgaatcaaagaattggtaaatgctggctgtaacttgagtactttaaacatcactcttctatcttggagtaaaaaaagatatgaagctaaattgaaaaagttaagcagatttgcctaaggatgccaatgtttttaattctcaggaactgtgaatatgttatgccacattgcaaaagaattttgcagaagtgattaatttaaaatgttattaagggccttgagatggggagattatcctgaattactttggagggcctaatataattgtagggatctttaaaagttgaagagggaggcaaaagaggaggtcagagtgatcctgtataagaaagacaactacttttgaaggaagttaaaaggtggctttgaaggaggaagacaccttgagccaaggaatgaagggggcctgtaaaaaaagattgaaaaggcaaggaaacagattctccattagagtccccagaaaggaatgcagccttgctggcacctttttagcccagtgagatcaatgtcaaacttctgacccacagaaccataagatggtaaatttgtgttgttttaaaccactgagtcagtgataatttgctgaagaagcaaatagattaacatagcaactaagtagatgattagttgcattataggtgaagtcaaaaatacagtcctttagtaaagtctctatttcttccttttataagagtaattatatttaaaaaatctacctacccttctggaattgctaatgttagtgtttataaagtcttaaatgtgtgcataaaaaactaaatgtgaatataaaatctaaataaaggaatatgtttgcctaatatagtttaagg

SEQ ID NO: 6708 - protein, 399 aa, Homo sapiens; identical to SEQ ID NO: 873

SEQ ID NO: 6709 - DNA, 609 bp, Homo sapiens
ggaaaagactaacttccggcctcgggtcgcgcgcagaggtgatgtcgttggtcctgcgccccctcgtggcggtacttcagcccttcgcagcccgacgctaggggcctggcagggggcagcaagagaccgcggattacctgaagctgagtaatttataaagaaaagaagttcaattggctcacagttctgcaggctgtacaggaagcatggcactgacatcttctcagcttctggtgagggcctcaggaagtttacaatcatggtggaaggcaaagggggagcaagcgtctcatgtggcaagagggaacaaacaggagacaggaggtgccacacacttttaaacaacaggatctcacaagagcttactcttacaaggacagcaccaagaatatgaggaatctgcccgcatgacccaaacacttccctccaggccccacctccaacactggggattacatctcaacactggatttggaggggacatccaaactatatcaaggctgtacaagaagcttggtgccagcatttgcttctacgcagagcctcaggctgcttctactcacagtaaaaggcaaaagggcatgcaaagatcatgtggcaagagaagaa

SEQ ID NO: 6710 - protein, 66 aa, Homo sapiens
MTQTLPSRPHLQHWGLHLNTGFGGDIQTISRLYKKLGASICFYAEPQAASTHSKRQKGMQRSCGKR

SEQ ID NO: 6711 - DNA, 830 bp, Homo sapiens
ctacaagctccaacggaaaagttccggtggggggtggtgggggggcggacgccaggttttctacctacattaactgcttgactcaagaattatgagagcagctaattgctcttattacttccttagcctgaaaagtccctccctcttccctccactggttcccactcaatctccggttcatccttatagtcccatcgcacacgctgcctccaaatggcttttctgacctcttgttccctccacggcaaccgagacacatccagtcaaaacttagtcccctcccccgactctttggggcttccctttaacagtagtgttctgaaaggagcctgagctttagaacctcggttagggacaatgccagactacactaactttctagcgttaatgacaagttacaggtgatccaccatgcccggcttcagatcctgtagagttctaaaggtcattgtaaggacttcagcttttactctgggtaagattaggagccattggagaattttgagcagatgaatgacatgatttggcttatgttgttcacggacatttggctgctatgaggagaaagggggatcagtttggatgttatttcagtaatcccagataatgggaatttgggccatagtactgtagtggaggaaaagatatggaatcagattctggatatcttttgaacatagaaccaatagtatcataggagttgtatattggatatgaggtttgagacaaaaagaaaagtcaaggttgactccaacatttttggcttgagcaactgaagtgatgaagttgccagtaaccaaaatggagaagagaaaatctggggaccaagt

SEQ ID NO: 6712 - protein, 44 aa, Homo sapiens
MRAANCSYYFLSLKSPSLFPPLVPTQSPVHPYSPIAHAASKWLF

SEQ ID NO: 6713 - DNA, 1413 bp, Homo sapiens
acgtggagacgaagatggcggcggcggcggcggtgacggcgcttcccgtgcggctgaggacgatccgccagtgagcgcggagactgcttccacttcgggcgggggagcgccggaccgaatcggctctctaggccgtggagcttgccgtcccacctccgtccaaatcgacctttcctttctatccccaaccacccctcaacccctgttttcccctgccttccttgcagaggccatggaggacgaggagagacagaagaagctggaggccggcaaagccaagcttgcccagtttcgacaaagaaaagctcagtcggatgggcagagtccttccaagaagcagaaaaaaaagagaaaaacgtcaagcagtaaacatgatgtgtcagcacaccatgatttgaatattgatcaatcacagtgtaatgaaatgtacataaatagttctcagagagtagaatcaactgtgattcctgaatctacaataatgagaactctacatagtggagaaataaccagtcatgagcagggcttctctgtggaactggaaagtgaaatttcaaccacagcagatgactgcagttcagaggtaaatggttgcagttttgtgatgagaacaggaaagcctacaaatttattaagggaagaagaatttggtgttgatgattcttattctgaacaaggagcacaagacagtccgactcatctagagatgatggaaagtgagttggctgggaagcagcatgagattgaagagctaaacagagagctggaagaaatgagggttacctatgggactgaaggactgcagcagttacaagaatttgaagctgccattaaacaaagagatggcattataacccagctcactgctaatttacaacaagcaagaagagaaaaggatgagacaatgagagaatttttagagttgacagaacagagtcaaaaattacagattcaatttcagcaattacaggctagtgaaactctgagaaacagcactcatagtagcacagctgcagacttactacaagccaaacaacagatcctcactcatcaacagcagcttgaagaacaagaccacttattagaagattatcagaaaaagaaagaagacttcacaatgcaaattagtttcttgcaagagaaaattaaagtatatgaaatggtatgtttattttaaggaagtcagctaacttgtagaagctttagagtttcaagttttttatgcaagtggtttttttttgttaggcacatgaatcacaaaatttcataattaagctctttgtgtaatttatttcaaaagcaaatgggaatctcagtaatgtagtttttaagataatagtcattactgagttccctaaaagtgatcagcctatgttaaactgaattagcaggaaaatacaaatttatagctat

SEQ ID NO: 6714 - protein, 314 aa, Homo sapiens
MEDEERQKKLEAGKAKLAQFRQRKAQSDGQSPSKKQKKKRKTSSSKHDVSAHHDLNIDQSQCNEMYINSSQRVESTVIPESTIMRTLHSGEITSHEQGFSVELESEISTTADDCSSEVNGCSFVMRTGKPTNLLREEEFGVDDSYSEQGAQDSPTHLEMMESELAGKQHEIEELNRELEEMRVTYGTEGLQQLQEFEAAIKQRDGIITQLTANLQQARREKDETMREFLELTEQSQKLQIQFQQLQASETLRNSTHSSTAADLLQAKQQILTHQQQLEEQDHLLEDYQKKKEDFTMQISFLQEKIKVYEMVCLF

SEQ ID NO: 6715 - DNA, 12474 bp, Homo sapiens
acgtggagacgaagatggcggcggcggcggcggtgacggcgcttcccgtgcggctgaggacgatccgccagtgagcgcggagactgcttccacttcgggcgggggagcgccggaccgaatcggctctctaggccgtggagcttgccgtcccacctccgtccaaatcgacctttcctttctatccccaaccacccctcaacccctgttttcccctgccttccttgcagaggccatggaggacgaggagagacagaagaagctggaggccggcaaagccaagcttgcccagtttcgacaaagaaaagctcagtcggatgggcagagtccttccaagaagcagaaaaaaaagagaaaaacgtcaagcagtaaacatgatgtgtcagcacaccatgatttgaatattgatcaatcacagtgtaatgaaatgtacataaatagttctcagagagtagaatcaactgtgattcctgaatctacaataatgagaactctacatagtggagaaataaccagtcatgagcagggcttctctgtggaactggaaagtgaaatttcaaccacagcagatgactgcagttcagaggtaaatggttgcagttttgtgatgagaacaggaaagcctacaaatttattaagggaagaagaatttggtgttgatgattcttattctgaacaaggagcacaagacagtccgactcatctagagatgatggaaagtgagttggctgggaagcagcatgagattgaagagctaaacagagagctggaagaaatgagggttacctatgggactgaaggactgcagcagttacaagaatttgaagctgccattaaacaaagagatggcattataacccagctcactgctaatttacaacaagcaagaagagaaaaggatgagacaatgagagaatttttagagttgacagaacagagtcaaaaattacagattcaatttcagcaattacaggctagtgaaactctgagaaacagcactcatagtagcacagctgcagacttactacaagccaaacaacagatcctcactcatcaacagcagcttgaagaacaagaccacttattagaagattatcagaaaaagaaagaagacttcacaatgcaaattagtttcttgcaagagaaaattaaagtatatgaaatggaacaagataaaaaagtagaaaactcaaataaagaagaaatacaggaaaaggagacaatcattgaagaattaaacacaaaaataatagaagaagaaaagaaaactcttgagctaaaggataaattaacaactgctgataaattactaggagaattacaagaacagattgtgcaaaagaaccaagaaataaaaaacatgaaattagagctgactaattctaagcaaaaagaaagacagtcttctgaagaaataaaacagttaatggggacagtcgaagaacttcagaagagaaatcataaagacagccagttcgaaactgatatagtacaacgaatggaacaagaaacacaaagaaagttagaacaactccgggcagagctggatgagatgtatgggcagcagatagtgcaaatgaaacaagaattaataagacaacacatggcacagatggaggaaatgaaaacacggcataagggagaaatggagaatgctttaaggtcatattcaaatattacagttaatgaagatcagataaagttaatgaatgtggcaataaatgaactgaatataaaattgcaagatactaactctcaaaaggaaaaactcaaggaagaactaggactaattttagaagaaaagtgtgctctacagagacagcttgaagaccttgttgaagaattgagcttttcaagggaacagattcagagagctagacagacaatagctgaacaagaaagtaaacttaatgaagcacataagtcccttagtacagtggaagatttgaaagctgagattgtttctgcatctgaatccagaaaggaactagaattaaaacatgaagcagaagttacaaattacaagataaaacttgaaatgttagaaaaagaaaagaatgctgtgttagacagaatggctgaatcacaagaagctgaattagagaggctgagaacacagcttctatttagtcacgaagaagagctttccaaactgaaggaagatttagaaattgaacatcgaataaatattgaaaaacttaaagataatttaggcattcactataaacagcagatagatggtttacagaatgaaatgagtcaaaagatagaaaccatgcagtttgaaaaggacaatttgataactaagcagaatcaattaattttggaaatttcaaagctaaaagatttacagcagtctcttgtaaattcaaagtcagaagaaatgactcttcaaatcaatgaacttcaaaaagaaattgaaatactcagacaagaagaaaaagaaaagggtacacttgaacaagaagttcaagaattacaacttaaaacagaattgttagaaaaacagatgaaggaaaaagagaatgatcttcaagaaaaatttgcacaacttgaagcagagaatagcattcttaaagatgaaaagaaaacccttgaagacatgttgaaaatacatactcctgttagccaagaagaaagattgattttcttagactccattaagtccaaatccaaagactctgtgtgggaaaaagaaatagaaatacttatagaggaaaatgaggacctcaaacaacaatgtattcagctaaatgaagagattgaaaagcaaaggaacactttttcatttgctgaaaaaaactttgaagttaactatcaagagttacaagaggagtatgcttgccttctcaaagtaaaagatgatttagaagacagtaaaaataaacaggaattagagtataaaagtaaacttaaagcacttaatgaagagcttcatttgcaaagaataaatccaactacagtgaaaatgaaaagttctgtctttgatgaagacaaaacttttgtagcagaaacattggaaatgggtgaggttgttgaaaaggatacaacagaactcatggaaaaacttgaggtaaccaagcgagagaaattagagctgtcacagagactgtctgatctttctgaacaattgaaacagaaacatggtgagattagttttctaaatgaagaagttaaatctttaaagcaagagaaagaacaagtttcattgagatgtagagagctagaaatcattattaaccacaacagggcagaaaatgtacagtcatgtgatactcaagtaagctctttattagatggagttgtgaccatgacaagcaggggtgctgaaggatcagtttctaaagtaaataaaagttttggtgaagaatcaaaaataatggtggaagataaagtttcttttgaaaatatgactgttggagaagaaagtaagcaagaacagttgattttggatcacttaccatctgtaacaaaggaatcatcacttagagcaactcaaccaagtgaaaatgataaacttcagaaagaactcaatgtacttaaatcagaacagaatgatttaaggctacagatggaagcccaacgcatttgcctctctctggtttattcaactcatgtggatcaggttcgtgaatatatggaaaatgaaaaagataaagctctttgcagtcttaaagaagagcttatttttgctcaagaggaaaagatcaaggaacttcagaaaatacaccagttagaactacagactatgaaaacacaagaaacaggtgatgaaggaaagcctttacatctgctcattggaaaacttcaaaaggcagtgtctgaagaatgttcttattttttacagactttatgcagtgtccttggtgaatattatactcctgctttaaaatgtgaagtaaatgcagaagacaaagagaattctggtgattacatttctgaaaatgaagatccagaattacaagattatagatatgaagttcaagactttcaagaaaatatgcacactcttctcaacaaagtaacagaagaatacaacaaactcttggtacttcaaacacgactaagcaagatctggggacagcagacagatggtatgaaacttgaatttggagaagaaaaccttccaaaagaggaaacagagtttttatcaatccattctcagatgaccaatttggaagacattgatgtcaatcataaaagcaagttatcttctctgcaagatcttgaaaaaactaaacttgaagaacaagttcaagaattagaaagcctcatatcctctttgcagcaacagttgaaagaaactgaacaaaactatgaggcagagatccactgtttacagaagaggcttcaagctgttagtgagtccacggttccgccaagcttacctgttgattcggtggtaattacagaatctgatgcacagagaacaatgtaccctggaagttgtgtgaaaaagaatattgatggtacaatagagttttctggtgaatttggagtgaaagaggaaacaaatatcgttaagttgcttgaaaaacaataccaagaacaattagaagaagaagtagctaaggttattgtgtcaatgagtatagcatttgctcaacaaactgaactgtctagaatatctgggggaaaagaaaatactgcatcatcaaagcaagcacatgctgtgtgtcagcaagaacaacattattttaatgaaatgaaattatcacaggatcaaattggttttcagacttttgagacagtggatgtgaaatttaaagaagaatttaaaccacttagtaaagagttaggagaacatggaaaggaaattttattatcaaatagtgatccccatgatataccagaatcaaaggactgtgtgctgactatttcagaagaaatgttctccaaagataaaacatttatagttagacagtctattcatgatgagatttcagtgtcaagcatggatgcttctagacaactaatgttgaatgaagaacagttggaagatatgagacaggaacttgtacgacaataccaagaacatcaacaggcaacggaattgttaaggcaagcacatatgcggcaaatggagagacagcgagaagaccaggaacagctacaagaagagattaagagacttaatagacaattagcccagagatcctccatagataatgaaaacctggtttcagagagagagagggtgcttttagaggagctggaagcactaaagcagctgtctttagctggaagagagaagctgtgttgtgagctgcgcaacagcagtacgcaaacacagaatggaaatgaaaaccaaggagaagttgaagaacaaacatttaaagaaaaggaattagacagaaaacctgaagatgtgcctcctgagattttgtctaatgaaaggtatgcactccagaaagctaataatagacttttgaagatcctcttagaagttgtaaagacaacagcagctgttgaagaaacaattggtcgccatgtccttgggattctagatagatctagtaaaagccagtcatctgccagcctaatttggaggtcagaagcagaggcatctgtaaagtcatgtgtccatgaggaacatacaagagttacagatgaatccattccctcttattctggaagtgatatgccaagaaatgacattaacatgtggtcaaaagtaactgaggaaggaacagagctgtcacaacgacttgtgaggagtggttttgctggaactgaaatagaccctgaaaatgaagaacttatgctgaacattagctctcgactacaagcagcagttgaaaaactcctagaagccataagtgaaactagcagtcagcttgaacatgcgaaagtgacacagacagagttgatgcgtgagtcatttagacagaaacaagaagcaacagagtcccttaagtgccaagaggaacttcgagagcgccttcatgaggagtccagggccagagaacagctagctgtggagctcagtaaggctgagggcgtcattgatggctatgcagatgaaaaaactctttttgaaaggcaaattcaggaaaaaactgatataatagatcgtcttgagcaggagttgttatgtgcaagtaacaggttgcaagaattggaggcagagcaacagcagatccaagaagaaagagaattactgtccagacaaaaggaagctatgaaagcagaggcaggcccagttgaacaacaattactacaggagacagaaaaattaatgaaggaaaaactagaagtacaatgtcaagctgaaaaagtacgtgatgaccttcaaaaacaagtgaaagctctagaaatagatgtggaagaacaagtcagtaggtttatagagctggaacaagaaaaaaatactgaactaatggatttaagacagcaaaaccaagcattggaaaagcagttagaaaaaatgagaaaatttttagatgagcaagccattgacagagaacatgagagagatgtattccaacaggaaatacagaaactagaacagcaacttaaggttgttcctcgattccagcctatcagtgaacatcaaactagagaggttgaacagttagcaaatcatctgaaagaaaaaacagacaaatgcagtgagcttttgctctctaaagagcagcttcaaagggatatacaagaaaggaatgaagaaatagagaaactggagttcagagtaagagaactggagcaggcgcttcttgtgagtgcagatacttttcaaaaggtagaggaccgaaaacactttggagctgtagaagctaaaccagaattgtccctagaagtacaattgcaggctgaacgagatgccatagacagaaaggaaaaagagattacaaacttagaagagcaattagaacagtttagagaagaactggaaaataagaatgaagaagttcaacaattacatatgcaattagaaatacagaaaaaggaatctactacccgcctacaagaacttgaacaggaaaacaaattatttaaggatgacatggagaaactgggacttgccataaaggaatctgatgccatgtctactcaagaccaacatgtgctatttgggaaatttgctcaaataatacaggaaaaagaggtagaaattgaccaattaaatgaacaagttacgaaactccagcagcaacttaaaattacaacagataacaaggttattgaagaaaaaaatgaactgataagggatcttgaaacccaaatagaatgtttgatgagtgatcaagaatgtgtgaagagaaatagagaagaagaaatagagcagctcaatgaagtgattgaaaaacttcaacaggaattggcaaatattggacagaagacatcaatgaatgctcattccctctcagaagaagcagacagtttaaaacatcaattggatgtggttatagctgaaaagctggccttggaacagcaagtagaaaccgctaatgaagaaatgaccttcatgaaaaatgtacttaaagaaaccaattttaaaatgaatcagctaacacaggaattattcagcttaaagagagaacgtgaaagtgtggaaaagattcaaagcataccagagaatagtgttaacgtggctatagatcatctgagcaaagacaaacctgaactagaagtagtccttacagaggatgctcttaaatccctagaaaatcagacatacttcaaatcttttgaagaaaatggcaaaggttccataattaatttggaaacaaggttgctacaacttgagagcactgttagtgcaaaggacttagaacttacccagtgttataaacaaataaaagacatgcaagaacaaggccagtttgaaacagaaatgcttcaaaagaagattgtaaacctacagaaaatagttgaagaaaaagtggctgctgctcttgtcagtcaaatccaacttgaggcagttcaggaatatgcaaaattctgtcaagataatcaaacaatttcatcagaacctgaaagaacaaatattcagaatttaaatcaactaagagaagatgagttggggtcagatatatcagcattaaccttgagaatatcagaattagaaagccaggttgttgaaatgcatactagtttgattttagaaaaagaacaagtagaaattgcagaaaaaaatgttttagaaaaagaaaagaagctgctagaactacagaagctattggagggcaatgagaaaaaacagagagagaaagaaaagaaaagaagccctcaagatgttgaagttctcaagacaactactgagctatttcatagcaatgaagaaagtggattttttaatgaactcgaggctcttagagctgaatcagtggctaccaaagcagaacttgccagttataaagaaaaggctgaaaaacttcaagaagagcttttggtaaaagaaacaaatatgacatctcttcagaaagacttaagccaagttagggatcacctcgcagaggcaaaagagaaattgtccattttagaaaaagaagatgagactgaggtacaagaaagcaaaaaggcctgcatgtttgagccacttcctataaaactgagtaagagcattgcatcccagacagatgggactctgaagatcagtagcagcaatcagactccacaaattcttgttaaaaatgcaggaatacaaattaatttacagagtgaatgttcctcagaagaagttactgaaataatcagtcagtttactgaaaaaattgagaagatgcaagaactacatgctgctgaaattttggacatggaatccagacatatttcagaaactgaaaccttaaagagggaacactatgttgccgttcagttactgaaagaggaatgtggtaccttgaaggcagtgatacagtgtctgagaagtaaagagggatcctcaattcctgagctagcacattctgatgcttaccagactagagaaatatgctccagtgattctggatcagactggggtcagggaatttatcttacacacagtcagggatttgacatagcatcagaaggccgaggagaagaaagtgaaagtgcaacagattcctttccaaagaaaataaagggattactgagagctgtccataatgaaggcatgcaggtgctttctctcactgagtctccctatagtgatggagaggaccattctattcagcaggtttcagaaccttggctagaagagagaaaagcttacatcaatacaatctcatctctaaaggatttaattacaaagatgcaactgcaaagagaagccgaggtttatgatagttctcaatctcatgagagcttctcagactggcgaggtgaactactgcttgcccttcaacaagttttcttagaagagcgtagtgttttactagcagcatttcggacggagctgacagctctaggtactacagatgcagttggtttactaaactgtttggaacagagaatacaagaacagggtgttgaatatcaagcagctatggaatgcctccagaaagcagatagaaggagtttgttatctgaaattcaggcactgcatgcacaaatgaatggtaggaaaattactctgaaaagagaacaagagagtgagaaaccaagccaagaactcttggaatataatatacagcagaagcagtctcaaatgctggagatgcaagtggagctcagcagtatgaaagacagagcaacggaactgcaggagcagctgagttctgagaaaatggtggttgctgaactgaagagtgagcttgcacaaactaaattggaactagaaacaacactcaaggcacagcataaacacctaaaagaattggaggctttcaggttggaagttaaagataagacagatgaagtacatttgcttaatgacacattagcaagtgaacagaaaaaatcaagagagctccagtgggctttggagaaagagaaagccaagttgggacgcagtgaagaacgggataaagaagaacttgaggatctgaagttttcacttgagagtcagaaacaaaggaatcttcagctaaatctacttttggaacaacagaaacaactactgaacgaatcccagcaaaaaatagaatcacagagaatgctatatgatgcccagttgtcagaagaacaaggtcgaaacttagagcttcaggtacttcttgaatctgagaaagttcgaattcgggaaatgagtagtaccctagatagggagcgggaattgcacgcacagctgcagagcagtgatggtactggacagtctcggccacccttgccctcagaggacctactgaaagagctgcagaaacagctagaggaaaaacacagtcgcatagtagaattgttaaatgagactgaaaaatataaactggattctttgcaaacacgacagcaaatggaaaaagataggcaggttcacaggaaaacactgcagacagaacaggaggccaacactgagggacagaaaaaaatgcatgagctccagtccaaagtggaagatcttcagcgccagctggaagagaaaagacaacaagtttataagttagaccttgaaggacagcgactacaaggaatcatgcaggaattccagaagcaagaactagaacgagaagaaaaacgagaaagtagaagaattctgtatcagaaccttaatgagccaaccacgtggagcttaaccagtgatagaactagaaattgggttcttcaacagaaaatagaaggagaaacaaaagaatcaaactacgctaaattgattgaaatgaatggaggaggaaccggctgtaatcatgaattagaaatgatcagacaaaagcttcaatgtgtagcttcaaaactacaggttctaccccagaaagcctctgagagactacagtttgaaacagcagatgatgaagatttcatttgggttcaggaaaatattgatgaaattattttacaactacagaaattaactggccagcaaggtgaagagcccagcttggtgtccccaagtacttcttgtggctcattgactgaaagactactgagacaaaatgctgagctgacagggcatatcagtcaactgactgaagagaagaatgacttaaggaacatggttatgaagctggaagagcagatcaggtggtatcgacagacaggagctggtagagataattcttccaggttttcattgaatggtggtgccaacattgaagccatcattgcctctgaaaaagaagtatggaacagagaaaaattgactctccagaaatctttgaaaagggcagaggctgaagtatacaaactgaaagctgaactaagaaatgactctttacttcaaactctgagccctgattctgaacatgtcactttaaagagaatttatggtaaatacttgagggcagaaagttttcgaaaggctctcatttaccagaagaaatacctgctgctgttactgggtgggttccaggaatgtgaagatgccaccttggccctgcttgcccggatgggggggcagccagctttcacggatctagaggtgatcaccaatcgcccaaagggcttcaccaggtttcggtcggccgtcagagtatccattgcaatttccagaatgaaatttttggttcgacggtggcatcgagtcacaggttctgtttccatcaatattaacagagatggctttggactgaatcaaggtgcagaaaagactgactcattttatcattcttctggtgggctggagttatatggagaaccaagacatactacgtatcgctcaagatcagatctggactatattaggtcccctttaccatttcagaataggtacccaggcactccagctgatttcaatcctggttctttagcatgttctcagcttcagaattacgatcctgacagagccctaacagattatatcactcggctagaggcactgcaaagacgacttggaactatacagtcaggttcaactactcaatttcatgctggcatgagaagataatcctttgaaacatcattaattgaagtgattttaaatagatttccttttgtaaatcaatggttcttttgtgcttttgtattgtgaatattcaatgggaccaatatgaacacagcttatgattgtatacaaatcccttgccagcacatgaaaacaaactggaatttgtatatataagcattgtgtatgtattcatgcacaataattattgaattacctgtatatttgtggaatgctaatttaaaacattaaattataaaccttgtgtatttatcaaatgggtgaaaagattaaacttttacgcattacaatactgctgaatgtgtagctcgaggtgtcctgcacttttcttataaggctactgaagttacatgttttgcctaatatattctactggtgatgaagacagataatatcacttgtagagacctatttttgtataatggtagaagttttgaattttatggggtattttgtcaagtactgaaataaaaatgacttcaccattttcaccacactgt

SEQ ID NO: 6716 - protein, 3907 aa, Homo sapiens; identical to SEQ ID NO: 875

SEQ ID NO: 6717 - DNA, 6058 bp, Homo sapiens; identical to SEQ ID NO: 876

SEQ ID NO: 6718 - protein, 1655 aa, Homo sapiens; identical to SEQ ID NO: 877

SEQ ID NO: 6719 - DNA, 12476 bp, Homo sapiens
gaagatggcggcggcggcggcggtgacggcgcttcccgtgcggctgaggacgatccgccagtgagcgcggagactgcttccacttcgggcgggggagcgccggaccgaatcggctctctaggccgtggagcttgccgtcccacctccgtccaaatcgacctttcctttctatccccaaccacccctcaacccctgttttcccctgccttccttgcagaggccatggaggacgaggagagacagaagaagctggaggccggcaaagccaagattgaagaactctctttagcttttcttgtcagacagcttgcccagtttcgacaaagaaaagctcagtcggatgggcagagtccttccaagaagcagaaaaaaaagagaaaaacgtcaagcagtaaacatgatgtgtcagcacaccatgatttgaatattgatcaatcacagtgtaatgaaatgtacataaatagttctcagagagtagaatcaactgtgattcctgaatctacaataatgagaactctacatagtggagaaataaccagtcatgagcagggcttctctgtggaactggaaagtgaaatttcaaccacagcagatgactgcagttcagaggtaaatggttgcagttttgtgatgagaacaggaaagcctacaaatttattaagggaagaagaatttggtgttgatgattcttattctgaacaaggagcacaagacagtccgactcatctagagatgatggaaagtgagttggctgggaagcagcatgagattgaagagctaaacagagagctggaagaaatgagggttacctatgggactgaaggactgcagcagttacaagaatttgaagctgccattaaacaaagagatggcattataacccagctcactgctaatttacaacaagcaagaagagaaaaggatgagacaatgagagaatttttagagttgacagaacagagtcaaaaattacagattcaatttcagcaattacaggctagtgaaactctgagaaacagcactcatagtagcacagctgcagacttactacaagccaaacaacagatcctcactcatcaacagcagcttgaagaacaagaccacttattagaagattatcagaaaaagaaagaagacttcacaatgcaaattagtttcttgcaagagaaaattaaagtatatgaaatggaacaagataaaaaagtagaaaactcaaataaagaagaaatacaggaaaaggagacaatcattgaagaattaaacacaaaaataatagaagaagaaaagaaaactcttgagctaaaggataaattaacaactgctgataaattactaggagaattacaagaacagattgtgcaaaagaaccaagaaataaaaaacatgaaattagagctgactaattctaagcaaaaagaaagacagtcttctgaagaaataaaacagttaatggggacagtcgaagaacttcagaagagaaatcataaagacagccagttcgaaactgatatagtacaacgaatggaacaagaaacacaaagaaagttagaacaactccgggcagagctggatgagatgtatgggcagcagatagtgcaaatgaaacaagaattaataagacaacacatggcacagatggaggaaatgaaaacacggcataagggagaaatggagaatgctttaaggtcatattcaaatattacagttaatgaagatcagataaagttaatgaatgtggcaataaatgaactgaatataaaattgcaagatactaactctcaaaaggaaaaactcaaggaagaactaggactaattttagaagaaaagtgtgctctacagagacagcttgaagaccttgttgaagaattgagcttttcaagggaacagattcagagagctagacagacaatagctgaacaagaaagtaaacttaatgaagcacataagtcccttagtacagtggaagatttgaaagctgagattgtttctgcatctgaatccagaaaggaactagaattaaaacatgaagcagaagttacaaattacaagataaaacttgaaatgttagaaaaagaaaagaatgctgtgttagacagaatggctgaatcacaagaagctgaattagagaggctgagaacacagcttctatttagtcacgaagaagagctttccaaactgaaggaagatttagaaattgaacatcgaataaatattgaaaaacttaaagataatttaggcattcactataaacagcagatagatggtttacagaatgaaatgagtcaaaagatagaaaccatgcagtttgaaaaggacaatttgataactaagcagaatcaattaattttggaaatttcaaagctaaaagatttacagcagtctcttgtaaattcaaagtcagaagaaatgactcttcaaatcaatgaacttcaaaaagaaattgaaatactcagacaagaagaaaaagaaaagggtacacttgaacaagaagttcaagaattacaacttaaaacagaattgttagaaaaacagatgaaggaaaaagagaatgatcttcaagaaaaatttgcacaacttgaagcagagaatagcattcttaaagatgaaaagaaaacccttgaagacatgttgaaaatacatactcctgttagccaagaagaaagattgattttcttagactccattaagtccaaatccaaagactctgtgtgggaaaaagaaatagaaatacttatagaggaaaatgaggacctcaaacaacaatgtattcagctaaatgaagagattgaaaagcaaaggaacactttttcatttgctgaaaaaaactttgaagttaactatcaagagttacaagaggagtatgcttgccttctcaaagtaaaagatgatttagaagacagtaaaaataaacaggaattagagtataaaagtaaacttaaagcacttaatgaagagcttcatttgcaaagaataaatccaactacagtgaaaatgaaaagttctgtctttgatgaagacaaaacttttgtagcagaaacattggaaatgggtgaggttgttgaaaaggatacaacagaactcatggaaaaacttgaggtaaccaagcgagagaaattagagctgtcacagagactgtctgatctttctgaacaattgaaacagaaacatggtgagattagttttctaaatgaagaagttaaatctttaaagcaagagaaagaacaagtttcattgagatgtagagagctagaaatcattattaaccacaacagggcagaaaatgtacagtcatgtgatactcaagtaagctctttattagatggagttgtgaccatgacaagcaggggtgctgaaggatcagtttctaaagtaaataaaagttttggtgaagaatcaaaaataatggtggaagataaagtttcttttgaaaatatgactgttggagaagaaagtaagcaagaacagttgattttggatcacttaccatctgtaacaaaggaatcatcacttagagcaactcaaccaagtgaaaatgataaacttcagaaagaactcaatgtacttaaatcagaacagaatgatttaaggctacagatggaagcccaacgcatttgcctctctctggtttattcaactcatgtggatcaggttcgtgaatatatggaaaatgaaaaagataaagctctttgcagtcttaaagaagagcttatttttgctcaagaggaaaagatcaaggaacttcagaaaatacaccagttagaactacagactatgaaaacacaagaaacaggtgatgaaggaaagcctttacatctgctcattggaaaacttcaaaaggcagtgtctgaagaatgttcttattttttacagactttatgcagtgtccttggtgaatattatactcctgctttaaaatgtgaagtaaatgcagaagacaaagagaattctggtgattacatttctgaaaatgaagatccagaattacaagattatagatatgaagttcaagactttcaagaaaatatgcacactcttctcaacaaagtaacagaagaatacaacaaactcttggtacttcaaacacgactaagcaagatctggggacagcagacagatggtatgaaacttgaatttggagaagaaaaccttccaaaagaggaaacagagtttttatcaatccattctcagatgaccaatttggaagacattgatgtcaatcataaaagcaagttatcttctctgcaagatcttgaaaaaactaaacttgaagaacaagttcaagaattagaaagcctcatatcctctttgcagcaacagttgaaagaaactgaacaaaactatgaggcagagatccactgtttacagaagaggcttcaagctgttagtgagtccacggttccgccaagcttacctgttgattcggtggtaattacagaatctgatgcacagagaacaatgtaccctggaagttgtgtgaaaaagaatattgatggtacaatagagttttctggtgaatttggagtgaaagaggaaacaaatatcgttaagttgcttgaaaaacaataccaagaacaattagaagaagaagtagctaaggttattgtgtcaatgagtatagcatttgctcaacaaactgaactgtctagaatatctgggggaaaagaaaatactgcatcatcaaagcaagcacatgctgtgtgtcagcaagaacaacattattttaatgaaatgaaattatcacaggatcaaattggttttcagacttttgagacagtggatgtgaaatttaaagaagaatttaaaccacttagtaaagagttaggagaacatggaaaggaaattttattatcaaatagtgatccccatgatataccagaatcaaaggactgtgtgctgactatttcagaagaaatgttctccaaagataaaacatttatagttagacagtctattcatgatgagatttcagtgtcaagcatggatgcttctagacaactaatgttgaatgaagaacagttggaagatatgagacaggaacttgtacgacaataccaagaacatcaacaggcaacggaattgttaaggcaagcacatatgcggcaaatggagagacagcgagaagaccaggaacagctacaagaagagattaagagacttaatagacaattagcccagagatcctccatagataatgaaaacctggtttcagagagagagagggtgcttttagaggagctggaagcactaaagcagctgtctttagctggaagagagaagctgtgttgtgagctgcgcaacagcagtacgcaaacacagaatggaaatgaaaaccaaggagaagttgaagaacaaacatttaaagaaaaggaattagacagaaaacctgaagatgtgcctcctgagattttgtctaatgaaaggtatgcactccagaaagctaataatagacttttgaagatcctcttagaagttgtaaagacaacagcagctgttgaagaaacaattggtcgccatgtccttgggattctagatagatctagtaaaagccagtcatctgccagcctaatttggaggtcagaagcagaggcatctgtaaagtcatgtgtccatgaggaacatacaagagttacagatgaatccattccctcttattctggaagtgatatgccaagaaatgacattaacatgtggtcaaaagtaactgaggaaggaacagagctgtcacaacgacttgtgaggagtggttttgctggaactgaaatagaccctgaaaatgaagaacttatgctgaacattagctctcgactacaagcagcagttgaaaaactcctagaagccataagtgaaactagcagtcagcttgaacatgcgaaagtgacacagacagagttgatgcgtgagtcatttagacagaaacaagaagcaacagagtcccttaagtgccaagaggaacttcgagagcgccttcatgaggagtccagggccagagaacagctagctgtggagctcagtaaggctgagggcgtcattgatggctatgcagatgaaaaaactctttttgaaaggcaaattcaggaaaaaactgatataatagatcgtcttgagcaggagttgttatgtgcaagtaacaggttgcaagaattggaggcagagcaacagcagatccaagaagaaagagaattactgtccagacaaaaggaagctatgaaagcagaggcaggcccagttgaacaacaattactacaggagacagaaaaattaatgaaggaaaaactagaagtacaatgtcaagctgaaaaagtacgtgatgaccttcaaaaacaagtgaaagctctagaaatagatgtggaagaacaagtcagtaggtttatagagctggaacaagaaaaaaatactgaactaatggatttaagacagcaaaaccaagcattggaaaagcagttagaaaaaatgagaaaatttttagatgagcaagccattgacagagaacatgagagagatgtattccaacaggaaatacagaaactagaacagcaacttaaggttgttcctcgattccagcctatcagtgaacatcaaactagagaggttgaacagttagcaaatcatctgaaagaaaaaacagacaaatgcagtgagcttttgctctctaaagagcagcttcaaagggatatacaagaaaggaatgaagaaatagagaaactggagttcagagtaagagaactggagcaggcgcttcttgtgagtgcagatacttttcaaaaggtagaggaccgaaaacactttggagctgtagaagctaaaccagaattgtccctagaagtacaattgcaggctgaacgagatgccatagacagaaaggaaaaagagattacaaacttagaagagcaattagaacagtttagagaagaactggaaaataagaatgaagaagttcaacaattacatatgcaattagaaatacagaaaaaggaatctactacccgcctacaagaacttgaacaggaaaacaaattatttaaggatgacatggagaaactgggacttgccataaaggaatctgatgccatgtctactcaagaccaacatgtgctatttgggaaatttgctcaaataatacaggaaaaagaggtagaaattgaccaattaaatgaacaagttacgaaactccagcagcaacttaaaattacaacagataacaaggttattgaagaaaaaaatgaactgataagggatcttgaaacccaaatagaatgtttgatgagtgatcaagaatgtgtgaagagaaatagagaagaagaaatagagcagctcaatgaagtgattgaaaaacttcaacaggaattggcaaatattggacagaagacatcaatgaatgctcattccctctcagaagaagcagacagtttaaaacatcaattggatgtggttatagctgaaaagctggccttggaacagcaagtagaaaccgctaatgaagaaatgaccttcatgaaaaatgtacttaaagaaaccaattttaaaatgaatcagctaacacaggaattattcagcttaaagagagaacgtgaaagtgtggaaaagattcaaagcataccagagaatagtgttaacgtggctatagatcatctgagcaaagacaaacctgaactagaagtagtccttacagaggatgctcttaaatccctagaaaatcagacatacttcaaatcttttgaagaaaatggcaaaggttccataattaatttggaaacaaggttgctacaacttgagagcactgttagtgcaaaggacttagaacttacccagtgttataaacaaataaaagacatgcaagaacaaggccagtttgaaacagaaatgcttcaaaagaagattgtaaacctacagaaaatagttgaagaaaaagtggctgctgctcttgtcagtcaaatccaacttgaggcagttcaggaatatgcaaaattctgtcaagataatcaaacaatttcatcagaacctgaaagaacaaatattcagaatttaaatcaactaagagaagatgagttggggtcagatatatcagcattaaccttgagaatatcagaattagaaagccaggttgttgaaatgcatactagtttgattttagaaaaagaacaagtagaaattgcagaaaaaaatgttttagaaaaagaaaagaagctgctagaactacagaagctattggagggcaatgagaaaaaacagagagagaaagaaaagaaaagaagccctcaagatgttgaagttctcaagacaactactgagctatttcatagcaatgaagaaagtggattttttaatgaactcgaggctcttagagctgaatcagtggctaccaaagcagaacttgccagttataaagaaaaggctgaaaaacttcaagaagagcttttggtaaaagaaacaaatatgacatctcttcagaaagacttaagccaagttagggatcacctcgcagaggcaaaagagaaattgtccattttagaaaaagaagatgagactgaggtacaagaaagcaaaaaggcctgcatgtttgagccacttcctataaaactgagtaagagcattgcatcccagacagatgggactctgaagatcagtagcagcaatcagactccacaaattcttgttaaaaatgcaggaatacaaattaatttacagagtgaatgttcctcagaagaagttactgaaataatcagtcagtttactgaaaaaattgagaagatgcaagaactacatgctgctgaaattttggacatggaatccagacatatttcagaaactgaaaccttaaagagggaacactatgttgccgttcagttactgaaagaggaatgtggtaccttgaaggcagtgatacagtgtctgagaagtaaagaggtatttggtttttataatatgtgtttttcaacattgtgtgattctggatcagactggggtcagggaatttatcttacacacagtcagggatttgacatagcatcagaaggccgaggagaagaaagtgaaagtgcaacagattcctttccaaagaaaataaagggattactgagagctgtccataatgaaggcatgcaggtgctttctctcactgagtctccctatagtgatggagaggaccattctattcagcaggtttcagaaccttggctagaagagagaaaagcttacatcaatacaatctcatctctaaaggatttaattacaaagatgcaactgcaaagagaagccgaggtttatgatagttctcaatctcatgagagcttctcagactggcgaggtgaactactgcttgcccttcaacaagttttcttagaagagcgtagtgttttactagcagcatttcggacggagctgacagctctaggtactacagatgcagttggtttactaaactgtttggaacagagaatacaagaacagggtgttgaatatcaagcagctatggaatgcctccagaaagcagatagaaggagtttgttatctgaaattcaggcactgcatgcacaaatgaatggtaggaaaattactctgaaaagagaacaagagagtgagaaaccaagccaagaactcttggaatataatatacagcagaagcagtctcaaatgctggagatgcaagtggagctcagcagtatgaaagacagagcaacggaactgcaggagcagctgagttctgagaaaatggtggttgctgaactgaagagtgagcttgcacaaactaaattggaactagaaacaacactcaaggcacagcataaacacctaaaagaattggaggctttcaggttggaagttaaagataagacagatgaagtacatttgcttaatgacacattagcaagtgaacagaaaaaatcaagagagctccagtgggctttggagaaagagaaagccaagttgggacgcagtgaagaacgggataaagaagaacttgaggatctgaagttttcacttgagagtcagaaacaaaggaatcttcagctaaatctacttttggaacaacagaaacaactactgaacgaatcccagcaaaaaatagaatcacagagaatgctatatgatgcccagttgtcagaagaacaaggtcgaaacttagagcttcaggtacttcttgaatctgagaaagttcgaattcgggaaatgagtagtaccctagatagggagcgggaattgcacgcacagctgcagagcagtgatggtactggacagtctcggccacccttgccctcagaggacctactgaaagagctgcagaaacagctagaggaaaaacacagtcgcatagtagaattgttaaatgagactgaaaaatataaactggattctttgcaaacacgacagcaaatggaaaaagataggcaggttcacaggaaaacactgcagacagaacaggaggccaacactgagggacagaaaaaaatgcatgagctccagtccaaagtggaagatcttcagcgccagctggaagagaaaagacaacaagtttataagttagaccttgaaggacagcgactacaaggaatcatgcaggaattccagaagcaagaactagaacgagaagaaaaacgagaaagtagaagaattctgtatcagaaccttaatgagccaaccacgtggagcttaaccagtgatagaactagaaattgggttcttcaacagaaaatagaaggagaaacaaaagaatcaaactacgctaaattgattgaaatgaatggaggaggaaccggctgtaatcatgaattagaaatgatcagacaaaagcttcaatgtgtagcttcaaaactacaggttctaccccagaaagcctctgagagactacagtttgaaacagcagatgatgaagatttcatttgggttcaggaaaatattgatgaaattattttacaactacagaaattaactggccagcaaggtgaagagcccagcttggtgtccccaagtacttcttgtggctcattgactgaaagactactgagacaaaatgctgagctgacagggcatatcagtcaactgactgaagagaagaatgacttaaggaacatggttatgaagctggaagagcagatcaggtggtatcgacagacaggagctggtagagataattcttccaggttttcattgaatggtggtgccaacattgaagccatcattgcctctgaaaaagaagtatggaacagagaaaaattgactctccagaaatctttgaaaagggcagaggctgaagtatacaaactgaaagctgaactaagaaatgactctttacttcaaactctgagccctgattctgaacatgtcactttaaagagaatttatggtaaatacttgagggcagaaagttttcgaaaggctctcatttaccagaagaaatacctgctgctgttactgggtgggttccaggaatgtgaagatgccaccttggccctgcttgcccggatgggggggcagccagctttcacggatctagaggtgatcaccaatcgcccaaagggcttcaccaggtttcggtcggccgtcagagtatccattgcaatttccagaatgaaatttttggttcgacggtggcatcgagtcacaggttctgtttccatcaatattaacagagatggctttggactgaatcaaggtgcagaaaagactgactcattttatcattcttctggtgggctggagttatatggagaaccaagacatactacgtatcgctcaagatcagatctggactatattaggtcccctttaccatttcagaataggtacccaggcactccagctgatttcaatcctggttctttagcatgttctcagcttcagaattacgatcctgacagagccctaacagattatatcactcggctagaggcactgcaaagacgacttggaactatacagtcaggttcaactactcaatttcatgctggcatgagaagataatcctttgaaacatcattaattgaagtgattttaaatagatttccttttgtaaatcaatggttcttttgtgcttttgtattgtgaatattcaatgggaccaatatgaacacagcttatgattgtatacaaatcccttgccagcacatgaaaacaaactggaatttgtatatataagcattgtgtatgtattcatgcacaataattattgaattacctgtatatttgtggaatgctaatttaaaacattaaattataaaccttgtgtatttatcaaatgggtgaaaagattaaacttttacgcattacaatactgctgaatgtgtagctcgaggtgtcctgcacttttcttataaggctactgaagttacatgttttgcctaatatattctactggtgatgaagacagataatatcacttgtagagacctatttttgtataatggtagaagttttgaattttatggggtattttgtcaagtactgaaataaaaatgacttcaccattttcaccacactgt

SEQ ID NO: 6720 - protein, 3911 aa, Homo sapiens; identical to SEQ ID NO: 879

SEQ ID NO: 6721 - DNA, 538 bp, Homo sapiens
gtttgagagagcgggagagtggaagaagagtttgaaggaggaagagaccagaccttggagaatcttgcagactttggaagccattggaaagttttctctttttattcctaaatatatcatatttatgatcttatatcaaatgtcgagatattttatatttatgatttatatcaaatgtagagatattttatatatttacttgcctaaatagagtcaagaaattcgaattgcttaacgatttttttgtttgtttcctgggtgacagagtgagtatttgttaatttgggttgtgagtacataaatgtttattacttcattatttccatgtctgtacgtttaaaatcttttagaacaaaaaatcaaagatgagtcatgctagctataccaaatatcacaatttagtataaaactgaggtaatgaaaacattgtgctactttccttgaaaaagaaaggtagatcaatgcaacagcacgaagatagaaaaaaaattagacttcagttctcatgaatttttaaactcttgtagtcagtatatgc

SEQ ID NO: 6722 - protein, 38 aa, Homo sapiens
FISNVEIFYIFTCLNRVKKFELLNDFFVCFLGDRVSIC

SEQ ID NO: 6723 - DNA, 687 bp, Homo sapiens
attcatgatgagatttcagtgtcaagcatggatgcttctagacaactaatgttgaatgaagaacagttggaagatatgagacaggaacttgtacgacaataccaagaacatcaacaggcaacggaattgttaaggcaagcacatatgcggcaaatggagagacagcgagaagaccaggaacagctacaagaagagattaagagacttaatagacaattagcccagaatggaaatgaaaaccaaggagaagttgaagaacaaacatttaaagaaaaggaattagacagaaaacctgaagatgtgcctcctgagattttgtctaatgaaaggtatacaaaatgtgtactttttcagtgcaaagtaaattaaaatggttgtttcaatgtaatagactttgtccttatttttatcttgtacattgatactttgtcttaaaaatcatcataccatctgtgtatgaaacatgtccatgtatgtgtagtatgtaaaggattttcagtttttcatcattaaatagataacattttaaaaaaatcttttctatataaattttgattggatattaatcacatacttaactgttaatcacctgatgttagcaaaacttttccttactttgattttgtagaggttaatataaaaatgtgaaatattaagtgagaatagttatcctacattagtattaaa

SEQ ID NO: 6724 - protein, 113 aa, Homo sapiens
MDASRQLMLNEEQLEDMRQELVRQYQEHQQATELLRQAHMRQMERQREDQEQLQEEIKRLNRQLAQNGNENQGEVEEQTFKEKELDRKPEDVPPEILSNERYTKCVLFQCKVN

SEQ ID NO: 6725 - DNA, 1396 bp, Homo sapiens
gctcagttcagaagagcttttccttttgaatagagtgaagcagcaagagcaagagaaataatgttacaactgcatttctcaagactgctgctatggagatttcaaacttgaccttccctgccaggttctgctttgaaggcttacttattactacagacatcgctgatattaaaagcagttttattgctcgtctaattagatgtttatatttttattcttctcttcaaggacttaattatgctagtttaaaaggtgtttttgtttgcttgcttttatttttgttttttgattttttttggtttttgttttggtttgggtttttttgagggggcatcaagattgatagagacctaagtttttttagatttgtagtttttttcctggactttccccttccttttattgtgcagttgtatgaattaattttataacatttatttgatagtgctaaaaaagaaactttttatactgctatggtagatcttgataaactaaaaagaactttttaatgtattagaaaattgataaagcaaattaggaatctcggcagctgtatcttctgggatggattcttatagcacctatttggcaactgtcaaagtcagtggctcgtggttagaagagcaagatgaagacatttatgaggttgaatctcgcgtgcctttaccacatccttttcctctttgtgaacatttggatgaaaataactcagtaattgttaatacttctattttccattttattcataaaagaaacgggcatatattaaagcttatttctaaaatttcactgcctacccctccttattcacttgaacatgcgaaagtgacacagacagagttgatgcgtgagtcatttagacagaaacaagaagcaacagagtcccttaagtgccaagaggaacttcgagagcgccttcatgaggagtccagggccagagaacagctagctgtggagctcagtaaggctgagggcgtcattgatggctatgcagatgaaaaaactctttttgaaaggcaaattcaggaaaaaactgatataatagatcgtcttgagcaggagttgttatgtgcaagtaacaggttgcaagaattggaggcagagcaacagcagatccaagaagaaagagaattactgtccagacaaaaggaagctatgaaagcagaggcaggcccagttgaacaacaattactacaggagacagaaaaattaatgaaggaaaaactagaagtacaatgtcaagctgaaaaagtacgtgatgaccttcaaaaacaagtgaaagctctagaaatagatgtggaagaacaagtcagtaggtttatagagctggaacaagaaaaaaatactgaactaatggatttaagacagcaaaaccaagcattggaaaagcagttag

SEQ ID NO: 6726 - protein, 276 aa, Homo sapiens
MDSYSTYLATVKVSGSWLEEQDEDIYEVESRVPLPHPFPLCEHLDENNSVIVNTSIFHFIHKRNGHILKLISKISLPTPPYSLEHAKVTQTELMRESFRQKQEATESLKCQEELRERLHEESRAREQLAVELSKAEGVIDGYADEKTLFERQIQEKTDIIDRLEQELLCASNRLQELEAEQQQIQEERELLSRQKEAMKAEAGPVEQQLLQETEKLMKEKLEVQCQAEKVRDDLQKQVKALEIDVEEQVSRFIELEQEKNTELMDLRQQNQALEKQ

SEQ ID NO: 6727 - DNA, 1075 bp, Homo sapiens
caggataacccagcatcaggggaaaagtttgcctatgtgccatttggagctgccaaggttctgaaacctgctgaatagaatggtcctctccatcactatagggagactcagtgagagaaagcacctgcatgccttcattatggacagctctcagtaatccctggaaaccaaaacccaagagccagaattatgacaacttcttcacagactgaaaaattagacttacaaacagaaataaattttaagcaagatagcttgcagagagaaaactccagcccaacattactgaatgccttcttcctgtggaggggtaagccaaccccagcagatggcctatgactttccatagctctcatctctaagttccttctgtttggctaatgtactcttcctaggtttactgataagctactgatttgaccaaaataaatacatgggctctaacttctactctttgagactactttaaaaattctggcaaacgaatacatcaggaataagaattattaagaaaaaaagtcttcatacatattatcattaatctcttactttattatctgtgaaatgtggaaataaaatagatctctcagattccttctagctaagcaattctctcttcagaaatgatcccaccatataacttctaatgaactgctatgttcaacatagaaacaacactggctgagttaataaaaggtatctatcttttagtacctttattttctttggaaaggaatctgttgcactttcactttcttctcctcggccttctgatgctatgtcaaatccctgactgtgtgtaagataaattccctgaccccagtctgatccagaatctaaaataaagaaaataatttgctgttaaaaaaaaaaaaatcaaaccccagtccccaaaaaactattatttcttaaacaactactacaaacattacaaatatttatataacttaccactggagcatatttctctagtctggtaagcatcagaatgtgctagctcaggaattgaggatccctaattagagaaaacaaaaagtacatatattttttgctttaataaaaatagaatacaatg

SEQ ID NO: 6728 - protein, 49 aa, Homo sapiens
MTTSSQTEKLDLQTEINFKQDSLQRENSSPTLLNAFFLWRGKPTPADGL

SEQ ID NO: 6729 - DNA, 1368 bp, Homo sapiens
tgaaaactaactatcgttatatgtactttgctaggtttatgatagttctcaatctcatgagagcttctcagactggcgaggtgaactactgcttgcccttcaacaagttttcttagaagagcgtagtgttttactagcagcatttcggacggagctgacagctctaggtactacagatgcagttggtttactaaactgtttggaacagagaatacaagaacagggtgttgaatatcaagcagctatggaatgcctccagaaagcagatagaaggagtttgttatctgaaattcaggcactgcatgcacaaatgaatggtaggaaaattactctgaaaagagaacaagagagtgagaaaccaagccaaggtatgttgtatgacaagctcatatggttacacaaacaggtgaaaagatttcactttgttttctttcttattattattaagttaaaacatattttcttggtcacattttcttctcattctcataatgttaaggatacaatctatattaattactctaggggttagaggattgtctaattggtttaaacagctacgttgactttaaaataaactgccattcccctgataaggttaagcccattggattcattctttttctttattttagagctgtatgttaagaaaacagtctttccaatcataaaacagaaaatactctttagaggaaaatccacaatgcatgtaactaattattttttaatccttttttaaaaaaattgtgagccataacatacagaaaattacaaattgcaaatatgcagtatgacgcatttttaaatgagtatctatggaaacatcacccatgtgaatatagccagtatcccaacagccccttctcccaagcacatgctcctctgagtaacttagaggtaatcattgttctgatttttctttagttttactatctatttatatattcctaaaacatttaagtttcaagtttttttctgtttttgaactttatcaatctgtatgtattttttatcttgtttctttcacctctctgtaacattcttccaacattcttccaagttactgcatttttcaagttactgcattcttccaaattagtagtagaacattcttccaagttactgcatttatctctagttcattcattcttgttactctataactctatgaccctgtgtagggccaggcacggtggcttacacctgtaatcccagcactttgggaggctgacgtgggtggatcacgaggtcagaagttcaagatgagcctagccaaaatggtgaaacccagtctctactaaaaatacaaaaattagccaggcgtggtggcgggtgcctgtaaggccagccactcaggagactgaagca

SEQ ID NO: 6730 - protein, 95 aa, Homo sapiens [sequence omitted]

SEQ ID NO: 6731 - DNA, 461 bp, Homo sapiens
gttacgttgcttcacatctttgccaacagttagtatagtcagacttctgttgccaatctgatgggtgtgcagtggattcttattgtggttttaattggctgttctctagttcctgaagggtttagtcctttttcatatggtaattggctagttggatttttatttttgtgatatgcttgtttaggtactttttgataacagtattggtcttgaactcctggccttaagcagtcctccctcccacctcagcctcccaaagtgctgggattacaggtgtgagccaccatgcctggactgcattaccaactcttgggactataatttttcatgtttcctttgaagtaatctccttaactacaaatcagttcttatcaacaaatatttataaaccaaatatgagttgcttgattatgtttcaaatattaatcatgttctgtgtagaactcttggaatataatata

SEQ ID NO: 6732 - protein, 36 aa, Homo sapiens
MGVQWILIVVLIGCSLVPEGFSPFSYGNWLVGFLFL

SEQ ID NO: 6733 - DNA, 4480 bp, Homo sapiens
gtctgaacttaggaggcagaggttgcaatgagttgggatcgtgccattgtactccagcttggacgacagggcaagactctgtctcaaaaaaaaaaaacaaaaaaaaaaaacaaagcagaagcattcttaccactgagtttaagaaggaaaaaaaaaagcaggttaaaattacttcagaaaagagagtcataatgagataaacatatcactttaaacgtaggcgtaattgaagatgtcttttagagatagattaatattgttttacttaggttaaatagaacaccattgaaagcttaatgtcacagattcacatttatgtaaatccttaacctctaaagtttttagaagcctaaattaaacatgattgattatcatctaaagctaatgttatttctgtctcctaacgtcagtaatatgaattgtaatgtgaattgttgaactttgatagtattttttaagttaaaaatgtttttcttattagagtagtatagtattacatatttatggtagaatacagaaaagaatagagtgaaaatcatcccttgaatcacctaaatcctaaaataatgactacctaacacctgggtaaatatgtctccagaccttttcaatgtgcatgtgtacataagcttgtatttttcataaaaaaggaatcctgatacatattttataacatactttttttcatttaacatactgaggcatttaaaattttcagtttgtttttattgtagcaaacatgtagtaagggtttggttggctttcaatggataaaaggacggtatccaaaggggggtttgaatttcccacttctgggaacagactcctattaaagttccaggggactatctgcagtggggtgctgaacaaaagatatcagcagtgctcatcattgtagtaacttgggtaactcctccaaatactttgtgtgactatcagaaatctttggaattttttaatgtacattcttgaaattctgaatgtacaaatatgagttccatttaaagtttttttttttaattttaagtcttgcatccattaatgtattctcttaaacttttatccttatatatttatagctctgaaatcttggccactagcactatgaggaaaacatgcctgaaatttatttttatacgttaccaaccctttttgtttgtttttttgagacagggtctcactgtcactgaggctggagtacagtggcatggtctcaactcattgcaacctccacctcccgggctcaagcaatccccccacctcagcctcctgagtcgatgggactacaggcacatgccagcacgcccagctaatttttgtatttttagtagagacagagtttcaccatgttgcccaggctggtcttgaactcctggccttaagcagtcctccctcccacctcagcctcccaaagtgctgggattacaggtgtgagccaccatgcctggactgcattaccaactcttgggactataatttttcatgtttcctttgaagtaatctccttaactacaaatcagttcttatcaacaaatatttataaaccaaatatgagttgcttgattatgtttcaaatattaatcatgttctgtgtagaactcttggaatataatatacagcagaagcagtctcaaatgctggagatgcaagtggagctcagcagtatgaaagacagagcaacggaactgcaggagcagctgagttctgagaaaatggtggttgctgaactgaagagtgagcttgcacaaactaaattggaactagaaacaacactcaaggcacagcataaacacctaaaagaattggaggctttcaggttggaagttaaagataagacagatgaagtacatttgcttaatgacacattagcaagtgaacagaaaaaatcaagagagctccagtgggctttggagaaagagaaagccaagttgggacgcagtgaagaacgggataaagaagaacttgaggatctgaagttttcacttgagagtcagaaacaaaggaatcttcagctaaatctacttttggaacaacagaaacaactactgaacgaatcccagcaaaaaatagaatcacagagaatgctatatgatgcccagttgtcagaagaacaaggtcgaaacttagagcttcaggtacttcttgaatctgagaaagttcgaattcgggaaatgagtagtaccctagatagggagcgggaattgcacgcacagctgcagagcagtgatggtactggacagtctcggccacccttgccctcagaggacctactgaaagagctgcagaaacagctagaggaaaaacacagtcgcatagtagaattgttaaatgagactgaaaaatataaactggattctttgcaaacacgacagcaaatggaaaaagataggcaggttcacaggaaaacactgcagacagaacaggaggccaacactgagggacagaaaaaaatgcatgagctccagtccaaagtggaagatcttcagcgccagctggaagagaaaagacaacaagtttataagttagaccttgaaggacagcgactacaaggaatcatgcaggaattccagaagcaagaactagaacgagaagaaaaacgagaaagtagaagaattctgtatcagaaccttaatgagccaaccacgtggagcttaaccagtgatagaactagaaattgggttcttcaacagaaaatagaaggagaaacaaaagaatcaaactacgctaaattgattgaaatgaatggaggaggaaccggctgtaatcatgaattagaaatgatcagacaaaagcttcaatgtgtagcttcaaaactacaggttctaccccagaaagcctctgagagactacagtttgaaacagcagatgatgaagatttcatttgggttcaggaaaatattgatgaaattattttacaactacagaaattaactggccagcaaggtgaagagcccagcttggtgtccccaagtacttcttgtggctcattgactgaaagactactgagacaaaatgctgagctgacagggcatatcagtcaactgactgaagagaagaatgacttaaggaacatggttatgaagctggaagagcagatcaggtggtatcgacagacaggagctggtagagataattcttccaggttttcattgaatggtggtgccaacattgaagccatcattgcctctgaaaaagaagtatggaacagagaaaaattgactctccagaaatctttgaaaagggcagaggctgaagtatacaaactgaaagctgaactaagaaatgactctttacttcaaactctgagccctgattctgaacatgtcactttaaagagaatttatggtaaatacttgagggcagaaagttttcgaaaggctctcatttaccagaagaaatacctgctgctgttactgggtgggttccaggaatgtgaagatgccaccttggccctgcttgcccggatgggggggcagccagctttcacggatctagaggtgatcaccaatcgcccaaagggcttcaccaggtttcggtcggccgtcagagtatccattgcaatttccagaatgaaatttttggttcgacggtggcatcgagtcacaggttctgtttccatcaatattaacagagatggctttggactgaatcaaggtgcagaaaagactgactcattttatcattcttctggtgggctggagttatatggagaaccaagacatactacgtatcgctcaagatcagatctggactatattaggtcccctttaccatttcagaataggtacccaggcactccagctgatttcaatcctggttctttagcatgttctcagcttcagaattacgatcctgacagagccctaacagattatatcactcggctagaggcactgcaaagacgacttggaactatacagtcaggttcaactactcaatttcatgctggcatgagaagataatcctttgaaacatcattaattgaagtgattttaaatagatttccttttgtaaatcaatggttcttttgtgcttttgtattgtgaatattcaatgggaccaatatgaacacagcttatgattgtatacaaatcccttgccagcacatgaaaacaaactggaatttgtatatataagcattgtgtatgtattcatgcacaataattattgaattacctgtatatttgtggaatgctaatttaaaacattaaattataaaccttgtgtatttatcaaatgggtgaaaagattaaacttttacgcattacaatactgctgaatgtgtagctcgaggtgtcctgcacttttcttataaggctactgaagttacatgttttgcctaatatattctactggtgatgaagacagataatatcacttgtagagacctatttttgtataatggtagaagttttgaattttatggggtattttgtcaagtactgaaataaaaatgacttcaccattttcaccacactgt

SEQ ID NO: 6734 - protein, 803 aa, Homo sapiens
MSCLIMFQILIMFCVELLEYNIQQKQSQMLEMQVELSSMKDRATELQEQLSSEKMVVAELKSELAQTKLELETTLKAQHKHLKELEAFRLEVKDKTDEVHLLNDTLASEQKKSRELQWALEKEKAKLGRSEERDKEELEDLKFSLESQKQRNLQLNLLLEQQKQLLNESQQKIESQRMLYDAQLSEEQGRNLELQVLLESEKVRIREMSSTLDRERELHAQLQSSDGTGQSRPPLPSEDLLKELQKQLEEKHSRIVELLNETEKYKLDSLQTRQQMEKDRQVHRKTLQTEQEANTEGQKKMHELQSKVEDLQRQLEEKRQQVYKLDLEGQRLQGIMQEFQKQELEREEKRESRRILYQNLNEPTTWSLTSDRTRNWVLQQKIEGETKESNYAKLIEMNGGGTGCNHELEMIRQKLQCVASKLQVLPQKASERLQFETADDEDFIWVQENIDEIILQLQKLTGQQGEEPSLVSPSTSCGSLTERLLRQNAELTGHISQLTEEKNDLRNMVMKLEEQIRWYRQTGAGRDNSSRFSLNGGANIEAIIASEKEVWNREKLTLQKSLKRAEAEVYKLKAELRNDSLLQTLSPDSEHVTLKRIYGKYLRAESFRKALIYQKKYLLLLLGGFQECEDATLALLARMGGQPAFTDLEVITNRPKGFTRFRSAVRVSIAISRMKFLVRRWHRVTGSVSININRDGFGLNQGAEKTDSFYHSSGGLELYGEPRHTTYRSRSDLDYIRSPLPFQNRYPGTPADFNPGSLACSQLQNYDPDRALTDYITRLEALQRRLGTIQSGSTTQFHAGMRR

SEQ ID NO: 6735 - DNA, 2404 bp, Homo sapiens
gggaaggggatgaggggattttgagtccctattcttccgttccagttgattttgtcacaacaggcattgacatagtttaactgggcaattgtgaaatttgacatttgttctatgttcatatttaaacgtgtgatgtgatttttgtaggaaatgtatatactgtttatagatgggctgtgaaattttatcttggaatcttttttagaatgaaatttttggttcgacggtggcatcgagtcacaggttctgtttccatcaatattaacagagatggctttggactgaatcaaggtgcagaaaagactgactcattttatcattcttctggtgggctggagttatatggagaaccaagacatactacgtatcgctcaagatcagatctggactatattaggtcccctttaccatttcagaataggtaagaatatgagaaaacctgcctggaattgttaaatgtattaatatttaacagagataaatggacatttttagggctttgacttctttgcattgagatagacatctttgttatatataatttacataatatgaccaagtgcggtggctcacacctataatcccagcactttgggaggctgaggcgggcagatcatgaggtcaggagttcaagaccagctagttggagactagcctggccaacatggtgaaaccctgtctctactaaaaatacaaaaaattagccaggcgtggtggcaggcgcctgtggtcccagctacttgggaggctgaggcaggagaatggtgtgaacccgggaggcggagctggcagtgagctgagattgtgccactgcactctggcctgggcaacggagcgagactctgtctcaaaaaaaaatacaaaaaaattagccaggcatggtggtgggtgcctgtaatcccagctactcaggaggctgaggcaggagaatcgcttgaactcaggaggtggaggttgcagtgagccgaggtcacgccactgcactctagcctgggcaacaaagcaagatttggtctccaaaaaaaaaaaaaaagaaaaaaaatatacataacctaaggcttaatgtaaaaatgtaaaaaccagtgtttaaatttgtaactgatttccaagggtatagcaaacaagctgaccaagtgttatttagtgtatgctatggttagatattgggaaaagtattgactaaaattgatactctgatcattatgaaaagcttaacagtcttcatgacaagatacatttatacatacccaatttattgagacctctgccacaagcattgtattggacattcttatgttgacttagtagcatctttgaattcattggagagttgtctctttctcatcccaagctccaaagctgaagcttggaggagatacattatgtgtgtacaagtgacccacctttttggggaagggagtggaggcaggttggtaacttatatgcatatttctggataacttgattcatgtacatatttttaatcctttaggtacccaggcactccagctgatttcaatcctggttctttagcatgttctcagcttcagaattacgatcctgacagagccctaacagattatatcactcggctagaggcactgcaaagacgacttggaactatacagtcaggtgctctgagtttaaccacatcttggcagcaccacagtgcgagacccacagctcccctttctttgaaattctttcacactcattaggataatcaaagcttccagtttagtgcatgagctaattattaagttagccaaagcttaaactcttgtaaccagcagagaaactgactttaaataatttaagtgaaaatatgatttatcaccccagatcccactcctcccaaaaatgatttcctactatgttcattcagcggactgatgacacaaaatgcacaatgagcaccagtgtgcaaggtactctgagtctacagagcctaactggagaacgtattcctaagtagcgcatggcagaaagtggtaaggccgtgccgcagcactccagcctgggcagcagagcgagaccctgtctcaaagaaaaaaaaaaaaaaaagaaagtggtaaggcatgcaaatcgggtggagttaaggaggaagcacttactttaagcacttaatgtaaccattatccctgctactatattgtgcttttatgtatcatcgaaaaaaactatcccatttaaaatactttgtaaggattattttttctttgttcaaaaacaaaaaacaagtcatactttaaaataaaggtggattccctgttcatggaaggaaaacctcttttccctatctcacttcagttcactcctgattcagagactttgaatcattgagtagtttatctcttccttcaagaaatcatttgtttacacccaagcatcttgtagtaatagg

SEQ ID NO: 6736 - protein, 72 aa, Homo sapiens
MKFLVRRWHRVTGSVSININRDGFGLNQGAEKTDSFYHSSGGLELYGEPRHTTYRSRSDLDYIRSPLPFQNR

SEQ ID NO: 6737 - DNA, 3379 bp, Homo sapiens
cgcgattctcagggattgatcgcctcttcaggtaagttatcttccggccccgtaccactgtgccacaggcgcagcccgcttcctcaggtgccctatcccgcgcaagaagaccacggcttcacagagtgttatttaaggggcgtggccagcggaacatcccgccccattctgtgacgcacggggtggcgcgcgtgggacccgaggggtggggctgggtttagtaggagacctggggcaaggccccctgtggacgaccatctgccagcttctctcgttccgtcgattgggaggagcggtggcgacctcggccttcagtgtttccgacggagtgaatggcggcggcggctgggatgctgctgctgggcttgctgcaggcgggtgggtcggtgctgggccaggcgatggagaaggtgacaggcggcaacctcttgtccatgctgctgatcgcctgcgccttcaccctcagcctggtctacctgatccgtctggccgccggccacctggtccagctgcccgcaggggtgaaaagtcctccatacattttctccccaattccattccttgggcatgccatagcatttgggaaaagtccaattgaatttctagaaaatgcatatgagaagtatggacctgtatttagttttaccatggtaggcaagacatttacttaccttctggggagtgatgctgctgcactgctttttaatagtaaaaatgaagacctgaatgcagaagatgtctacagtcgcctgacaacacctgtgtttgggaagggagttgcatacgatgtgcctaatccagttttcttggagcagaagaaaatgttaaaaagtggccttaacatagcccactttaaacagcatgtttctataattgaaaaagaaacaaaggaatactttgagagttggggagaaagtggagaaaaaaatgtgtttgaagctctttctgagctcataattttaacagctagccattgtttgcatggaaaggaaatcagaagtcaactcaatgaaaaggtagcacagctgtatgcagatttggatggaggtttcagccatgcagcctggctcttaccaggttggctgcctttgcctagtttcagacgcagggacagagctcatcgggaaatcaaggatattttctataaggcaatccagaaacgcagacagtctcaagaaaaaattgatgacattctccaaactttactagatgctacatacaaggatgggcgtcctttgactgatgatgaagtagcagggatgcttattggattactcttggcagggcagcatacatcctcaactactagtgcttggatgggcttctttttggccagagacaaaacacttcaaaaaaaatgttatttagaacagaaaacagtctgtggagagaatctgcctcctttaacttatgaccagctcaaggatctaaatttacttgatcgctgtataaaagaaacattaagacttagacctcctataatgatcatgatgagaatggccagaactcctcagactgtggcagggtataccattcctccaggacatcaggtgtgtgtttctcccactgtcaatcaaagacttaaagactcatgggtagaacgcctggactttaatcctgatcgctacttacaggataacccagcatcaggggaaaagtttgcctatgtgccatttggagctgggcgtcatcgttgtattggggaaaattttgcctatgttcaaattaagacaatttggtccactatgcttcgtttatatgaatttgatctcattgatggatactttcccactgtgaattatacaactatgattcacacccctgaaaacccagttatccgttacaaacgaagatcaaaatgaaaaaggttgcaaggaacgaatatatgtgattatcactgtaagccacaaaggcattcgaagagaatgaagtgtacaaaacaactcttgtagtttactgtttttttaagtgtgtaattctaaaagccagtttatgatttaggattttgttaactgaatggttctatcaaatataatagcatttgaaacattttctaatagttatgatacttatacatgtgctttcaggaagttccttggtgaaacaattgttgaggggggatctaggtaattggcagattctaaataatataatttccagatagtaattttaagagtactcatcgctcttgccaaataagttcagggtattcaaatcttggactagtcctgcaaggtataaagaataaaaatcccagtgagatacttggaaaccacagtttattattatttatctgggcaattattgtgtgtgtgaggatggaagggtagggaataatcgaacatctaaagccttgaataagagaatactaattgttttggtatgatgatactcagaaatggagatattataggaaaaagaaatcctttggaattttaactaaaatcactgcatatgggaaattaagagatccaggaccatatttgataagagttcctaaaaataatgtaattattaatgctaaagactgctcatgtatcttgatctaattactaaataattacatatttatttacctgataaatatgtatctagttctacaaggtcacatttatgtggaagtccaaagtcaagtccttaggggataattttgttttggctcagttgttccctgcttcctttttttttttttttttttgagatggagtctcgctctgttgcccaggctggagtgcagtggtgcgatctcagctcactgcatcctctgcctcccgggttcaagcaattctctgcctcagcctcccaagtagttgggattacaggcacctgccaccatgcctggctaattttttgtatttttagtagagacgggggtttcactatgttggctaggctggtcttgaactcctgacctcgtgatccacccgccttggcctcccaaagtgctgggattacaggcatgagccaccgcacctggccttccctgcttcctctctagaatccaattagggatgtttgttactactcatattgattaaaacagttaacaaacttttttctttttaaaatgtgagatcagtgaactctggttttaagataatctgaaacaaggtccttgggagtaataaaattggtcacattctgtaaagcacattctgtttaggaatcaacttatctcaaattgtaactcggggcctaactatatgagatggctgaaaaaataccacatcgtctgttttcactaggtgatgccaaaatattttgctttatgtatattacagttctttttaaaacactggaagactcatgttaaactctaattgtgaaggcagaatctctgctaatttttcagattaaaattctctttgaaaaaatacag

SEQ ID NO: 6738 - protein, 509 aa, Homo sapiens; identical to SEQ ID NO: 883

SEQ ID NO: 6739 - DNA, 3666 bp, Homo sapiens
tctgcctcaactgtggcaagctgggtcttccacgtcaccaagtgtcattttcaccgtgcctgtatggtccgctgttcatcctgttagcggaccccgaaatcaggcaggaaaataaagctcagtgggagggcctcggagcaagacaatcccaccaagatggactcgggttgattaacgtgagtgaacctctgaggaccagaatccagactagtaattctccatcccggctgctcgttagatgcccggaccgacccccccagaccaattcaatcagaacattcggaggggcttgtaaaatctcccggggagattccggtacgaaagccaaagactcagacgcccgttctccacccgcctgcagcggccagcgcgggtccctcttagggaattgaatgcaggccccaggcctcctcctcgagtatcccagtgtgaccgatggccagctcacaaacgcgcagtgggtgcggccgcgccagggcgcagcggagcagagggcccggccgctttcggcctgggaaagaggagccacggcccggagaggcgtcagtgctgggctgcgcctgcggaggtcctcgcaattgctggactcaaccgcgcgcgccccctaccggtcctgcgaaggagccgcagccgccgcgggaggccacaggaaataatctgacagctctacctagtgctatctacaatattttttcactgaaggagataaattttgatgacaaccctttgctgagacctccagtggaaatctgtaaaggaaaacagttgtatactattgcacgctatctacagagggcagatgaaagagatgaaaagtcctccatacattttctccccaattccattccttgggcatgccatagcatttgggaaaagtccaattgaatttctagaaaatgcatatgagaagtatggacctgtatttagttttaccatggtaggcaagacatttacttaccttctggggagtgatgctgctgcactgctttttaatagtaaaaatgaagacctgaatgcagaagatgtctacagtcgcctgacaacacctgtgtttgggaagggagttgcatacgatgtgcctaatccagttttcttggagcagaagaaaatgttaaaaagtggccttaacatagcccactttaaacagcatgtttctataattgaaaaagaaacaaaggaatactttgagagttggggagaaagtggagaaaaaaatgtgtttgaagctctttctgagctcataattttaacagctagccattgtttgcatggaaaggaaatcagaagtcaactcaatgaaaaggtagcacagctgtatgcagatttggatggaggtttcagccatgcagcctggctcttaccaggttggctgcctttgcctagtttcagacgcagggacagagctcatcgggaaatcaaggatattttctataaggcaatccagaaacgcagacagtctcaagaaaaaattgatgacattctccaaactttactagatgctacatacaaggatgggcgtcctttgactgatgatgaagtagcagggatgcttattggattactcttggcagggcagcatacatcctcaactactagtgcttggatgggcttctttttggccagagacaaaacacttcaaaaaaaatgttatttagaacagaaaacagtctgtggagagaatctgcctcctttaacttatgaccagctcaaggatctaaatttacttgatcgctgtataaaagaaacattaagacttagacctcctataatgatcatgatgagaatggccagaactcctcagactgtggcagggtataccattcctccaggacatcaggtgtgtgtttctcccactgtcaatcaaagacttaaagactcatgggtagaacgcctggactttaatcctgatcgctacttacaggataacccagcatcaggggaaaagtttgcctatgtgccatttggagctgggcgtcatcgttgtattggggaaaattttgcctatgttcaaattaagacaatttggtccactatgcttcgtttatatgaatttgatctcattgatggatactttcccactgtgaattatacaactatgattcacacccctgaaaacccagttatccgttacaaacgaagatcaaaatgaaaaaggttgcaaggaacgaatatatgtgattatcactgtaagccacaaaggcattcgaagagaatgaagtgtacaaaacaactcttgtagtttactgtttttttaagtgtgtaattctaaaagccagtttatgatttaggattttgttaactgaatggttctatcaaatataatagcatttgaaacattttctaatagttatgatacttatacatgtgctttcaggaagttccttggtgaaacaattgttgaggggggatctaggtaattggcagattctaaataatataatttccagatagtaattttaagagtactcatcgctcttgccaaataagttcagggtattcaaatcttggactagtcctgcaaggtataaagaataaaaatcccagtgagatacttggaaaccacagtttattattatttatctgggcaattattgtgtgtgtgaggatggaagggtagggaataatcgaacatctaaagccttgaataagagaatactaattgttttggtatgatgatactcagaaatggagatattataggaaaaagaaatcctttggaattttaactaaaatcactgcatatgggaaattaagagatccaggaccatatttgataagagttcctaaaaataatgtaattattaatgctaaagactgctcatgtatcttgatctaattactaaataattacatatttatttacctgataaatatgtatctagttctacaaggtcacatttatgtggaagtccaaagtcaagtccttaggggataattttgttttggctcagttgttccctgcttcctttttttttttttttttttgagatggagtctcgctctgttgcccaggctggagtgcagtggtgcgatctcagctcactgcatcctctgcctcccgggttcaagcaattctctgcctcagcctcccaagtagttgggattacaggcacctgccaccatgcctggctaattttttgtatttttagtagagacgggggtttcactatgttggctaggctggtcttgaactcctgacctcgtgatccacccgccttggcctcccaaagtgctgggattacaggcatgagccaccgcacctggccttccctgcttcctctctagaatccaattagggatgtttgttactactcatattgattaaaacagttaacaaacttttttctttttaaaatgtgagatcagtgaactctggttttaagataatctgaaacaaggtccttgggagtaataaaattggtcacattctgtaaagcacattctgtttaggaatcaacttatctcaaattgtaactcggggcctaactatatgagatggctgaaaaaataccacatcgtctgttttcactaggtgatgccaaaatattttgctttatgtatattacagttctttttaaaacactggaagactcatgttaaactctaattgtgaaggcagaatctctgctaatttttcagattaaaattctctttgaaaaaatacag

SEQ ID NO: 6740 - protein, 449 aa, Homo sapiens
MKEMKSPPYIFSPIPFLGHAIAFGKSPIEFLENAYEKYGPVFSFTMVGKTFTYLLGSDAAALLFNSKNEDLNAEDVYSRLTTPVFGKGVAYDVPNPVFLEQKKMLKSGLNIAHFKQHVSIIEKETKEYFESWGESGEKNVFEALSELIILTASHCLHGKEIRSQLNEKVAQLYADLDGGFSHAAWLLPGWLPLPSFRRRDRAHREIKDIFYKAIQKRRQSQEKIDDILQTLLDATYKDGRPLTDDEVAGMLIGLLLAGQHTSSTTSAWMGFFLARDKTLQKKCYLEQKTVCGENLPPLTYDQLKDLNLLDRCIKETLRLRPPIMIMMRMARTPQTVAGYTIPPGHQVCVSPTVNQRLKDSWVERLDFNPDRYLQDNPASGEKFAYVPFGAGRHRCIGENFAYVQIKTIWSTMLRLYEFDLIDGYFPTVNYTTMIHTPENPVIRYKRRSK

SEQ ID NO: 6741 - DNA, 325 bp, Homo sapiens
ttttttcaaagagaattttaatctgaaaaattagcagagattctgccttcacaattagagtttaacatgagtcttccagtgttttaaaaagaactgtaatatacataaagcaaaatattttggcatcacctagtgaaaacagacgatgtggtattttttcagccatctcatataaaccattcagttaacaaaatcctaaatcataaactggcttttagaattacacacttaaaaaaacagtaaactacaagagttgttttgtacacttcattctcttcgaatgcctttgtggcttacagtgataatcacatatattcgttccttg

SEQ ID NO: 6742 - protein, 44 aa, Homo sapiens
SKIFWHHLVKTDDVVFFQPSHINHSVNKILNHKLAFRITHLKKQ

SEQ ID NO: 6743 - DNA, 1756 bp, Homo sapiens
gggtggcgcgcgtgggacccgaggggtggggctgggtttagtaggagacctggggcaaggccccctgtggacgaccatctgccagcttctctcgttccgtcgattgggaggagcggtggcgacctcggccttcagtgtttccgacggagtgaatggcggcggcggctgggatgctgctgctgggcttgctgcaggcgggtgggtcggtgctgggccaggcgatggagaaggtgacaggcggcaacctcttgtccatgctgctgatcgcctgcgccttcaccctcagcctggtctacctgatccgtctggccgccggccacctggtccagctgcccgcaggggtgaaaagtcctccatacattttctccccaattccattccttgggcatgccatagcatttgggaaaagtccaattgaatttctagaaaatgcatatgagaagtatggacctgtatttagttttaccatggtaggcaagacatttacttaccttctggggagtgatgctgctgcactgctttttaatagtaaaaatgaagacctgaatgcagaagatgtctacagtcgcctgacaacacctgtgtttgggaagggagttgcatacgatgtgcctaatccagttttcttggagcagaagaaaatgttaaaaagtggccttaacatagcccactttaaacagcatgtttctataattgaaaaagaaacaaaggaatactttgagagttggggagaaagtggagaaaaaaatgtgtttgaagctctttctgagctcataattttaacagctagccattgtttgcatggaaaggaaatcagaagtcaactcaatgaaaaggtagcacagctgtatgcagatttggatggaggtttcagccatgcagcctggctcttaccaggttggctgcctttgcctagtttcagacgcagggacagagctcatcgggaaatcaaggatattttctataaggcaatccagaaacgcagacagtctcaagaaaaaattgatgacattctccaaactttactagatgctacatacaaggatgggcgtcctttgactgatgatgaagtagcagggatgcttattggattactcttggcagggcagcatacatcctcaactactagtgcttggatgggcttctttttggccagagacaaaacacttcaaaaaaaatgttatttagaacagaaaacagtctgtggagagaatctgcctcctttaacttatgaccagctcaaggatctaaatttacttgatcgctgtataaaagaaacattaagacttagacctcctataatgatcatgatgagaatggccagaactcctcagactgtggcagggtataccattcctccaggacatcaggtgtgtgtttctcccactgtcaatcaaagacttaaagactcatgggtagaacgcctggactttaatcctgatcgctacttacaggataacccagcatcaggggaaaagtttgcctatgtgccatttggagctgggcgtcatcgttgtattggggaaaattttgcctatgttcaaattaagacaatttggtccactatgcttcgtttatatgaatttgatctcattgatggatactttcccactgtgaattatacaactatgattcacacccctgaaaacccagttatccgttacaaacgaagatcaaaatgaaaaaggttgcaaggaacgaatatatgtgattatcactgtaagccacaaaggcattcgaagagaatgaagtgtac

SEQ ID NO: 6744 - protein, 509 aa, Homo sapiens; identical to SEQ ID NO: 883

SEQ ID NO: 6745 - DNA, 849 bp, Homo sapiens
gggtggcgcgcgtgggacccgaggggtggggctgggtttagtaggagacctggggcaaggccccctgtggacgaccatctgccagcttctctcgttccgtcgattgggaggagcggtggcgacctcggccttcagtgtttccgacggagtgaatggcggcggcggctgggatgctgctgctgggcttgctgcaggcgggtgggtcggtgctgggccaggcgatggagaaggtgacaggcggcaacctcttgtccatgctgctgatcgcctgcgccttcaccctcagcctggtctacctgatccgtctggccgccggccacctggtccagctgcccgcaggggtgaaaagtcctccatacattttctccccaattccattccttgggcatgccatagcatttgggaaaagtccaattgaatttctagaaaatgcatatgagaagtatggacctgtatttagttttaccatggtaggcaagacatttacttaccttctggggagtgatgctgctgcactgctttttaatagtaaaaatgaagacctgaatgcagaagatgtctacagtcgcctgacaacacctgtgtttgggaagggagttgcatacgatgtgcctaatccagttttcttggagcagaagaaaatgttaaaaagtggccttaacatagcccactttaaacagcatgtttctataattgaaaaagaaacaaaggaatactttgagagttggggagaaagtggagaaaaaacatggaaaggaaatcagaagtcaactcaatgaaaaggtagcacagctgtatgcagatttggatggaggtttcagccatgcagcctggctcttaccaggttgg

SEQ ID NO: 6746 - protein, 208 aa, Homo sapiens
MAAAAGMLLLGLLQAGGSVLGQAMEKVTGGNLLSMLLIACAFTLSLVYLIRLAAGHLVQLPAGVKSPPYIFSPIPFLGHAIAFGKSPIEFLENAYEKYGPVFSFTMVGKTFTYLLGSDAAALLFNSKNEDLNAEDVYSRLTTPVFGKGVAYDVPNPVFLEQKKMLKSGLNIAHFKQHVSIIEKETKEYFESWGESGEKTWKGNQKSTQ

SEQ ID NO: 6747 - DNA, 813 bp, Homo sapiens
ttgcgcgggatagggcacctgaggaagcgggctgcgcctgtggcacagtggtacggggccggaagataacttacctgaagaggcgatcaatccctgagaatcgcgggcgacccgttttttgtgtgcccgggtgcggggtgccgggacacggcgttgaaggcgctgagcggagggatctcagggcgagctcgagcggcgacggcgcgctctgtgattgcaccgcgagcgcctgaggtgatctcggcctacatcgcgtcagcggggccttgggcgtgagcaccgccccctgtccggacgcagggtactggggcacctcgaactgtggcacctcacccttctccggggccacgtcttggggactccgacagccccaaataagccctcggggactggggttgtgaaaagcgaggtcgtgaagacgccggcctcataccgaagggtaggacggtgaggtcagccccgtcccactccaactaaaatcaacctgacaggaggtggttcaggaaaacggtcccatttggcacctcaagtctaggtccctcaagtctctacaacagtatgcaaagaaaatgttcatcttcattcttcttatagttttctggtaacttactgaaccaagcgcacacacactctccaaggacaaacatttttcagtgctgggacaatgcaaattcagctctcggcagactactacacactgtgcatgatataccaagactaaaagactcataacctacccgcagaaagagtgcatcttccatagtagctctgcaaaaagatccaaaagaaactgttaatggcctggcttaagtc

SEQ ID NO: 6748 - protein, 45 aa, Homo sapiens
FSGNLLNQAHTHSPRTNIFQCWDNANSALGRLLHTVHDIPRLKDS

SEQ ID NO: 6749 - DNA, 2883 bp, Homo sapiens
ttgcgcgggatagggcacctgaggaagcgggctgcgcctgtggcacagtggtacggggccggaagataacttacctgaagaggcgatcaatccctgagaatcgcgggcgacccgttttttgtgtgcccgggtgcggggtgccgggacacggcgttgaaggcgctgagcggagggatctcagggcgagctcgagcggcgacggcgcgctctgtgattgcaccgcgagcgcctgaggtgatctcggcctacatcgcgtcagcggggccttgggcgtgagcaccgccccctgtccggacgcagggtactggggcacctcgaactgtggcacctcacccttctccggggccacgtcttggggactccgacagccccaaataagccctcggggactggggttgtgaaaagcgaggtcgtgaagacgccggcctcataccgaagggtaggacggtgaggtcagccccgtcccactccaactaaaatcaacctgacaggaggtggttcaggaaaacggtcccatttggcacctcaagtctaggtccctcaagtctctacaacagtatgcaaagaaaatgttcatcttcattcttcttatagttttctggtaacttactgaaccaagcgcacacacactctccaaggacaaacatttttcagtgctgggacaatgcaaattcagctctcggcagactactacacactgtgcatgatataccaagactaaaagactcataacctacccgcagaaagagtgcatcttccatagtagctctgcaaaaagatccaaaagaaactgttaatggcctggcttaagtcaaattgtgtccggaattggtgggttcttcgtctcactgacttcaagtatgaagccgaccctcacggtcagtgttacagctcttaagatggcgcctctggagtttgttccttctgatgttcggatgtgttcggagtttcttccttctggtgggatcgtggtctcgctggctcaggagtgaagctgcagaccttcgcaacttccttccagaggaagatgttgactctaatgtattctgtctaggatgtgtttcataaatctggttagaagatttcccttccagcatcaacaaattgttttctaaatgtggaaaaagagacattcagtacaggctaacgtaacgtgggacagcatgcaaagccatgagaagtgggaaaatgagagagaatctgggcgtggcttacagggctgctgaagtaagacacacccttcgcttcacctgtggcctcccgcggcggctgcggctccttcgcaggaccggtagggggcgcgcgcggttgagtccagcaattgcgaggacctccgcaggcgcagcccagcactgacgcctctccgggccgtggctcctctttcccaggccgaaagcggccgggccctctgctccgctgcgccctggcgcggccgcacccactgcgcgtttgtgagctggccatcggtcacactgggatactcgaggaggaggcctggggcctgcattcaattccctaagagggacccgcgctggccgctgcaggcgggtggagaacgggcgtctgagtctttggctttcgtaccggaatctccccgggagattttacaagcccctccgaatgttctgattgaattggtctgggggggtcggtccgggcatctaacgagcagccgggatggagaattactagtctggattctggtcctcagaggttcactcacgttaatcaacccgagtccatcttggtgggattgtcttgctccgaggccctcccactgagctttattttcctgcctgatttcggggtccgctaacaggatgaacagcggaccatacaggcacggtgaaaatgacacttggtgacgtggaagacccagcttgccacagttgaggcagagctcctcagggtcttttgtcttagttatccccgagctatttttcaggaaccgacaggctcccccaccccaacaccggatgaaggccagcaactggaggccaggaataatcaagcacgctctcatttcaaagaggtgacgattgtgcccgtgtttaaaagggatgcctgagaccatgaggatttggagttttggaggcggatctgcctttggggagtgagcgtagggccctaagatgtggttgtgctttgagacaattaccaaaatacggtatttgtcagaaaacatgtagtatttgtataatttgagaatgtaattgaagaacccgatatagagcttttagaaaggggaaatagaaaacttaaaaagaatcttgcttggtatattaataccaacatctaaaatataataaaattgaataaaccagtgagttttatactatgattgaaataaaatgccactatgttcttaagagtgctagtttaacaggaaatctccaatgcattattatctagactcatctcaaaggctcacttttcatttgcatgggcccttgctatttgtagggtaggaggcagcacctcgttctggtggctgccaccttcatgaggagacactccttgttaacaggatggttagcccacggctcttcccagcccccttttccacacccagtaaattgttttagtttatggccctcagctgcagttgcaatcatcatcaaattccagttttgaatttaaaggtgaataatgaatgcaatgaactttctagaatttatgaagggcagtgatgttcctttttatctaataattctacatgtgtagcctttcagtatgctattctgtggactgaatttacaaattgtcatttgtttaatgaactgttaatataacatgatgactaactgaaaacacatacaatttgctggtattccagaagtctatggatttcgttgttttgtttaaataaaaggcattaaaagc

SEQ ID NO: 6750 - protein, 46 aa, Homo sapiens
MFGCVRSFFLLVGSWSRWLRSEAADLRNFLPEEDVDSNVFCLGCVS

SEQ ID NO: 6751 - DNA, 2194 bp, Homo sapiens
tctgcctcaactgtggcaagctgggtcttccacgtcaccaagtgtcattttcaccgtgcctgtatggtccgctgttcatcctgttagcggaccccgaaatcaggcaggaaaataaagctcagtgggagggcctcggagcaagacaatcccaccaagatggactcgggttgattaacgtgagtgaacctctgaggaccagaatccagactagtaattctccatcccggctgctcgttagatgcccggaccgacccccccagaccaattcaatcagaacattcggaggggcttgtaaaatctcccggggagattccggtacgaaagccaaagactcagacgcccgttctccacccgcctgcagcggccagcgcgggtccctcttagggaattgaatgcaggccccaggcctcctcctcgagtatcccagtgtgaccgatggccagctcacaaacgcgcagtgggtgcggccgcgccagggcgcagcggagcagagggcccggccgctttcggcctgggaaagaggagccacggcccggagaggcgtcagtgctgggctgcgcctgcggaggtcctcgcaattgctggactcaaccgcgcgcgccccctaccggtcctgcgaaggagccgcagccgccgcgggaggccacagctaacaagacttccaggagagctatctaatatgactcaacttaaagaacttgatatctcaaataatgcaatcagagagattccaagaaatataggagaattgagaaatttggttagtttacatgcatacaataatcaaataagttatcttccaccatctttgctatctttaaatgatctgcagcaactaaacctgagtggaaataatctgacagctctacctagtgctatctacaatattttttcactgaaggagataaattttgatgacaaccctttgctgagacctccagtggaaatctgtaaaggaaaacagttgtatactattgcacgctatctacagagggcagatgaaagagatggtctgcagcttcactcttgaagccagcaagaccaggaacccaccgggagaaaggaacaactccagacgcgccgccttaagagctgtaacactcactgcgaaggtctgcagcttcactcctgagccagcgagaccacgatcccaccagaaggaagaaactccgaacacatccgaacatcagaaggaacaaactccagaggcgccatcttaagagctgtaacactgaccgtgagggtcggcttcatacttgaagtcagtgagacgaagaacccaccaattccggacacaatttgacttaagccaggccattaacagtttcttttggatctttttgcagagctactatggaagatgcactctttctgcgggtaggttatgagtcttttagtcttggtatatcatgcacagtgtgtagtagtctgccgagagctggatgccaagagagagacagaaccttgtttatgttgtctgatcctcaatccccatacttctgcactttttacttttcacccacttaaggagtgtgacctgggtttccataactttgaatggaaagagacctaatacaagtggttaagaatattgtggagcccgggcagggtggctcatgcctgtaatcccagcactttgggaggctgagacgggcagatcacgaggtcaggagatcgagaccatcctggctaacacagtgaaaccctgtctctactaaaaatacaaaaaaatagctgggcatggtggcgggcgcctgtagttccagctactcgggaggctgaggcaggagaatggcgtgaactcaggaggcagagcttgcagtgagctaaggtggcaccactgcactccatcctgggcaacagagcgagactctgtctcaaaaaaaaaaaaatattgtggacatagtgcagtttttgttaccttaaaaaataattttctatgtgagaccatattaaataaatttattttgcaggttaaaatttaaagtgtatattttgttgccattttggaagtgcaacataacattggtttaacaactatacagcctgtgtctctaatccttccctattttaaaacttcttgcagtagggatgagaacctgtgggtttatattggcttaatgatggttgttgttaatgttttccactggaggcaaggtacttccatagaacattaaagtgtgaaggaccttgg

SEQ ID NO: 6752 - protein, 116 aa, Homo sapiens
MTQLKELDISNNAIREIPRNIGELRNLVSLHAYNNQISYLPPSLLSLNDLQQLNLSGNNLTALPSAIYNIFSLKEINFDDNPLLRPPVEICKGKQLYTIARYLQRADERDGLQLHS

SEQ ID NO: 6753 - DNA, 535 bp, Homo sapiens
agagctatctaatatgactcaacttaaagaacttgatatctcaaataatgcaatcagagagattccaagaaatataggagaattgagaaatttggttagtttacatgcatacaataatcaaataagttatcttccaccatctttgctatctttaaatgatctgcagcaactaaacctgagtggaaataatctgacagctctacctagtgctatctacaatattttttcactgaaggagataaattttgatgacaaccctttgctgagacctccagtggaaatctgtaaaggaaaacagttgtatactattgcacgctatctacagagggcagatgaaagagatgcactgtttcattaagtgagagagcccaccaagcacttgttatatggaaaacacaaagtaacaagttatcactaactgctgctgctttaagagatcaactaattcgagcactaactatgataggagcatatgaaattatggacaaaataacagctttaaatctttttacgcgtgcaattaaattctaaccag

SEQ ID NO: 6754 - protein, 114 aa, Homo sapiens [sequence omitted]

SEQ ID NO: 6755 - DNA, 1956 bp, Homo sapiens
atgtctgaaaaggagggtatgtcagaagtgctagaggatactattagtcaatttaggaaagaatctagatcacagtcaatgaaggagcctggctttattaaagaaacatcaaatttgataaacgaagcttctgattacctggaagggaaatcttctaaccagatttatgaaacacatcctagacagaatacattagagtcaacatcttcctctggaaggaagtctaagagaaatgaagaacaaaagaaaaatcttcaattttctgaaacaagcactagaacaggaacttcacagagtttatcatcactaactgggaggactgcagaatatcaggctttggttaacttcctatctcatgaaacagtaggagaagttagtccacaagtctctgaagaaaatcagaaacaacttggcctaggggcagataactttacagttaaccttgaggccaagggtttacaggaatttcctaaggacattttaaaaatcaaatatgtaaaatatctatatttagacaagaatcaaatcaaaacatttcaaggggcagactcaggtgatctgttaggacttgaaattctatccctgcaagaaaatggattatcatcacttccatctgaaattcagttacttcataatttaaggatattaaatgtcagtcataaccacatatcacatatacctaaagaaatatctcagcttgggaatatcagacaactctttttttataacaattacattgaaaattttccttctgacttagaatgtcttggaaacttggaaattttaagtttgggtaaaaataagttaagacatataccagatactctgcctagtttaaaaaccttgagggttctcaatttggaatataatcagttaacaacatttcctaaagctctctgcttccttccaaagttaatttcactagaccttactggaaacctaataagcagtttgccaaaagaaattagagagcttaaaaatttagaaacacttttaatggatcacaataagcttacctttctggctgtagaaatttttcagttactcaaaataaaagaactccaactggccgacaataaattggaagttatttcacacaaaattgagaatttcagggaacttaggattcttatacttgataaaaatttattgaaaaatataccagagaaaatatcttgctgtgcaatgttggaatgccttagtcttagtgataataaattaacagaactccctaagtacatccataagcttaacaatttaagaaaactccatgtaaacagaaataatatgctaacaagacttccaggagagctatctaatatgactcaacttaaagaacttgatatctcaaataatgcaatcagagagattccaagaaatataggagaattgagaaatttggttagtttacatgcatacaataatcaaataagttatcttccaccatctttgctatctttaaatgatctgcagcaactaaacctgagtggaaataatctgacagctctacctagtgctatctacaatattttttcactgaaggagataaattttgatgacaaccctttgctgagacctccagtggaaatctgtaaaggaaaacagttgtatactattgcacgctatctacagagggcagatgaaagagatgagaaaattttagagaagatattcaagatagttgccaacaacatcactgaaaccaattttgaatttttatgtcaaaaactaaacctggcaaactcagaaactgatatgcctacaaagagcactgtttcattaagtgagagagcccaccaagcacttgttatatggaaaacacaaagtaacaagttatcactaactgctgctgctttaagagatcaactaattcgagcactaactatgataggagcatatgaaattatggacaaaataacagctttaaatctttttacgcgtgcaattaaattctaa

SEQ ID NO: 6756 - protein, 651 aa, Homo sapiens
MSEKEGMSEVLEDTISQFRKESRSQSMKEPGFIKETSNLINEASDYLEGKSSNQIYETHPRQNTLESTSSSGRKSKRNEEQKKNLQFSETSTRTGTSQSLSSLTGRTAEYQALVNFLSHETVGEVSPQVSEENQKQLGLGADNFTVNLEAKGLQEFPKDILKIKYVKYLYLDKNQIKTFQGADSGDLLGLEILSLQENGLSSLPSEIQLLHNLRILNVSHNHISHIPKEISQLGNIRQLFFYNNYIENFPSDLECLGNLEILSLGKNKLRHIPDTLPSLKTLRVLNLEYNQLTTFPKALCFLPKLISLDLTGNLISSLPKEIRELKNLETLLMDHNKLTFLAVEIFQLLKIKELQLADNKLEVISHKIENFRELRILILDKNLLKNIPEKISCCAMLECLSLSDNKLTELPKYIHKLNNLRKLHVNRNNMLTRLPGELSNMTQLKELDISNNAIREIPRNIGELRNLVSLHAYNNQISYLPPSLLSLNDLQQLNLSGNNLTALPSAIYNIFSLKEINFDDNPLLRPPVEICKGKQLYTIARYLQRADERDEKILEKIFKIVANNITETNFEFLCQKLNLANSETDMPTKSTVSLSERAHQALVIWKTQSNKLSLTAAALRDQLIRALTMIGAYEIMDKITALNLFTRAIKF

SEQ ID NO: 6757 - DNA, 811 bp, Homo sapiens
ggagggcctcggagcaagacaatcccaccaagatggactcgggttgattaacgtgagtgaacctctgaggaccagaatccagactagtaattctccatcccggctgctcgttagatgcccggaccgacccccccagaccaattcaatcagaacattcggaggggcttgtaaaatctcccggggagattccggtacgaaagccaaagactcagacgcccgttctccacccgcctgcagcggccagcgcgggtccctcttagggaattgaatgcaggccccaggcctcctcctcgagtatcccagtgtgaccgatggccagctcacaaacgcgcagtgggtgcggccgcgccagggcgcagcggagcagagggcccggccgctttcggcctgggaaagaggagccacggcccggagaggcgtcagtgctgggctgcgcctgcggaggtcctcgcaattgctggactcaaccgcgcgcgccccctaccggtcctgcgaaggagccgcagccgccgcgggaggccacaggtgaagcgaagggtgtgtcttacttcagcagccctattcaaaggaaaaaacatgaaaattaaaatcaagttacaattttgtattggcataaaacatatcagcaaataagatgtctgaaaaggagggtatgtcagaagtgctagaggatactattagtcaatttaggaaagaatctagatcacagtcaatgaaggagcctggctttattaaagaaacatcaaatttgataaacgaagcttctgattacctggaagggaaatcttctaaccagatttatgaaacacat

SEQ ID NO: 6758 - protein, 91 aa, Homo sapiens
MASSQTRSGCGRARAQRSRGPGRFRPGKEEPRPGEASVLGCACGGPRNCWTQPRAPPTGPAKEPQPPREATGEAKGVSYFSSPIQRKKHEN

SEQ ID NO: 6759 - DNA, 5619 bp, Homo sapiens
ggcggggtggaaagctaaggcctttgaagacctgggaccccgtagtttcgggagagggtgaggggtgaatggtgctgaggtgcgaggagagggaaggacagtaaagagcaggtgggcaggagggtctccgactccagagacctgagcttttggggcgcgggtgggagcgcgggggaaccctcaagacggctttcttttggcgactgagggtttttctgccacaggaagctgggccgggctgctgtgcctgggaggagggaaggaggaatgagaaagcggtgacggtccctgccccccctcgccaggtgactgtcccacccatttagttgaatgtagcggccagagaggcactcgcggcagcccgtacgggtgggacctctcggtgtccttcgggaaacaggaggagcaagttcgactccagcgagggaaaacggaggtgggagactgaaccatctccacatctagttgccccaggtttttggctttcatcgctttttctacatgtttttagcctcaccagaagtctttcatctcggtggtccaactcaggatctcagcctcattattttcttacccttctggagtgcatatgtgcctttacagtttctgtttgcaaacgctgtctagcatactaagaggatgttagcaaacctgttccatggacactaaatggcagttgtacatctcccctcatcagtcatagtgacaaccagaaatgccctccatattttccagtgatcccagtcttcaatgcgtctgtctcataatttgtaaacgtttattatcttgaagtcattgttaatctgtggtgaaaagtaattgctaaatagaaattctgagaagaaaaaggcctcatccttttcacatgatgtaggaaggtctgttgcatgagcaatgggaaatccagaaaacatagaagatgcatatgttgctgttattcgtccaaagaatactgccagtctcaattctcgggaatacagagctaagtcatatgaaattttgttgcatgaagttcccattgaaggacagaaaaaaaagagaaagaaagttttattggaaacgaaacttcaaggcaacagtgaaataacacaaggcatattggattacgtagtagaaaccaccaaaccaatttctcctgcaaaccagggtatcagaggaaaacgagttgtactaatgaaaaaatttcctctggatggagagaagatgggcagagaagcatcattatttattgttccatcagttgtcaaagataatactaaatacacatataccccaggatgcccaattttttactgcttacaagatattatgcgagtctgtagtgaatccagtactcattttgctacacttacagcaaggatgttaatagccttggataagtggttagatgaacgtcatgcacaatctcactttattccagctttattccgaccttctcctcttgagcggataaaaactaatgtcataaatcctgcatatgctactgaatcaggtcagacagaaaactcactacatatgggctatagtgcactagaaataaagagtaaaatgttagccctagagaaagcagatacctgtatttacaaccctttgtttggatcagatcttcagtatacaaatcgggtagataaagtggtaataaatccatactttggtctaggagctccagactactcaaaaatccaaatacctaaacaggaaaaatggcagagaagcatgagcagtgtcacagaagacaaggaacgacagtgggtagatgattttcctctccaccgaagcgcctgtgaaggagattcagaattactaagccgtcttctcagtgaaagattttcagtcaaccagttagatagtgaccactgggcacccattcattatgcatgctggtatggaaaagttgaggccactcgcatattgttagagaaaggaaagtgcaatccaaaccttttaaatggacaacttagttctcctcttcattttgctgctggaggaggacatgctgaaatagtacagattctcctaaaccacccagaaacggatagacatataacagaccaacaaggaagatctccattaaatatttgtgaagaaaacaaacaaaacaactgggaagaagctgcaaaattgttgaaggaagcaattaacaaaccatatgaaaaagttcgaatatacagaatggatgggtcatatcgttctgttgaattgaagcatggaaataataccacagtgcagcagataatggaaggaatgcgtctctctcaagaaactcagcaatatttcactatatggatttgttcagaaaacctcagccttcaactcaaaccatatcataaacccttgcaacatgttcgtgactggccagaaatacttgctgaattgactaatctggatcctcaaagggaaacacctcagctttttctaagaagagatgtgagacttcccttggaagttgaaaaacagattgaagacccactagctattcttattctctttgatgaagccagatataatttattgaagggcttttatacagctcctgatgctaagctgataacattggcaagtctgcttttgcaaatagtctatggaaattatgagagtaaaaaacacaagcaaggtttcctaaatgaagaaaatctaaaatccatcgtacctgttaccaaactgaaaagtaaggcacctcactggacaaatcgcatacttcatgaatacaagaatctcagtacaagtgaaggtgtcagtaaagaaatgcatcaccttcagcgcatgttcttacagaattgctgggaaattcctacttatggagcagcatttttcacaggacagatatttacaaaggcaagccccagcaatcataaagtcatccctgtgtatgtaggagtgaatataaaaggacttcatctcctcaacatggaaactaaggctttactcatcagtcttaagtatggttgttttatgtggcaattgggagatactgatacttgttttcagatccatagcatggaaaataaaatgagctttatagtacatacaaaacaggctggtctcgtggtaaaactgttaatgaagctaaatggacagttaatgcccactgaaagaaattcatgaaagagaagtaactgttactcaagccaccacattttgtaatgcagagttttttttccgtgaaagatttcttaaaatattacttttggccgagcatggtggctcacccctgtaattccagcactttgggaggctggggcaggcggatcacctgaagtcagagttcaagaccagcctggccaacatggtgaaaccctgtctctacaaaaatacaaaaattagctgggtgtggtggcgggcgcctataatcctagctactagggaggccaaggtgggagatcgcttaaacccaggaggtggaggttgtagtgagccaagattgcaccacggcacgctagcctgggtgacacagcaagactccatctcaaaaaaaaaaaaaaattactttcaacaaggcatatagtctcttgtaatatatatgtatactattacattgtacagaatctgtacttatgtttggtgtgtaatataccaattagttttatataatatcctcataagctattctaatttttgagagaaacacaaaaagttatagattgatagtctgtataatattagacaaaatagtaagctttataaaaagttatttttggtaaatggtaaggaatttggggtggaatgtgatgagattaaaatgtagctttggtataacttcatgtgtatttcaaaatatactgaacgtcaacatgatttgaataaagaaaatgtattttctacttgaaccacataacactgttatttaaaacagttttctgcagtctataaacatttctcaacatttttttaaaagtcttagttaaaatgtaaatctgatatacagtagtgtttctcaaagtatagttcatgaactccttgcatcataattacctagatgcctcttaaaaatgaagatttcagagacccattctaaacaagggcattcactctctggaagtagcatggccttgtgaacttaaatttggttttgttttttcttttttgctgttagaataatttcagacccaataaggaatttcgattattaaagttgagaaatttcacaaaactgcctggcacacaagcacacacatacatagacacattttaagtgataatctcttgatattagaagttgcatttgttaaatacatgctgtattttttatgagttgacttaatagtttatgtatattgactttgctttgtaggaagtaaatcaccagatatcttattgtttcatttaggaaagtagtgatatagatgaagagccaacttgatgaatgtgctattcataagctagaaactacagtttttccaaactaataaactgatgaattctaaataagttcagagatatagtcatatttaaagttgtcctacagtttgcagataatttttatattactattcttcacattaacttctgcttatttttaatggtactatatgtaggccttattaaaattaagattgtatggttaagtaaagttaacaagaaagcctgatttatctttaattctgtgctaggtacttttgattctacatgaacaatacccttttcagttcccttcattctaatgtcctcaactgttaccaaataccctgttgactcccaaacctaagattttagcctcaacttcttttctgaacttcaaatcttaatttccaagttatacttgttctaggtccatctaaatggtctacagagaacttcagttgaatcatagctggaaacagaatttatttcctctatttgcttcattctgtccttccactatattccctatttggttaatgacatcatcgaactgcattcagttgcttagcctggaaatactgttacggtgttcagccgttccccaacttacatattttgtggatcaaagtcctgtctgatgttttgggagtcctttctcatttccttcctccctgcttgcactgcagccagtctagttcaagtcctcaccatccattctttagcttgtagtagcttcctacccctgactcaggctctgtacccttcctgcctatctgccacactgatgccaagttaagctttctcatcagtccgattatttcattacactgtgaaaatcattaatggttaccactatatgtagaattaaattccgaattctttagtattgaaaccaaggcccttagtacactgttgctaagctgcctatcaagattattgtctaaccacttctcccatactcattctatgctcccactgtttcctaactcctcagtcatgtggggaaattcagtactttctgattcagtaattttagagtgagacccaagcatttctgttcttgaagtattctgtgtacttactatgtacagttaggaattagaactgtaattataagcaactttaggagatagccgaatgtgtttcctttcacagagagaggtgaggatgcagtgataccacatcaaacaacctcctgctctgtggaatacagtttaccctcctgaagatgtacagtatagcagccctaataagaaaggaataggagactattagagt

SEQ ID NO: 6760 - protein, 736 aa, Homo sapiens; identical to SEQ ID NO: 887

SEQ ID NO: 6761 - DNA, 4978 bp, Homo sapiens
atagccacggtaacggcggggtggaaagctaaggcctttgaagacctgggaccccgtagtttcgggagagggtgaggggtgaatggtgctgaggtgcgaggagagggaaggacagtaaagagcaggtttttggctttcatcgctttttctacatgtttttagcctcaccagaagtctttcatctcggtggtccaactcaggatctcagcctcattattttcttacccttctggagtgcatatgtgcctttacagtttctgtttgcaaacgctgtctagcatactaagaggatgttagcaaacctgttccatggacactaaatggcagttgtacatctcccctcatcagtcatagtgacaaccagaaatgccctccatattttccagtgatcccagcaatgggaaatccagaaaacatagaagatgcatatgttgctgttattcgtccaaagaatactgccagtctcaattctcgggaatacagagctaagtcatatgaaattttgttgcatgaagttcccattgaaggacagaaaaaaaagagaaagaaagttttattggaaacgaaacttcaaggcaacagtgaaataacacaaggcatattggattacgtagtagaaaccaccaaaccaatttctcctgcaaaccagggtatcagaggaaaacgagttgtactaatgaaaaaatttcctctggatggagagaagatgggcagagaagcatcattatttattgttccatcagttgtcaaagataatactaaatacacatataccccaggatgcccaattttttactgcttacaagatattatgcgagtctgtagtgaatccagtactcattttgctacacttacagcaaggatgttaatagccttggataagtggttagatgaacgtcatgcacaatctcactttattccagctttattccgaccttctcctcttgagcggataaaaactaatgtcataaatcctgcatatgctactgaatcaggtcagacagaaaactcactacatatgggctatagtgcactagaaataaagagtaaaatgttagccctagagaaagcagatacctgtatttacaaccctttgtttggatcagatcttcagtatacaaatcgggtagataaagtggtaataaatccatactttggtctaggagctccagactactcaaaaatccaaatacctaaacaggaaaaatggcagagaagcatgagcagtgtcacagaagacaagtatggaaaagttgaggccactcgcatattgttagagaaaggaaagtgcaatccaaaccttttaaatggacaacttagttctcctcttcattttgctgctggaggaggacatgctgaaatagtacagattctcctaaaccacccagaaacggatagacatataacagaccaacaaggaagatctccattaaatatttgtgaagaaaacaaacaaaacaactgggaagaagctgcaaaattgttgaaggaagcaattaacaaaccatatgaaaaagttcgaatatacagaatggatgggtcatatcgttctgttgaattgaagcatggaaataataccacagtgcagcagataatggaaggaatgcgtctctctcaagaaactcagcaatatttcactatatggatttgttcagaaaacctcagccttcaactcaaaccatatcataaacccttgcaacatgttcgtgactggccagaaatacttgctgaattgactaatctggatcctcaaagggaaacacctcagctttttctaagaagagatgtgagacttcccttggaagttgaaaaacagattgaagacccactagctattcttattctctttgatgaagccagatataatttattgaagggcttttatacagctcctgatgctaagctgataacattggcaagtctgcttttgcaaatagtctatggaaattatgagagtaaaaaacacaagcaaggtttcctaaatgaagaaaatctaaaatccatcgtacctgttaccaaactgaaaagtaaggcacctcactggacaaatcgcatacttcatgaatacaagaatctcagtacaagtgaaggtgtcagtaaagaaatgcatcaccttcagcgcatgttcttacagaattgctgggaaattcctacttatggagcagcatttttcacaggacagatatttacaaaggcaagccccagcaatcataaagtcatccctgtgtatgtaggagtgaatataaaaggacttcatctcctcaacatggaaactaaggctttactcatcagtcttaagtatggttgttttatgtggcaattgggagatactgatacttgttttcagatccatagcatggaaaataaaatgagctttatagtacatacaaaacaggctggtctcgtggtaaaactgttaatgaagctaaatggacagttaatgcccactgaaagaaattcatgaaagagaagtaactgttactcaagccaccacattttgtaatgcagagttttttttccgtgaaagatttcttaaaatattacttttggccgagcatggtggctcacccctgtaattccagcactttgggaggctggggcaggcggatcacctgaagtcagagttcaagaccagcctggccaacatggtgaaaccctgtctctacaaaaatacaaaaattagctgggtgtggtggcgggcgcctataatcctagctactagggaggccaaggtgggagatcgcttaaacccaggaggtggaggttgtagtgagccaagattgcaccacggcacgctagcctgggtgacacagcaagactccatctcaaaaaaaaaaaaaaattactttcaacaaggcatatagtctcttgtaatatatatgtatactattacattgtacagaatctgtacttatgtttggtgtgtaatataccaattagttttatataatatcctcataagctattctaatttttgagagaaacacaaaaagttatagattgatagtctgtataatattagacaaaatagtaagctttataaaaagttatttttggtaaatggtaaggaatttggggtggaatgtgatgagattaaaatgtagctttggtataacttcatgtgtatttcaaaatatactgaacgtcaacatgatttgaataaagaaaatgtattttctacttgaaccacataacactgttatttaaaacagttttctgcagtctataaacatttctcaacatttttttaaaagtcttagttaaaatgtaaatctgatatacagtagtgtttctcaaagtatagttcatgaactccttgcatcataattacctagatgcctcttaaaaatgaagatttcagagacccattctaaacaagggcattcactctctggaagtagcatggccttgtgaacttaaatttggttttgttttttcttttttgctgttagaataatttcagacccaataaggaatttcgattattaaagttgagaaatttcacaaaactgcctggcacacaagcacacacatacatagacacattttaagtgataatctcttgatattagaagttgcatttgttaaatacatgctgtattttttatgagttgacttaatagtttatgtatattgactttgctttgtaggaagtaaatcaccagatatcttattgtttcatttaggaaagtagtgatatagatgaagagccaacttgatgaatgtgctattcataagctagaaactacagtttttccaaactaataaactgatgaattctaaataagttcagagatatagtcatatttaaagttgtcctacagtttgcagataatttttatattactattcttcacattaacttctgcttatttttaatggtactatatgtaggccttattaaaattaagattgtatggttaagtaaagttaacaagaaagcctgatttatctttaattctgtgctaggtacttttgattctacatgaacaatacccttttcagttcccttcattctaatgtcctcaactgttaccaaataccctgttgactcccaaacctaagattttagcctcaacttcttttctgaacttcaaatcttaatttccaagttatacttgttctaggtccatctaaatggtctacagagaacttcagttgaatcatagctggaaacagaatttatttcctctatttgcttcattctgtccttccactatattccctatttggttaatgacatcatcgaactgcattcagttgcttagcctggaaatactgttacggtgttcagccgttccccaacttacatattttgtggatcaaagtcctgtctgatgttttgggagtcctttctcatttccttcctccctgcttgcactgcagccagtctagttcaagtcctcaccatccattctttagcttgtagtagcttcctacccctgactcaggctctgtacccttcctgcctatctgccacactgatgccaagttaagctttctcatcagtccgattatttcattacactgtgaaaatcattaatggttaccactatatgtagaattaaattccgaattctttagtattgaaaccaaggcccttagtacactgttgctaagctgcctatcaagattattgtctaaccacttctcccatactcattctatgctcccactgtttcctaactcctcagtcatgtggggaaattcagtactttctgattcagtaattttagagtgagacccaagcatttctgttcttgaagtattctgtgtacttactatgtacagttaggaattagaactgtaattataagcaactttaggagatagccgaatgtgtttcctttcacagagagaggtgaggatgcagtgataccacatcaaacaacctcctgctctgtggaatacagtttaccctcctgaagatgtacagtatagcagccctaataagaaaggaataggagactattagagt

SEQ ID NO: 6762 - protein, 688 aa, Homo sapiens; identical to SEQ ID NO: 885

SEQ ID NO: 6763 - DNA, 5270 bp, Homo sapiens
atagccacggtaacggcggggtggaaagctaaggcctttgaagacctgggaccccgtagtttcgggagagggtgaggggtgaatggtgctgaggtgcgaggagagggaaggacagtaaagagcaggtttttggctttcatcgctttttctacatgtttttagcctcaccagaagtctttcatctcggtggtccaactcaggatctcagcctcattattttcttacccttctggagtgcatatgtgcctttacagtttctgtttgcaaacgctgtctagcatactaagaggatgttagcaaacctgttccatggacactaaatggcagttgtacatctcccctcatcagtcatagtgacaaccagaaatgccctccatattttccagtgatcccagtcttcaatgcgtctgtctcataatttgtaaacgtttattatcttgaagtcattgttaatctgtggtgaaaagtaattgctaaatagaaattctgagaagaaaaaggcctcatccttttcacatgatgtaggaaggtctgttgcatgagcaatgggaaatccagaaaacatagaagatgcatatgttgctgttattcgtccaaagaatactgccagtctcaattctcgggaatacagagctaagtcatatgaaattttgttgcatgaagttcccattgaaggacagaaaaaaaagagaaagaaagttttattggaaacgaaacttcaaggcaacagtgaaataacacaaggcatattggattacgtagtagaaaccaccaaaccaatttctcctgcaaaccagggtatcagaggaaaacgagttgtactaatgaaaaaatttcctctggatggagagaagatgggcagagaagcatcattatttattgttccatcagttgtcaaagataatactaaatacacatataccccaggatgcccaattttttactgcttacaagatattatgcgagtctgtagtgaatccagtactcattttgctacacttacagcaaggatgttaatagccttggataagtggttagatgaacgtcatgcacaatctcactttattccagctttattccgaccttctcctcttgagcggataaaaactaatgtcataaatcctgcatatgctactgaatcaggtcagacagaaaactcactacatatgggctatagtgcactagaaataaagagtaaaatgttagccctagagaaagcagatacctgtatttacaaccctttgtttggatcagatcttcagtatacaaatcgggtagataaagtggtaataaatccatactttggtctaggagctccagactactcaaaaatccaaatacctaaacaggaaaaatggcagagaagcatgagcagtgtcacagaagacaaggaacgacagtgggtagatgattttcctctccaccgaagcgcctgtgaaggagattcagaattactaagccgtcttctcagtgaaagattttcagtcaaccagttagatagtgaccactgggcacccattcattatgcatgctggtatggaaaagttgaggccactcgcatattgttagagaaaggaaagtgcaatccaaaccttttaaatggacaacttagttctcctcttcattttgctgctggaggaggacatgctgaaatagtacagattctcctaaaccacccagaaacggatagacatataacagaccaacaaggaagatctccattaaatatttgtgaagaaaacaaacaaaacaactgggaagaagctgcaaaattgttgaaggaagcaattaacaaaccatatgaaaaagttcgaatatacagaatggatgggtcatatcgttctgttgaattgaagcatggaaataataccacagtgcagcagataatggaaggaatgcgtctctctcaagaaactcagcaatatttcactatatggatttgttcagaaaacctcagccttcaactcaaaccatatcataaacccttgcaacatgttcgtgactggccagaaatacttgctgaattgactaatctggatcctcaaagggaaacacctcagctttttctaagaagagatgtgagacttcccttggaagttgaaaaacagattgaagacccactagctattcttattctctttgatgaagccagatataatttattgaagggcttttatacagctcctgatgctaagctgataacattggcaagtctgcttttgcaaatagtctatggaaattatgagagtaaaaaacacaagcaaggtttcctaaatgaagaaaatctaaaatccatcgtacctgttaccaaactgaaaagtaaggcacctcactggacaaatcgcatacttcatgaatacaagaatctcagtacaagtgaaggtgtcagtaaagaaatgcatcaccttcagcgcatgttcttacagaattgctgggaaattcctacttatggagcagcatttttcacaggacagatatttacaaaggcaagccccagcaatcataaagtcatccctgtgtatgtaggagtgaatataaaaggacttcatctcctcaacatggaaactaaggctttactcatcagtcttaagtatggttgttttatgtggcaattgggagatactgatacttgttttcagatccatagcatggaaaataaaatgagctttatagtacatacaaaacaggctggtctcgtggtaaaactgttaatgaagctaaatggacagttaatgcccactgaaagaaattcatgaaagagaagtaactgttactcaagccaccacattttgtaatgcagagttttttttccgtgaaagatttcttaaaatattacttttggccgagcatggtggctcacccctgtaattccagcactttgggaggctggggcaggcggatcacctgaagtcagagttcaagaccagcctggccaacatggtgaaaccctgtctctacaaaaatacaaaaattagctgggtgtggtggcgggcgcctataatcctagctactagggaggccaaggtgggagatcgcttaaacccaggaggtggaggttgtagtgagccaagattgcaccacggcacgctagcctgggtgacacagcaagactccatctcaaaaaaaaaaaaaaattactttcaacaaggcatatagtctcttgtaatatatatgtatactattacattgtacagaatctgtacttatgtttggtgtgtaatataccaattagttttatataatatcctcataagctattctaatttttgagagaaacacaaaaagttatagattgatagtctgtataatattagacaaaatagtaagctttataaaaagttatttttggtaaatggtaaggaatttggggtggaatgtgatgagattaaaatgtagctttggtataacttcatgtgtatttcaaaatatactgaacgtcaacatgatttgaataaagaaaatgtattttctacttgaaccacataacactgttatttaaaacagttttctgcagtctataaacatttctcaacatttttttaaaagtcttagttaaaatgtaaatctgatatacagtagtgtttctcaaagtatagttcatgaactccttgcatcataattacctagatgcctcttaaaaatgaagatttcagagacccattctaaacaagggcattcactctctggaagtagcatggccttgtgaacttaaatttggttttgttttttcttttttgctgttagaataatttcagacccaataaggaatttcgattattaaagttgagaaatttcacaaaactgcctggcacacaagcacacacatacatagacacattttaagtgataatctcttgatattagaagttgcatttgttaaatacatgctgtattttttatgagttgacttaatagtttatgtatattgactttgctttgtaggaagtaaatcaccagatatcttattgtttcatttaggaaagtagtgatatagatgaagagccaacttgatgaatgtgctattcataagctagaaactacagtttttccaaactaataaactgatgaattctaaataagttcagagatatagtcatatttaaagttgtcctacagtttgcagataatttttatattactattcttcacattaacttctgcttatttttaatggtactatatgtaggccttattaaaattaagattgtatggttaagtaaagttaacaagaaagcctgatttatctttaattctgtgctaggtacttttgattctacatgaacaatacccttttcagttcccttcattctaatgtcctcaactgttaccaaataccctgttgactcccaaacctaagattttagcctcaacttcttttctgaacttcaaatcttaatttccaagttatacttgttctaggtccatctaaatggtctacagagaacttcagttgaatcatagctggaaacagaatttatttcctctatttgcttcattctgtccttccactatattccctatttggttaatgacatcatcgaactgcattcagttgcttagcctggaaatactgttacggtgttcagccgttccccaacttacatattttgtggatcaaagtcctgtctgatgttttgggagtcctttctcatttccttcctccctgcttgcactgcagccagtctagttcaagtcctcaccatccattctttagcttgtagtagcttcctacccctgactcaggctctgtacccttcctgcctatctgccacactgatgccaagttaagctttctcatcagtccgattatttcattacactgtgaaaatcattaatggttaccactatatgtagaattaaattccgaattctttagtattgaaaccaaggcccttagtacactgttgctaagctgcctatcaagattattgtctaaccacttctcccatactcattctatgctcccactgtttcctaactcctcagtcatgtggggaaattcagtactttctgattcagtaattttagagtgagacccaagcatttctgttcttgaagtattctgtgtacttactatgtacagttaggaattagaactgtaattataagcaactttaggagatagccgaatgtgtttcctttcacagagagaggtgaggatgcagtgataccacatcaaacaacctcctgctctgtggaatacagtttaccctcctgaagatgtacagtatagcagccctaataagaaaggaataggagactattagagt

SEQ ID NO: 6764 - protein, 736 aa, Homo sapiens; identical to SEQ ID NO: 887

SEQ ID NO: 6765 - DNA, 5509 bp, Homo sapiens
gctccggctcagccgctggcacccccaccgccaccaccctagtctcctagtcgcctgccaccagcccctgagagactgcaggtccagtgaaaaggagcaggaacggcagcagcccggccgccgacccggaagctctttcaccgccaaccgcgaggctgcaaagggtgtgaacccggaagcgatttcatagccacggtgactgtcccacccatttagttgaatgtagcggccagagaggcactcgcggcagcccgtacgggtgggacctctcggtgtccttcgggaaacaggaggagcaagttcgactccagcgagggaaaacggaggtgggagactgaaccatctccacatctagttgccccaggtttttggctttcatcgctttttctacatgtttttagcctcaccagaagtctttcatctcggtggtccaactcaggatctcagcctcattattttcttacccttctggagtgcatatgtgcctttacagtttctgtttgcaaacgctgtctagcatactaagaggatgttagcaaacctgttccatggacactaaatggcagttgtacatctcccctcatcagtcatagtgacaaccagaaatgccctccatattttccagtgatcccagtcttcaatgcgtctgtctcataatttgtaaacgtttattatcttgaagtcattgttaatctgtggtgaaaagtaattgctaaatagaaattctgagaagaaaaaggcctcatccttttcacatgatgtaggaaggtctgttgcatgagcaatgggaaatccagaaaacatagaagatgcatatgttgctgttattcgtccaaagaatactgccagtctcaattctcgggaatacagagctaagtcatatgaaattttgttgcatgaagttcccattgaaggacagaaaaaaaagagaaagaaagttttattggaaacgaaacttcaaggcaacagtgaaataacacaaggcatattggattacgtagtagaaaccaccaaaccaatttctcctgcaaaccagggtatcagaggaaaacgagttgtactaatgaaaaaatttcctctggatggagagaagatgggcagagaagcatcattatttattgttccatcagttgtcaaagataatactaaatacacatataccccaggatgcccaattttttactgcttacaagatattatgcgagtctgtagtgaatccagtactcattttgctacacttacagcaaggatgttaatagccttggataagtggttagatgaacgtcatgcacaatctcactttattccagctttattccgaccttctcctcttgagcggataaaaactaatgtcataaatcctgcatatgctactgaatcaggtcagacagaaaactcactacatatgggctatagtgcactagaaataaagagtaaaatgttagccctagagaaagcagatacctgtatttacaaccctttgtttggatcagatcttcagtatacaaatcgggtagataaagtggtaataaatccatactttggtctaggagctccagactactcaaaaatccaaatacctaaacaggaaaaatggcagagaagcatgagcagtgtcacagaagacaaggaacgacagtgggtagatgattttcctctccaccgaagcgcctgtgaaggagattcagaattactaagccgtcttctcagtgaaagattttcagtcaaccagttagatagtgaccactgggcacccattcattatgcatgctggtatggaaaagttgaggccactcgcatattgttagagaaaggaaagtgcaatccaaaccttttaaatggacaacttagttctcctcttcattttgctgctggaggaggacatgctgaaatagtacagattctcctaaaccacccagaaacggatagacatataacagaccaacaaggaagatctccattaaatatttgtgaagaaaacaaacaaaacaactgggaagaagctgcaaaattgttgaaggaagcaattaacaaaccatatgaaaaagttcgaatatacagaatggatgggtcatatcgttctgttgaattgaagcatggaaataataccacagtgcagcagataatggaaggaatgcgtctctctcaagaaactcagcaatatttcactatatggatttgttcagaaaacctcagccttcaactcaaaccatatcataaacccttgcaacatgttcgtgactggccagaaatacttgctgaattgactaatctggatcctcaaagggaaacacctcagctttttctaagaagagatgtgagacttcccttggaagttgaaaaacagattgaagacccactagctattcttattctctttgatgaagccagatataatttattgaagggcttttatacagctcctgatgctaagctgataacattggcaagtctgcttttgcaaatagtctatggaaattatgagagtaaaaaacacaagcaaggtttcctaaatgaagaaaatctaaaatccatcgtacctgttaccaaactgaaaagtaaggcacctcactggacaaatcgcatacttcatgaatacaagaatctcagtacaagtgaaggtgtcagtaaagaaatgcatcaccttcagcgcatgttcttacagaattgctgggaaattcctacttatggagcagcatttttcacaggacagatatttacaaaggcaagccccagcaatcataaagtcatccctgtgtatgtaggagtgaatataaaaggacttcatctcctcaacatggaaactaaggctttactcatcagtcttaagtatggttgttttatgtggcaattgggagatactgatacttgttttcagatccatagcatggaaaataaaatgagctttatagtacatacaaaacaggctggtctcgtggtaaaactgttaatgaagctaaatggacagttaatgcccactgaaagaaattcatgaaagagaagtaactgttactcaagccaccacattttgtaatgcagagttttttttccgtgaaagatttcttaaaatattacttttggccgagcatggtggctcacccctgtaattccagcactttgggaggctggggcaggcggatcacctgaagtcagagttcaagaccagcctggccaacatggtgaaaccctgtctctacaaaaatacaaaaattagctgggtgtggtggcgggcgcctataatcctagctactagggaggccaaggtgggagatcgcttaaacccaggaggtggaggttgtagtgagccaagattgcaccacggcacgctagcctgggtgacacagcaagactccatctcaaaaaaaaaaaaaaattactttcaacaaggcatatagtctcttgtaatatatatgtatactattacattgtacagaatctgtacttatgtttggtgtgtaatataccaattagttttatataatatcctcataagctattctaatttttgagagaaacacaaaaagttatagattgatagtctgtataatattagacaaaatagtaagctttataaaaagttatttttggtaaatggtaaggaatttggggtggaatgtgatgagattaaaatgtagctttggtataacttcatgtgtatttcaaaatatactgaacgtcaacatgatttgaataaagaaaatgtattttctacttgaaccacataacactgttatttaaaacagttttctgcagtctataaacatttctcaacatttttttaaaagtcttagttaaaatgtaaatctgatatacagtagtgtttctcaaagtatagttcatgaactccttgcatcataattacctagatgcctcttaaaaatgaagatttcagagacccattctaaacaagggcattcactctctggaagtagcatggccttgtgaacttaaatttggttttgttttttcttttttgctgttagaataatttcagacccaataaggaatttcgattattaaagttgagaaatttcacaaaactgcctggcacacaagcacacacatacatagacacattttaagtgataatctcttgatattagaagttgcatttgttaaatacatgctgtattttttatgagttgacttaatagtttatgtatattgactttgctttgtaggaagtaaatcaccagatatcttattgtttcatttaggaaagtagtgatatagatgaagagccaacttgatgaatgtgctattcataagctagaaactacagtttttccaaactaataaactgatgaattctaaataagttcagagatatagtcatatttaaagttgtcctacagtttgcagataatttttatattactattcttcacattaacttctgcttatttttaatggtactatatgtaggccttattaaaattaagattgtatggttaagtaaagttaacaagaaagcctgatttatctttaattctgtgctaggtacttttgattctacatgaacaatacccttttcagttcccttcattctaatgtcctcaactgttaccaaataccctgttgactcccaaacctaagattttagcctcaacttcttttctgaacttcaaatcttaatttccaagttatacttgttctaggtccatctaaatggtctacagagaacttcagttgaatcatagctggaaacagaatttatttcctctatttgcttcattctgtccttccactatattccctatttggttaatgacatcatcgaactgcattcagttgcttagcctggaaatactgttacggtgttcagccgttccccaacttacatattttgtggatcaaagtcctgtctgatgttttgggagtcctttctcatttccttcctccctgcttgcactgcagccagtctagttcaagtcctcaccatccattctttagcttgtagtagcttcctacccctgactcaggctctgtacccttcctgcctatctgccacactgatgccaagttaagctttctcatcagtccgattatttcattacactgtgaaaatcattaatggttaccactatatgtagaattaaattccgaattctttagtattgaaaccaaggcccttagtacactgttgctaagctgcctatcaagattattgtctaaccacttctcccatactcattctatgctcccactgtttcctaactcctcagtcatgtggggaaattcagtactttctgattcagtaattttagagtgagacccaagcatttctgttcttgaagtattctgtgtacttactatgtacagttaggaattagaactgtaattataagcaactttaggagatagccgaatgtgtttcctttcacagagagaggtgaggatgcagtgataccacatcaaacaacctcctgctctgtggaatacagtttaccctcctgaagatgtacagtatagcagccctaataagaaaggaataggagactattagagt

SEQ ID NO: 6766 - protein, 736 aa, Homo sapiens; identical to SEQ ID NO: 887

SEQ ID NO: 6767 - DNA, 5744 bp, Homo sapiens
gctccggctcagccgctggcacccccaccgccaccaccctagtctcctagtcgcctgccaccagcccctgagagactgcaggtccagtgaaaaggagcaggaacggcagcagcccggccgccgacccggaagctctttcaccgccaaccgcgaggctgcaaagggtgtgaacccggaagcgatttcatagccacggtaacggcggggtggaaagctaaggcctttgaagacctgggaccccgtagtttcgggagagggtgaggggtgaatggtgctgaggtgcgaggagagggaaggacagtaaagagcaggtgggcaggagggtctccgactccagagacctgagcttttggggcgcgggtgggagcgcgggggaaccctcaagacggctttcttttggcgactgagggtttttctgccacaggaagctgggccgggctgctgtgcctgggaggagggaaggaggaatgagaaagcggtgacggtccctgccccccctcgccaggtgactgtcccacccatttagttgaatgtagcggccagagaggcactcgcggcagcccgtacgggtgggacctctcggtgtccttcgggaaacaggaggagcaagttcgactccagcgagggaaaacggagcctcaccagaagtctttcatctcggtggtccaactcaggatctcagcctcattattttcttacccttctggagtgcatatgtgcctttacagtttctgtttgcaaacgctgtctagcatactaagaggatgttagcaaacctgttccatggacactaaatggcagttgtacatctcccctcatcagtcatagtgacaaccagaaatgccctccatattttccagtgatcccagtcttcaatgcgtctgtctcataatttgtaaacgtttattatcttgaagtcattgttaatctgtggtgaaaagtaattgctaaatagaaattctgagaagaaaaaggcctcatccttttcacatgatgtaggaaggtctgttgcatgagcaatgggaaatccagaaaacatagaagatgcatatgttgctgttattcgtccaaagaatactgccagtctcaattctcgggaatacagagctaagtcatatgaaattttgttgcatgaagttcccattgaaggacagaaaaaaaagagaaagaaagttttattggaaacgaaacttcaaggcaacagtgaaataacacaaggcatattggattacgtagtagaaaccaccaaaccaatttctcctgcaaaccagggtatcagaggaaaacgagttgtactaatgaaaaaatttcctctggatggagagaagatgggcagagaagcatcattatttattgttccatcagttgtcaaagataatactaaatacacatataccccaggatgcccaattttttactgcttacaagatattatgcgagtctgtagtgaatccagtactcattttgctacacttacagcaaggatgttaatagccttggataagtggttagatgaacgtcatgcacaatctcactttattccagctttattccgaccttctcctcttgagcggataaaaactaatgtcataaatcctgcatatgctactgaatcaggtcagacagaaaactcactacatatgggctatagtgcactagaaataaagagtaaaatgttagccctagagaaagcagatacctgtatttacaaccctttgtttggatcagatcttcagtatacaaatcgggtagataaagtggtaataaatccatactttggtctaggagctccagactactcaaaaatccaaatacctaaacaggaaaaatggcagagaagcatgagcagtgtcacagaagacaaggaacgacagtgggtagatgattttcctctccaccgaagcgcctgtgaaggagattcagaattactaagccgtcttctcagtgaaagattttcagtcaaccagttagatagtgaccactgggcacccattcattatgcatgctggtatggaaaagttgaggccactcgcatattgttagagaaaggaaagtgcaatccaaaccttttaaatggacaacttagttctcctcttcattttgctgctggaggaggacatgctgaaatagtacagattctcctaaaccacccagaaacggatagacatataacagaccaacaaggaagatctccattaaatatttgtgaagaaaacaaacaaaacaactgggaagaagctgcaaaattgttgaaggaagcaattaacaaaccatatgaaaaagttcgaatatacagaatggatgggtcatatcgttctgttgaattgaagcatggaaataataccacagtgcagcagataatggaaggaatgcgtctctctcaagaaactcagcaatatttcactatatggatttgttcagaaaacctcagccttcaactcaaaccatatcataaacccttgcaacatgttcgtgactggccagaaatacttgctgaattgactaatctggatcctcaaagggaaacacctcagctttttctaagaagagatgtgagacttcccttggaagttgaaaaacagattgaagacccactagctattcttattctctttgatgaagccagatataatttattgaagggcttttatacagctcctgatgctaagctgataacattggcaagtctgcttttgcaaatagtctatggaaattatgagagtaaaaaacacaagcaaggtttcctaaatgaagaaaatctaaaatccatcgtacctgttaccaaactgaaaagtaaggcacctcactggacaaatcgcatacttcatgaatacaagaatctcagtacaagtgaaggtgtcagtaaagaaatgcatcaccttcagcgcatgttcttacagaattgctgggaaattcctacttatggagcagcatttttcacaggacagatatttacaaaggcaagccccagcaatcataaagtcatccctgtgtatgtaggagtgaatataaaaggacttcatctcctcaacatggaaactaaggctttactcatcagtcttaagtatggttgttttatgtggcaattgggagatactgatacttgttttcagatccatagcatggaaaataaaatgagctttatagtacatacaaaacaggctggtctcgtggtaaaactgttaatgaagctaaatggacagttaatgcccactgaaagaaattcatgaaagagaagtaactgttactcaagccaccacattttgtaatgcagagttttttttccgtgaaagatttcttaaaatattacttttggccgagcatggtggctcacccctgtaattccagcactttgggaggctggggcaggcggatcacctgaagtcagagttcaagaccagcctggccaacatggtgaaaccctgtctctacaaaaatacaaaaattagctgggtgtggtggcgggcgcctataatcctagctactagggaggccaaggtgggagatcgcttaaacccaggaggtggaggttgtagtgagccaagattgcaccacggcacgctagcctgggtgacacagcaagactccatctcaaaaaaaaaaaaaaattactttcaacaaggcatatagtctcttgtaatatatatgtatactattacattgtacagaatctgtacttatgtttggtgtgtaatataccaattagttttatataatatcctcataagctattctaatttttgagagaaacacaaaaagttatagattgatagtctgtataatattagacaaaatagtaagctttataaaaagttatttttggtaaatggtaaggaatttggggtggaatgtgatgagattaaaatgtagctttggtataacttcatgtgtatttcaaaatatactgaacgtcaacatgatttgaataaagaaaatgtattttctacttgaaccacataacactgttatttaaaacagttttctgcagtctataaacatttctcaacatttttttaaaagtcttagttaaaatgtaaatctgatatacagtagtgtttctcaaagtatagttcatgaactccttgcatcataattacctagatgcctcttaaaaatgaagatttcagagacccattctaaacaagggcattcactctctggaagtagcatggccttgtgaacttaaatttggttttgttttttcttttttgctgttagaataatttcagacccaataaggaatttcgattattaaagttgagaaatttcacaaaactgcctggcacacaagcacacacatacatagacacattttaagtgataatctcttgatattagaagttgcatttgttaaatacatgctgtattttttatgagttgacttaatagtttatgtatattgactttgctttgtaggaagtaaatcaccagatatcttattgtttcatttaggaaagtagtgatatagatgaagagccaacttgatgaatgtgctattcataagctagaaactacagtttttccaaactaataaactgatgaattctaaataagttcagagatatagtcatatttaaagttgtcctacagtttgcagataatttttatattactattcttcacattaacttctgcttatttttaatggtactatatgtaggccttattaaaattaagattgtatggttaagtaaagttaacaagaaagcctgatttatctttaattctgtgctaggtacttttgattctacatgaacaatacccttttcagttcccttcattctaatgtcctcaactgttaccaaataccctgttgactcccaaacctaagattttagcctcaacttcttttctgaacttcaaatcttaatttccaagttatacttgttctaggtccatctaaatggtctacagagaacttcagttgaatcatagctggaaacagaatttatttcctctatttgcttcattctgtccttccactatattccctatttggttaatgacatcatcgaactgcattcagttgcttagcctggaaatactgttacggtgttcagccgttccccaacttacatattttgtggatcaaagtcctgtctgatgttttgggagtcctttctcatttccttcctccctgcttgcactgcagccagtctagttcaagtcctcaccatccattctttagcttgtagtagcttcctacccctgactcaggctctgtacccttcctgcctatctgccacactgatgccaagttaagctttctcatcagtccgattatttcattacactgtgaaaatcattaatggttaccactatatgtagaattaaattccgaattctttagtattgaaaccaaggcccttagtacactgttgctaagctgcctatcaagattattgtctaaccacttctcccatactcattctatgctcccactgtttcctaactcctcagtcatgtggggaaattcagtactttctgattcagtaattttagagtgagacccaagcatttctgttcttgaagtattctgtgtacttactatgtacagttaggaattagaactgtaattataagcaactttaggagatagccgaatgtgtttcctttcacagagagaggtgaggatgcagtgataccacatcaaacaacctcctgctctgtggaatacagtttaccctcctgaagatgtacagtatagcagccctaataagaaaggaataggagactattagagt

SEQ ID NO: 6768 - protein, 736 aa, Homo sapiens; identical to SEQ ID NO: 887

SEQ ID NO: 6769 - DNA, 4426 bp, Homo sapiens
ggcggggtggaaagctaaggcctttgaagacctgggaccccgtagtttcgggagagggtgaggggtgaatggtgctgaggtgcgaggagagggaaggacagtaaagagcaggtgggcaggagggtctccgactccagagacctgagcttttggggcgcgggtgggagcgcgggggaaccctcaagacggctttcttttggcgactgagggtttttctgccacaggaagctgggccgggctgctgtgcctgggaggagggaaggaggaatgagaaagcggtgacggtccctgccccccctcgccaggtgactgtcccacccatttagttgaatgtagcggccagagaggcactcgcggcagcccgtacgggtgggacctctcggtgtccttcgggaaacaggaggagcaagttcgactccagcgagggaaaacggaggtgggagactgaaccatctccacatctagttgccccaggtttttggctttcatcgctttttctacatgtttttagcctcaccagaagtctttcatctcggtggtccaactcaggatctcagcctcattattttcttacccttctggagtgcatatgtgcctttacagtttctgtttgcaaacgctgtctagcatactaagaggatgttagcaaacctgttccatggacactaaatggcagttgtacatctcccctcatcagtcatagtgacaaccagaaatgccctccatattttccagtgatcccagtcttcaatgcgtctgtctcataatttgtaaacgtttattatcttgaagtcattgttaatctgtggtgaaaagtaattgctaaatagaaattctgagaagaaaaaggcctcatccttttcacatgatgtaggaaggtctgttgcatgagcaatgggaaatccagaaaacatagaagatgcatatgttgctgttattcgtccaaagaatactgccagtctcaattctcgggaatacagagctaagtcatatgaaattttgttgcatgaagttcccattgaaggacagaaaaaaaagagaaagaaagttttattggaaacgaaacttcaaggcaacagtgaaataacacaaggcatattggattacgtagtagaaaccaccaaaccaatttctcctgcaaaccagggtatcagaggaaaacgagttgtactaatgaaaaaatttcctctggatggagagaagatgggcagagaagcatcattatttattgttccatcagttgtcaaagataatactaaatacacatataccccaggatgcccaattttttactgcttacaagatattatgcgagtctgtagtgaatccagtactcattttgctacacttacagcaaggatgttaatagccttggataagtggttagatgaacgtcatgcacaatctcactttattccagctttattccgaccttctcctcttgagcggataaaaactaatgtcataaatcctgcatatgctactgaatcaggtcagacagaaaactcactacatatgggctatagtgcactagaaataaagagtaaaatgttagccctagagaaagcagatacctgtatttacaaccctttgtttggatcagatcttcagtatacaaatcgggtagataaagtggtaataaatccatactttggtctaggagctccagactactcaaaaatccaaatacctaaacaggaaaaatggcagagaagcatgagcagtgtcacagaagacaaggaacgacagtgggtagatgattttcctctccaccgaagcgcctgtgaaggagattcagaattactaagccgtcttctcagtgaaagattttcagtcaaccagttagatagtgaccactgggcacccattcattatgcatgctggtatggaaaagttgaggccactcgcatattgttagagaaaggaaagtgcaatccaaaccttttaaatggacaacttagttctcctcttcattttgctgctggaggaggacatgctgaaatagtacagattctcctaaaccacccagaaacggatagacatataacagaccaacaaggaagatctccattaaatatttgtgaagaaaacaaacaaaacaactgggaagaagctgcaaaattgttgaaggaagcaattaacaaaccatatgaaaaagttcgaatatacagaatggatgggtcatatcgttctgttgaattgaagcatggaaataataccacagtgcagcagataatggaaggaatgcgtctctctcaagaaactcagcaatatttcactatatggatttgttcagaaaacctcagccttcaactcaaaccatatcataaacccttgcaacatgttcgtgactggccagaaatacttgctgaattgactaatctggatcctcaaagggaaacacctcagctttttctaagaagagatgtgagacttcccttggaagttgaaaaacagattgaagacccactagctattcttattctctttgatgaagccagatataatttattgaagggcttttatacagctcctgatgctaagctgataacattggcaagtctgcttttgcaaatagtctatggaaattatgagagtaaaaaacacaagcaaggtttcctaaatgaagaaaatctaaaatccatcgtacctgttaccaaactgaaaagtaaggcacctcactggacaaatcgcatacttcatgaatacaagaatctcagtacaagtgaaggtgtcagtaaagaaatgcatcaccttcagcgcatgttcttacagaattgctgggaaattcctacttatggagcagcatttttcacaggacagatatttacaaaggcaagccccagcaatcataaagtcatccctgtgtatgtaggagtgaatataaaaggacttcatctcctcaacatggaaactaaggctttactcatcagtcttaagtatggttgttttatgtggcaattgggagatactgatacttgttttcagatccatagcatggaaaataaaatgagctttatagtacatacaaaacaggctggtctcgtggtaaaactgttaatgaagctaaatggacagttaatgcccactgaaagaaattcatgaaagagaagtaactgttactcaagccaccacattttgtaatgcagagttttttttccgtgaaagatttcttaaaatattacttttggccgagcatggtggctcacccctgtaattccagcactttgggaggctggggcaggcggatcacctgaagtcagagttcaagaccagcctggccaacatggtgaaaccctgtctctacaaaaatacaaaaattagctgggtgtggtggcgggcgcctataatcctagctactagggaggccaaggtgggagatcgcttaaacccaggaggtggaggttgtagtgagccaagattgcaccacggcacgctagcctgggtgacacagcaagactccatctcaaaaaaaaaaaaaaattactttcaacaaggcatatagtctcttgtaatatatatgtatactattacattgtacagaatctgtacttatgtttggtgtgtaatataccaattagttttatataatatcctcataagctattctaatttttgagagaaacacaaaaagttatagattgatagtctgtataatattagacaaaatagtaagctttataaaaagttatttttggtaaatggtaaggaatttggggtggaatgtgatgagattaaaatgtagctttggtataacttcatgtgtatttcaaaatatactgaacgtcaacatgatttgaataaagaaaatgtattttctacttgaaccacataacactgttatttaaaacagttttctgcagtctataaacatttctcaacatttttttaaaagtcttagttaaaatgtaaatctgatatacagtagtgtttctcaaagtatagttcatgaactccttgcatcataattacctagatgcctcttaaaaatgaagatttcagagacccattctaaacaagggcattcactctctggaagtagcatggccttgtgaacttaaatttggttttgttttttcttttttgctgttagaataatttcagacccaataaggaatttcgattattaaagttgagaaatttcacaaaactgcctggcacacaagcacacacatacatagacacattttaagtgataatctcttgatattagaagttgcatttgttaaatacatgctgtattttttatgagttgacttaatagtttatgtatattgactttgctttgtaggaagtaaatcaccagatatcttattgtttcatttaggaaagtagtgatatagatgaagagccaacttgatgaatgtgctattcataagctagaaactacagtttttccaaactaataaactgatgaattctaaat

SEQ ID NO: 6770 - protein, 736 aa, Homo sapiens; identical to SEQ ID NO: 887

SEQ ID NO: 6771 - DNA, 3785 bp, Homo sapiens
atagccacggtaacggcggggtggaaagctaaggcctttgaagacctgggaccccgtagtttcgggagagggtgaggggtgaatggtgctgaggtgcgaggagagggaaggacagtaaagagcaggtttttggctttcatcgctttttctacatgtttttagcctcaccagaagtctttcatctcggtggtccaactcaggatctcagcctcattattttcttacccttctggagtgcatatgtgcctttacagtttctgtttgcaaacgctgtctagcatactaagaggatgttagcaaacctgttccatggacactaaatggcagttgtacatctcccctcatcagtcatagtgacaaccagaaatgccctccatattttccagtgatcccagcaatgggaaatccagaaaacatagaagatgcatatgttgctgttattcgtccaaagaatactgccagtctcaattctcgggaatacagagctaagtcatatgaaattttgttgcatgaagttcccattgaaggacagaaaaaaaagagaaagaaagttttattggaaacgaaacttcaaggcaacagtgaaataacacaaggcatattggattacgtagtagaaaccaccaaaccaatttctcctgcaaaccagggtatcagaggaaaacgagttgtactaatgaaaaaatttcctctggatggagagaagatgggcagagaagcatcattatttattgttccatcagttgtcaaagataatactaaatacacatataccccaggatgcccaattttttactgcttacaagatattatgcgagtctgtagtgaatccagtactcattttgctacacttacagcaaggatgttaatagccttggataagtggttagatgaacgtcatgcacaatctcactttattccagctttattccgaccttctcctcttgagcggataaaaactaatgtcataaatcctgcatatgctactgaatcaggtcagacagaaaactcactacatatgggctatagtgcactagaaataaagagtaaaatgttagccctagagaaagcagatacctgtatttacaaccctttgtttggatcagatcttcagtatacaaatcgggtagataaagtggtaataaatccatactttggtctaggagctccagactactcaaaaatccaaatacctaaacaggaaaaatggcagagaagcatgagcagtgtcacagaagacaagtatggaaaagttgaggccactcgcatattgttagagaaaggaaagtgcaatccaaaccttttaaatggacaacttagttctcctcttcattttgctgctggaggaggacatgctgaaatagtacagattctcctaaaccacccagaaacggatagacatataacagaccaacaaggaagatctccattaaatatttgtgaagaaaacaaacaaaacaactgggaagaagctgcaaaattgttgaaggaagcaattaacaaaccatatgaaaaagttcgaatatacagaatggatgggtcatatcgttctgttgaattgaagcatggaaataataccacagtgcagcagataatggaaggaatgcgtctctctcaagaaactcagcaatatttcactatatggatttgttcagaaaacctcagccttcaactcaaaccatatcataaacccttgcaacatgttcgtgactggccagaaatacttgctgaattgactaatctggatcctcaaagggaaacacctcagctttttctaagaagagatgtgagacttcccttggaagttgaaaaacagattgaagacccactagctattcttattctctttgatgaagccagatataatttattgaagggcttttatacagctcctgatgctaagctgataacattggcaagtctgcttttgcaaatagtctatggaaattatgagagtaaaaaacacaagcaaggtttcctaaatgaagaaaatctaaaatccatcgtacctgttaccaaactgaaaagtaaggcacctcactggacaaatcgcatacttcatgaatacaagaatctcagtacaagtgaaggtgtcagtaaagaaatgcatcaccttcagcgcatgttcttacagaattgctgggaaattcctacttatggagcagcatttttcacaggacagatatttacaaaggcaagccccagcaatcataaagtcatccctgtgtatgtaggagtgaatataaaaggacttcatctcctcaacatggaaactaaggctttactcatcagtcttaagtatggttgttttatgtggcaattgggagatactgatacttgttttcagatccatagcatggaaaataaaatgagctttatagtacatacaaaacaggctggtctcgtggtaaaactgttaatgaagctaaatggacagttaatgcccactgaaagaaattcatgaaagagaagtaactgttactcaagccaccacattttgtaatgcagagttttttttccgtgaaagatttcttaaaatattacttttggccgagcatggtggctcacccctgtaattccagcactttgggaggctggggcaggcggatcacctgaagtcagagttcaagaccagcctggccaacatggtgaaaccctgtctctacaaaaatacaaaaattagctgggtgtggtggcgggcgcctataatcctagctactagggaggccaaggtgggagatcgcttaaacccaggaggtggaggttgtagtgagccaagattgcaccacggcacgctagcctgggtgacacagcaagactccatctcaaaaaaaaaaaaaaattactttcaacaaggcatatagtctcttgtaatatatatgtatactattacattgtacagaatctgtacttatgtttggtgtgtaatataccaattagttttatataatatcctcataagctattctaatttttgagagaaacacaaaaagttatagattgatagtctgtataatattagacaaaatagtaagctttataaaaagttatttttggtaaatggtaaggaatttggggtggaatgtgatgagattaaaatgtagctttggtataacttcatgtgtatttcaaaatatactgaacgtcaacatgatttgaataaagaaaatgtattttctacttgaaccacataacactgttatttaaaacagttttctgcagtctataaacatttctcaacatttttttaaaagtcttagttaaaatgtaaatctgatatacagtagtgtttctcaaagtatagttcatgaactccttgcatcataattacctagatgcctcttaaaaatgaagatttcagagacccattctaaacaagggcattcactctctggaagtagcatggccttgtgaacttaaatttggttttgttttttcttttttgctgttagaataatttcagacccaataaggaatttcgattattaaagttgagaaatttcacaaaactgcctggcacacaagcacacacatacatagacacattttaagtgataatctcttgatattagaagttgcatttgttaaatacatgctgtattttttatgagttgacttaatagtttatgtatattgactttgctttgtaggaagtaaatcaccagatatcttattgtttcatttaggaaagtagtgatatagatgaagagccaacttgatgaatgtgctattcataagctagaaactacagtttttccaaactaataaactgatgaattctaaat

SEQ ID NO: 6772 - protein, 688 aa, Homo sapiens; identical to SEQ ID NO: 885

SEQ ID NO: 6773 - DNA, 4077 bp, Homo sapiens
atagccacggtaacggcggggtggaaagctaaggcctttgaagacctgggaccccgtagtttcgggagagggtgaggggtgaatggtgctgaggtgcgaggagagggaaggacagtaaagagcaggtttttggctttcatcgctttttctacatgtttttagcctcaccagaagtctttcatctcggtggtccaactcaggatctcagcctcattattttcttacccttctggagtgcatatgtgcctttacagtttctgtttgcaaacgctgtctagcatactaagaggatgttagcaaacctgttccatggacactaaatggcagttgtacatctcccctcatcagtcatagtgacaaccagaaatgccctccatattttccagtgatcccagtcttcaatgcgtctgtctcataatttgtaaacgtttattatcttgaagtcattgttaatctgtggtgaaaagtaattgctaaatagaaattctgagaagaaaaaggcctcatccttttcacatgatgtaggaaggtctgttgcatgagcaatgggaaatccagaaaacatagaagatgcatatgttgctgttattcgtccaaagaatactgccagtctcaattctcgggaatacagagctaagtcatatgaaattttgttgcatgaagttcccattgaaggacagaaaaaaaagagaaagaaagttttattggaaacgaaacttcaaggcaacagtgaaataacacaaggcatattggattacgtagtagaaaccaccaaaccaatttctcctgcaaaccagggtatcagaggaaaacgagttgtactaatgaaaaaatttcctctggatggagagaagatgggcagagaagcatcattatttattgttccatcagttgtcaaagataatactaaatacacatataccccaggatgcccaattttttactgcttacaagatattatgcgagtctgtagtgaatccagtactcattttgctacacttacagcaaggatgttaatagccttggataagtggttagatgaacgtcatgcacaatctcactttattccagctttattccgaccttctcctcttgagcggataaaaactaatgtcataaatcctgcatatgctactgaatcaggtcagacagaaaactcactacatatgggctatagtgcactagaaataaagagtaaaatgttagccctagagaaagcagatacctgtatttacaaccctttgtttggatcagatcttcagtatacaaatcgggtagataaagtggtaataaatccatactttggtctaggagctccagactactcaaaaatccaaatacctaaacaggaaaaatggcagagaagcatgagcagtgtcacagaagacaaggaacgacagtgggtagatgattttcctctccaccgaagcgcctgtgaaggagattcagaattactaagccgtcttctcagtgaaagattttcagtcaaccagttagatagtgaccactgggcacccattcattatgcatgctggtatggaaaagttgaggccactcgcatattgttagagaaaggaaagtgcaatccaaaccttttaaatggacaacttagttctcctcttcattttgctgctggaggaggacatgctgaaatagtacagattctcctaaaccacccagaaacggatagacatataacagaccaacaaggaagatctccattaaatatttgtgaagaaaacaaacaaaacaactgggaagaagctgcaaaattgttgaaggaagcaattaacaaaccatatgaaaaagttcgaatatacagaatggatgggtcatatcgttctgttgaattgaagcatggaaataataccacagtgcagcagataatggaaggaatgcgtctctctcaagaaactcagcaatatttcactatatggatttgttcagaaaacctcagccttcaactcaaaccatatcataaacccttgcaacatgttcgtgactggccagaaatacttgctgaattgactaatctggatcctcaaagggaaacacctcagctttttctaagaagagatgtgagacttcccttggaagttgaaaaacagattgaagacccactagctattcttattctctttgatgaagccagatataatttattgaagggcttttatacagctcctgatgctaagctgataacattggcaagtctgcttttgcaaatagtctatggaaattatgagagtaaaaaacacaagcaaggtttcctaaatgaagaaaatctaaaatccatcgtacctgttaccaaactgaaaagtaaggcacctcactggacaaatcgcatacttcatgaatacaagaatctcagtacaagtgaaggtgtcagtaaagaaatgcatcaccttcagcgcatgttcttacagaattgctgggaaattcctacttatggagcagcatttttcacaggacagatatttacaaaggcaagccccagcaatcataaagtcatccctgtgtatgtaggagtgaatataaaaggacttcatctcctcaacatggaaactaaggctttactcatcagtcttaagtatggttgttttatgtggcaattgggagatactgatacttgttttcagatccatagcatggaaaataaaatgagctttatagtacatacaaaacaggctggtctcgtggtaaaactgttaatgaagctaaatggacagttaatgcccactgaaagaaattcatgaaagagaagtaactgttactcaagccaccacattttgtaatgcagagttttttttccgtgaaagatttcttaaaatattacttttggccgagcatggtggctcacccctgtaattccagcactttgggaggctggggcaggcggatcacctgaagtcagagttcaagaccagcctggccaacatggtgaaaccctgtctctacaaaaatacaaaaattagctgggtgtggtggcgggcgcctataatcctagctactagggaggccaaggtgggagatcgcttaaacccaggaggtggaggttgtagtgagccaagattgcaccacggcacgctagcctgggtgacacagcaagactccatctcaaaaaaaaaaaaaaattactttcaacaaggcatatagtctcttgtaatatatatgtatactattacattgtacagaatctgtacttatgtttggtgtgtaatataccaattagttttatataatatcctcataagctattctaatttttgagagaaacacaaaaagttatagattgatagtctgtataatattagacaaaatagtaagctttataaaaagttatttttggtaaatggtaaggaatttggggtggaatgtgatgagattaaaatgtagctttggtataacttcatgtgtatttcaaaatatactgaacgtcaacatgatttgaataaagaaaatgtattttctacttgaaccacataacactgttatttaaaacagttttctgcagtctataaacatttctcaacatttttttaaaagtcttagttaaaatgtaaatctgatatacagtagtgtttctcaaagtatagttcatgaactccttgcatcataattacctagatgcctcttaaaaatgaagatttcagagacccattctaaacaagggcattcactctctggaagtagcatggccttgtgaacttaaatttggttttgttttttcttttttgctgttagaataatttcagacccaataaggaatttcgattattaaagttgagaaatttcacaaaactgcctggcacacaagcacacacatacatagacacattttaagtgataatctcttgatattagaagttgcatttgttaaatacatgctgtattttttatgagttgacttaatagtttatgtatattgactttgctttgtaggaagtaaatcaccagatatcttattgtttcatttaggaaagtagtgatatagatgaagagccaacttgatgaatgtgctattcataagctagaaactacagtttttccaaactaataaactgatgaattctaaat

SEQ ID NO: 6774 - protein, 736 aa, Homo sapiens; identical to SEQ ID NO: 887

SEQ ID NO: 6775 - DNA, 3833 bp, Homo sapiens
ggcggggtggaaagctaaggcctttgaagacctgggaccccgtagtttcgggagagggtgaggggtgaatggtgctgaggtgcgaggagagggaaggacagtaaagagcaggtgggcaggagggtctccgactccagagacctgagcttttggggcgcgggtgggagcgcgggggaaccctcaagacggctttcttttggcgactgagggtttttctgccacaggaagctgggccgggctgctgtgcctgggaggagggaaggaggaatgagaaagcggtgacggtccctgccccccctcgccaggtgactgtcccacccatttagttgaatgtagcggccagagaggcactcgcggcagcccgtacgggtgggacctctcggtgtccttcgggaaacaggaggagcaagttcgactccagcgagggaaaacggaggtgggagactgaaccatctccacatctagttgccccaggtttttggctttcatcgctttttctacatgtttttagcctcaccagaagtctttcatctcggtggtccaactcaggatctcagcctcattattttcttacccttctggagtgcatatgtgcctttacagtttctgtttgcaaacgctgtctagcatactaagaggatgttagcaaacctgttccatggacactaaatggcagttgtacatctcccctcatcagtcatagtgacaaccagaaatgccctccatattttccagtgatcccagtcttcaatgcgtctgtctcataatttgtaaacgtttattatcttgaagtcattgttaatctgtggtgaaaagtaattgctaaatagaaattctgagaagaaaaaggcctcatccttttcacatgatgtaggaaggtctgttgcatgagcaatgggaaatccagaaaacatagaagatgcatatgttgctgttattcgtccaaagaatactgccagtctcaattctcgggaatacagagctaagtcatatgaaattttgttgcatgaagttcccattgaaggacagaaaaaaaagagaaagaaagttttattggaaacgaaacttcaaggcaacagtgaaataacacaaggcatattggattacgtagtagaaaccaccaaaccaatttctcctgcaaaccagggtatcagaggaaaacgagttgtactaatgaaaaaatttcctctggatggagagaagatgggcagagaagcatcattatttattgttccatcagttgtcaaagataatactaaatacacatataccccaggatgcccaattttttactgcttacaagatattatgcgagtctgtagtgaatccagtactcattttgctacacttacagcaaggatgttaatagccttggataagtggttagatgaacgtcatgcacaatctcactttattccagctttattccgaccttctcctcttgagcggataaaaactaatgtcataaatcctgcatatgctactgaatcaggtcagacagaaaactcactacatatgggctatagtgcactagaaataaagagtaaaatgttagccctagagaaagcagatacctgtatttacaaccctttgtttggatcagatcttcagtatacaaatcgggtagataaagtggtaataaatccatactttggtctaggagctccagactactcaaaaatccaaatacctaaacaggaaaaatggcagagaagcatgagcagtgtcacagaagacaaggaacgacagtgggtagatgattttcctctccaccgaagcgcctgtgaaggagattcagaattactaagccgtcttctcagtgaaagattttcagtcaaccagttagatagtgaccactgggcacccattcattatgcatgctggtatggaaaagttgaggccactcgcatattgttagagaaaggaaagtgcaatccaaaccttttaaatggacaacttagttctcctcttcattttgctgctggaggaggacatgctgaaatagtacagattctcctaaaccacccagaaacggatagacatataacagaccaacaaggaagatctccattaaatatttgtgaagaaaacaaacaaaacaactgggaagaagctgcaaaattgttgaaggaagcaattaacaaaccatatgaaaaagttcgaatatacagaatggatgggtcatatcgttctgttgaattgaagcatggaaataataccacagtgcagcagataatggaaggaatgcgtctctctcaagaaactcagcaatatttcactatatggatttgttcagaaaacctcagccttcaactcaaaccatatcataaacccttgcaacatgttcgtgactggccagaaatacttgctgaattgactaatctggatcctcaaagggaaacacctcagctttttctaagaagagatgtgagacttcccttggaagttgaaaaacagattgaagacccactagctattcttattctctttgatgaagccagatataatttattgaagggcttttatacagctcctgatgctaagctgataacattggcaagtctgcttttgcaaatagtctatggaaattatgagagtaaaaaacacaagcaaggtttcctaaatgaagaaaatctaaaatccatcgtacctgttaccaaactgaaaagtaaggcacctcactggacaaatcgcatacttcatgaatacaagaatctcagtacaagtgaaggtgtcagtaaagaaatgcatcaccttcagcgcatgttcttacagaattgctgggaaattcctacttatggagcagcatttttcacaggacagatatttacaaaggcaagccccagcaatcataaagtcatccctgtgtatgtaggagtgaatataaaaggacttcatctcctcaacatggaaactaaggctttactcatcagtcttaagtatggttgttttatgtggcaattgggagatactgatacttgttttcagatccatagcatggaaaataaaatgagctttatagtacatacaaaacaggctggtctcgtggtaaaactgttaatgaagctaaatggacagttaatgcccactgaaagaaattcatgaaagagaagtaactgttactcaagccaccacattttgtaatgcagagttttttttccgtgaaagatttcttaaaatattacttttggccgagcatggtggctcacccctgtaattccagcactttgggaggctggggcaggcggatcacctgaagtcagagttcaagaccagcctggccaacatggtgaaaccctgtctctacaaaaatacaaaaattagctgggtgtggtggcgggcgcctataatcctagctactagggaggccaaggtgggagatcgcttaaacccaggaggtggaggttgtagtgagccaagattgcaccacggcacgctagcctgggtgacacagcaagactccatctcaaaaaaaaaaaaaaattactttcaacaaggcatatagtctcttgtaatatatatgtatactattacattgtacagaatctgtacttatgtttggtgtgtaatataccaattagttttatataatatcctcataagctattctaatttttgagagaaacacaaaaagttatagattgatagtctgtataatattagacaaaatagtaagctttataaaaagttatttttggtaaatggtaaggaatttggggtggaatgtgatgagattaaaatgtagctttggtataacttcatgtgtatttcaaaatatactgaacgtcaacatgatttgaataaagaaaatgtattttctacttgaaccacat

SEQ ID NO: 6776 - protein, 736 aa, Homo sapiens; identical to SEQ ID NO: 887

SEQ ID NO: 6777 - DNA, 3192 bp, Homo sapiens
atagccacggtaacggcggggtggaaagctaaggcctttgaagacctgggaccccgtagtttcgggagagggtgaggggtgaatggtgctgaggtgcgaggagagggaaggacagtaaagagcaggtttttggctttcatcgctttttctacatgtttttagcctcaccagaagtctttcatctcggtggtccaactcaggatctcagcctcattattttcttacccttctggagtgcatatgtgcctttacagtttctgtttgcaaacgctgtctagcatactaagaggatgttagcaaacctgttccatggacactaaatggcagttgtacatctcccctcatcagtcatagtgacaaccagaaatgccctccatattttccagtgatcccagcaatgggaaatccagaaaacatagaagatgcatatgttgctgttattcgtccaaagaatactgccagtctcaattctcgggaatacagagctaagtcatatgaaattttgttgcatgaagttcccattgaaggacagaaaaaaaagagaaagaaagttttattggaaacgaaacttcaaggcaacagtgaaataacacaaggcatattggattacgtagtagaaaccaccaaaccaatttctcctgcaaaccagggtatcagaggaaaacgagttgtactaatgaaaaaatttcctctggatggagagaagatgggcagagaagcatcattatttattgttccatcagttgtcaaagataatactaaatacacatataccccaggatgcccaattttttactgcttacaagatattatgcgagtctgtagtgaatccagtactcattttgctacacttacagcaaggatgttaatagccttggataagtggttagatgaacgtcatgcacaatctcactttattccagctttattccgaccttctcctcttgagcggataaaaactaatgtcataaatcctgcatatgctactgaatcaggtcagacagaaaactcactacatatgggctatagtgcactagaaataaagagtaaaatgttagccctagagaaagcagatacctgtatttacaaccctttgtttggatcagatcttcagtatacaaatcgggtagataaagtggtaataaatccatactttggtctaggagctccagactactcaaaaatccaaatacctaaacaggaaaaatggcagagaagcatgagcagtgtcacagaagacaagtatggaaaagttgaggccactcgcatattgttagagaaaggaaagtgcaatccaaaccttttaaatggacaacttagttctcctcttcattttgctgctggaggaggacatgctgaaatagtacagattctcctaaaccacccagaaacggatagacatataacagaccaacaaggaagatctccattaaatatttgtgaagaaaacaaacaaaacaactgggaagaagctgcaaaattgttgaaggaagcaattaacaaaccatatgaaaaagttcgaatatacagaatggatgggtcatatcgttctgttgaattgaagcatggaaataataccacagtgcagcagataatggaaggaatgcgtctctctcaagaaactcagcaatatttcactatatggatttgttcagaaaacctcagccttcaactcaaaccatatcataaacccttgcaacatgttcgtgactggccagaaatacttgctgaattgactaatctggatcctcaaagggaaacacctcagctttttctaagaagagatgtgagacttcccttggaagttgaaaaacagattgaagacccactagctattcttattctctttgatgaagccagatataatttattgaagggcttttatacagctcctgatgctaagctgataacattggcaagtctgcttttgcaaatagtctatggaaattatgagagtaaaaaacacaagcaaggtttcctaaatgaagaaaatctaaaatccatcgtacctgttaccaaactgaaaagtaaggcacctcactggacaaatcgcatacttcatgaatacaagaatctcagtacaagtgaaggtgtcagtaaagaaatgcatcaccttcagcgcatgttcttacagaattgctgggaaattcctacttatggagcagcatttttcacaggacagatatttacaaaggcaagccccagcaatcataaagtcatccctgtgtatgtaggagtgaatataaaaggacttcatctcctcaacatggaaactaaggctttactcatcagtcttaagtatggttgttttatgtggcaattgggagatactgatacttgttttcagatccatagcatggaaaataaaatgagctttatagtacatacaaaacaggctggtctcgtggtaaaactgttaatgaagctaaatggacagttaatgcccactgaaagaaattcatgaaagagaagtaactgttactcaagccaccacattttgtaatgcagagttttttttccgtgaaagatttcttaaaatattacttttggccgagcatggtggctcacccctgtaattccagcactttgggaggctggggcaggcggatcacctgaagtcagagttcaagaccagcctggccaacatggtgaaaccctgtctctacaaaaatacaaaaattagctgggtgtggtggcgggcgcctataatcctagctactagggaggccaaggtgggagatcgcttaaacccaggaggtggaggttgtagtgagccaagattgcaccacggcacgctagcctgggtgacacagcaagactccatctcaaaaaaaaaaaaaaattactttcaacaaggcatatagtctcttgtaatatatatgtatactattacattgtacagaatctgtacttatgtttggtgtgtaatataccaattagttttatataatatcctcataagctattctaatttttgagagaaacacaaaaagttatagattgatagtctgtataatattagacaaaatagtaagctttataaaaagttatttttggtaaatggtaaggaatttggggtggaatgtgatgagattaaaatgtagctttggtataacttcatgtgtatttcaaaatatactgaacgtcaacatgatttgaataaagaaaatgtattttctacttgaaccacat

SEQ ID NO: 6778 - protein, 688 aa, Homo sapiens; identical to SEQ ID NO: 885

SEQ ID NO: 6779 - DNA, 3484 bp, Homo sapiens
atagccacggtaacggcggggtggaaagctaaggcctttgaagacctgggaccccgtagtttcgggagagggtgaggggtgaatggtgctgaggtgcgaggagagggaaggacagtaaagagcaggtttttggctttcatcgctttttctacatgtttttagcctcaccagaagtctttcatctcggtggtccaactcaggatctcagcctcattattttcttacccttctggagtgcatatgtgcctttacagtttctgtttgcaaacgctgtctagcatactaagaggatgttagcaaacctgttccatggacactaaatggcagttgtacatctcccctcatcagtcatagtgacaaccagaaatgccctccatattttccagtgatcccagtcttcaatgcgtctgtctcataatttgtaaacgtttattatcttgaagtcattgttaatctgtggtgaaaagtaattgctaaatagaaattctgagaagaaaaaggcctcatccttttcacatgatgtaggaaggtctgttgcatgagcaatgggaaatccagaaaacatagaagatgcatatgttgctgttattcgtccaaagaatactgccagtctcaattctcgggaatacagagctaagtcatatgaaattttgttgcatgaagttcccattgaaggacagaaaaaaaagagaaagaaagttttattggaaacgaaacttcaaggcaacagtgaaataacacaaggcatattggattacgtagtagaaaccaccaaaccaatttctcctgcaaaccagggtatcagaggaaaacgagttgtactaatgaaaaaatttcctctggatggagagaagatgggcagagaagcatcattatttattgttccatcagttgtcaaagataatactaaatacacatataccccaggatgcccaattttttactgcttacaagatattatgcgagtctgtagtgaatccagtactcattttgctacacttacagcaaggatgttaatagccttggataagtggttagatgaacgtcatgcacaatctcactttattccagctttattccgaccttctcctcttgagcggataaaaactaatgtcataaatcctgcatatgctactgaatcaggtcagacagaaaactcactacatatgggctatagtgcactagaaataaagagtaaaatgttagccctagagaaagcagatacctgtatttacaaccctttgtttggatcagatcttcagtatacaaatcgggtagataaagtggtaataaatccatactttggtctaggagctccagactactcaaaaatccaaatacctaaacaggaaaaatggcagagaagcatgagcagtgtcacagaagacaaggaacgacagtgggtagatgattttcctctccaccgaagcgcctgtgaaggagattcagaattactaagccgtcttctcagtgaaagattttcagtcaaccagttagatagtgaccactgggcacccattcattatgcatgctggtatggaaaagttgaggccactcgcatattgttagagaaaggaaagtgcaatccaaaccttttaaatggacaacttagttctcctcttcattttgctgctggaggaggacatgctgaaatagtacagattctcctaaaccacccagaaacggatagacatataacagaccaacaaggaagatctccattaaatatttgtgaagaaaacaaacaaaacaactgggaagaagctgcaaaattgttgaaggaagcaattaacaaaccatatgaaaaagttcgaatatacagaatggatgggtcatatcgttctgttgaattgaagcatggaaataataccacagtgcagcagataatggaaggaatgcgtctctctcaagaaactcagcaatatttcactatatggatttgttcagaaaacctcagccttcaactcaaaccatatcataaacccttgcaacatgttcgtgactggccagaaatacttgctgaattgactaatctggatcctcaaagggaaacacctcagctttttctaagaagagatgtgagacttcccttggaagttgaaaaacagattgaagacccactagctattcttattctctttgatgaagccagatataatttattgaagggcttttatacagctcctgatgctaagctgataacattggcaagtctgcttttgcaaatagtctatggaaattatgagagtaaaaaacacaagcaaggtttcctaaatgaagaaaatctaaaatccatcgtacctgttaccaaactgaaaagtaaggcacctcactggacaaatcgcatacttcatgaatacaagaatctcagtacaagtgaaggtgtcagtaaagaaatgcatcaccttcagcgcatgttcttacagaattgctgggaaattcctacttatggagcagcatttttcacaggacagatatttacaaaggcaagccccagcaatcataaagtcatccctgtgtatgtaggagtgaatataaaaggacttcatctcctcaacatggaaactaaggctttactcatcagtcttaagtatggttgttttatgtggcaattgggagatactgatacttgttttcagatccatagcatggaaaataaaatgagctttatagtacatacaaaacaggctggtctcgtggtaaaactgttaatgaagctaaatggacagttaatgcccactgaaagaaattcatgaaagagaagtaactgttactcaagccaccacattttgtaatgcagagttttttttccgtgaaagatttcttaaaatattacttttggccgagcatggtggctcacccctgtaattccagcactttgggaggctggggcaggcggatcacctgaagtcagagttcaagaccagcctggccaacatggtgaaaccctgtctctacaaaaatacaaaaattagctgggtgtggtggcgggcgcctataatcctagctactagggaggccaaggtgggagatcgcttaaacccaggaggtggaggttgtagtgagccaagattgcaccacggcacgctagcctgggtgacacagcaagactccatctcaaaaaaaaaaaaaaattactttcaacaaggcatatagtctcttgtaatatatatgtatactattacattgtacagaatctgtacttatgtttggtgtgtaatataccaattagttttatataatatcctcataagctattctaatttttgagagaaacacaaaaagttatagattgatagtctgtataatattagacaaaatagtaagctttataaaaagttatttttggtaaatggtaaggaatttggggtggaatgtgatgagattaaaatgtagctttggtataacttcatgtgtatttcaaaatatactgaacgtcaacatgatttgaataaagaaaatgtattttctacttgaaccacat

SEQ ID NO: 6780 - protein, 736 aa, Homo sapiens; identical to SEQ ID NO: 887

SEQ ID NO: 6781 - DNA, 1589 bp, Homo sapiens
gtgctttttatttcatttattgagttcttccattccaggattatgtacttttgttatcttatatgtcttaagtcacactgagtttctttaatgtcattttgatttttttgttaggcatttcaaaatttggggggagcatctgttactgaagaattattgttttcctttgaaggtgtcatgttttcttgcttttcaatgttttttgtatcgttatatttatatctgtacatctgatgtcacttcttcctattttatgcattggcttttgtagggaaagactttttcctgtagatgtagctatagtgttggttggatagggtgctttggctttgattctgggtgagtgcagtagtatagtctccctgtgatttcttcagctttaatgagcattagcggtgtctgagagtccctcagtggcttagactgtggttgttaatgaaggctgtagtaggcttttctggggactgtgactccaggtagaccagtgctcaggcactagtagttgtgccagtaggcagggcatgcctttcctcaggcccctagatagtacatgtgggcgccagcaggcataggcagagcataacagtacttaaggccccagatgaaatgcacaggcaccaacagcaggcagaacaggcctgtcgtcaggccctctgatggtgtatgcaggcaatggcagcagcgtgctagttgagtcagtcctcaggcccttagatggcatgcttaggcacagttgacagtggcagtgggcagagcaggcttgtccttaggaccctagataatgtgtgctggtggcagtggtgggcagggcaggcttctctccaagcccacctctggagtttgcaggtgctggtggcaggcaggtgggttgacctcctggcactatgtgcacaggtgacagcagcagtaggtgggttagacccttttcaatcccactttagagctcttcagttagaagttagtttatggtgctcctttttctaaccgtaagtcattataaaatacaggtttatcagttattttttggcatatttaacacatttaaatgggatgaacagctttttagtttataataggaagctaataaaaatcaaatctaatttgtttcattttgttttgttttttgagacagagtcttgctctgtcacccaggctggacgcagtggaggttgtagtgagccaagattgcaccacggcacgctagcctgggtgacacagcaagactccatctcaaaaaaaaaaaaaaattactttcaacaaggcatatagtctcttgtaatatatatgtatactattacattgtacagaatctgtacttatgtttggtgtgtaatataccaattagttttatataatatcctcataagctattctaatttttgagagaaacacaaaaagttatagattgatagtctgtataatattagacaaaatagtaagctttataaaaagttatttttggtaaatggtaaggaatttggggtggaatgtgatgagattaaaatgtagctttggtataacttcatgtgtatttcaaaatatactgaacgtcaacatgatttgaataaagaaaatgtattttctacttg

SEQ ID NO: 6782 - protein, 72 aa, Homo sapiens
MNSFLVYNRKLIKIKSNLFHFVLFFETESCSVTQAGRSGGCSEPRLHHGTLAWVTQQDSISKKKKNYFQQGI

SEQ ID NO: 6783 - DNA, 586 bp, Homo sapiens
attgtgcttacatccttaaatcgatccttacatccctgtgataattggcggagtttcagttgatctacttacaaagcccttggttgggatttttcatttccactcccattgtcttaagaatacaaaagaaatagggagctatcctaaagaaaattagcaatcagatgtggagccaaattatacaggaaaaaaaattgtttagactagttaggaagtacactgtcaaggataaacttaataaagggctgatcagttgtatacattttgaaggaagaaagagaaacactggtgtggaagagaacatcctgggtggataagattatacttgcaaagggaagaatgcgaaagtcattctcaacagtccataagtggctcatctttttttttttgagactgagtcttgctctgtgtcccaggctggagtggcacaatctcggctcagtacaatctccacctcccaggtttaagcactacttgggaggccaaggcagagaattgcttgaatctgggaggtggaggttgcagtgagccgagatcgtgccactgcactccagcctggatgacagaatgagattccatctcaaaa

SEQ ID NO: 6784 - protein, 62 aa, Homo sapiens
MRKSFSTVHKWLIFFFLRLSLALCPRLEWHNLGSVQSPPPRFKHYLGGQGRELLESGRWRLQ

SEQ ID NO: 6785 - DNA, 5068 bp, Homo sapiens
cgcagcggccggagagggatggggggcgcccacccagtctgagcctcgccgcgggcgccttcggctcacgcagcgcttcccgcgggccgccagtgcgcaccctcggccacatcagcctccgcctggcgggtgcacccgggccggcgaggaaggggcaaccgtccgggtgggtggggcgggctgggtacctgaggtcaccagctcggctgtagaggcaggggcggcggaggcggaactgcggagttgctgggtccaccgacccttaccctcagcgagagaagtaaccaatgtgaaagatgttgcagaagtgttccagaagtggctgaagatagaaggaaaaaagtgccactgcctatcagaaaaaacaaaacaaaacatgggaaatacaaccaccaaattccgtaaagcactcatcaatggtgatgaaaacctggcctgccaaatatatgaaaacaatcctcagctaaaagaatctcttgatccaaatacatcttatggggagccctaccagcacaatactccattacattatgctgctagacatggaatgaataaaatattagggacttttcttggtagagatggaaatccaaataaacggaatgtgcacaatgaaacatctatgcatttgttgtgtatgggacctcaaattatgatatctgaaggagcccttcatcctcgcttggcacgccccacagaagatgatttcagaagagcagattgtctgcagatgatcttaaaatggaaaggagcaaaacttgaccagggtgaatatgagagagcagctattgatgctgttgataacaaaaaaaacacacccttgcactatgctgctgcctcagggatgaaagcctgtgtagagcttttagtaaaacatggaggagacttgtttgctgagaatgaaaataaagatactccttgtgattgtgctgaaaagcaacaccacaaagatttggccctcaatctggaatctcaaatggtattctcacgggatcccgaggctgaagaaatagaagctgaatatgctgcattagacaaacgagagccatatgaaggattaaggcctcaggatcttcgtagactaaaagatatgcttattgtggaaactgcagacatgcttcaggctcctctctttactgctgaagctttacttcgagctcatgactgggacagggagaaattacttgaagcttggatgtccaacccggagaactgctgccaacgatcaggtgttcaaatgccaactccaccaccaagtgggtataatgcctgggacacgctcccatctccaagaactccaaggactacacgctcttctgtcacctccccagatgaaatcagcttatctcctggggatttagacaccagtttgtgtgacatttgtatgtgcagtatctctgtatttgaagaccctgtggatatgccctgtggacatgacttttgtagaggatgttgggagtcgtttttgaatctgaaaattcaagaaggtgaagctcacaacattttttgccctgcatatgattgcttccaacttgtacctgtggatatcatagaaagtgtagtttcaaaggagatggacaaacgatacctacagtttgatattaaggcctttgttgaaaataatcctgccattaaatggtgtcctactccaggctgtgacagagcagtaagactaacgaaacaagggtcaaatacatctggatctgatacactcagcttcccattgctgagagctcctgctgttgattgtggaaaaggacacctcttctgctgggagtgccttggtgaagcacatgagccttgtgactgccaaacatggaagaattggctgcaaaaaataaccgaaatgaaaccagaagaacttgtgggagttagtgaagcctacgaggatgccgccaattgtctctggttattaactaactccaagccttgtgccaactgtaagtctccaatacagaagaatgaaggctgcaatcacatgcagtgtgctaagtgcaagtatgacttttgctggatttgccttgaagagtggaaaaaacatagttcgtccactggaggttattacagatgtactcgctatgaagtcattcaacacgtggaggagcaatccaaggaaatgactgtggaggctgagaaaaaacacaaacgatttcaggaacttgacagatttatgcactattatacaagatttaaaaaccatgagcatagttatcagctagaacaacgccttcttaaaacagccaaagaaaagatggagcaattgagcagagctctcaaagaaactgaaggaggctgtccagataccactttcattgaagatgcagttcatgtgctcttaaaaactcggcgcattctcaagtgttcttatccatatggatttttcttggaacctaaaagcacaaagaaagaaatttttgaactaatgcaaacagacctagaaatggtcactgaagaccttgcccagaaagtcaataggccttaccttcgcacaccccgccacaagatcatcaaagcagcatgccttgtacagcagaagaggcaagaattcctggcatctgtggctcggggagtagctcctgcagactcaccagaagctccaaggcgcagctttgctggtggaacatgggattgggaatatttaggatttgcatcaccagaggaatatgctgaatttcagtatcggaggaggcacagacaacgtcgtcgaggagatgttcacagtctactcagtaatcctccagaccctgatgagccaagtgaaagcactttagatattccagaaggcggcagcagcagccgcaggcctggcacatccgtggtaagttctgcatctatgagtgtgctgcacagctcttccctgcgtgactacacccctgccagtcgctctgaaaaccaggactctcttcaggctctgagttccttggatgaagacgatcccaatatacttcttgcaatacagttatcactgcaagagtctgggctggccctcgatgaagaaactagagacttcctcagtaatgaagcatccttaggtgcgataggcacttctttaccttccaggctggactctgtccccagaaatacagatagccctcgggctgcattgagcagctctgagcttttggaacttggtgacagcctcatgagactaggagcagagaatgacccattttcaactgacaccctgagctcacaccctctcagtgaggcaagaagtgatttctgtccctcatctagtgatcctgactcagctggccaggaccccaacatcaatgacaatcttctcggcaacatcatggcttggtttcatgacatgaaccctcagagtattgccctgattcctccagcaactacagaaatcagtgcagattcccagctcccctgtatcaaagatgggtcagaaggtgtgaaggatgtggaactggtgctgccagaagattcaatgtttgaagatgccagtgtcagtgaaggtagaggaacccagatagaagaaaatcctttggaagaaaatattctggcgggggaagcagcatctcaagctggtgacagtggtaacgaggcagccaacagaggagatggttcagatgtttcaagtcaaacacctcaaacctcaagtgactggcttgaacaagtacatttagtgtgaactgcacacatctgggctctaaatgaattacaggtacagatggtatgctaggtggagtatgcttgatagagactttgattcacttaattccaactcagtgataaaccactgacattagggttgaatacagagaagttcccttgaatggtagcttcattttttattttaaccttacagggaatttcctttgtacttaattgaatagcttttcccctttttgctgacaaaaagaagagcaagagaaagagaaacaaaaatgaaataaataagttgtattccacactctaagaaaatgcagtcctctatttagcctaggcttgacaatacttaaattgaacatttaaactaaaggcttactccctaatctttgggtggctttcctttaaaaaaaaaaaaaaagttttcttcattctagaaatttattttggataaatccgataacatatatgtcctcaatctctttgtgctcttccataacttacttcctttttgtctgagcaatgtgaattgaagtctctttagtaccacatctaccatagtgtaattagttttaattttcacatgaatcaaaggtttcctttcatgtctatttacagtccaattgtgccaaactcttacttgtgtgctgactaacaaggcatttaggtgtgcagcatcctagagtgctccagggcagtgtcagcgttctcgggagtaaaaggtgccacttggtagcaatgatattccagaattaaatgggtttttgttgccatggagactgcatttatataaatgtagcctgtagcttaagttaactaaacctaatgctgctgttaaaaacagtttattttaatattaaaatacagttgattagcaacagcggtgctgtattttaagagacactttattggaagtgcaatcatagttatttgttttcacaattttacagtgcattctaattactgatgggtgcaattacttttaatcgtgttttataaaatagaaaaaaagtggagttttcatgagttatagtaaatcccacgattattaagaaattcagtaaaacatcctgcgcaacatgttaccgtgcctttgcctaacctaaatggatagttgccagttaaataagtgagtaattcaaatttcaatgtctcttctgaagtaactatgctatgaattgcaaagacctccataaaaccacccatggccttgcttttacactaactataacaactaaatgttcaatcagtttgtttgcctaactagcaaatgctgacatgtgtttgttctactgcgcaatactcatttgctgtgtgattactgtttagtgttgaaaaaaatcaacttcctagttatcagtgtcttactgtgaagaaaatactggtcttagttgtaattaggatacaatggtacagtgtgtaattaaaactagagtaaactgtt

SEQ ID NO: 6786 - protein, 1089 aa, Homo sapiens
MGNTTTKFRKALINGDENLACQIYENNPQLKESLDPNTSYGEPYQHNTPLHYAARHGMNKILGTFLGRDGNPNKRNVHNETSMHLLCMGPQIMISEGALHPRLARPTEDDFRRADCLQMILKWKGAKLDQGEYERAAIDAVDNKKNTPLHYAAASGMKACVELLVKHGGDLFAENENKDTPCDCAEKQHHKDLALNLESQMVFSRDPEAEEIEAEYAALDKREPYEGLRPQDLRRLKDMLIVETADMLQAPLFTAEALLRAHDWDREKLLEAWMSNPENCCQRSGVQMPTPPPSGYNAWDTLPSPRTPRTTRSSVTSPDEISLSPGDLDTSLCDICMCSISVFEDPVDMPCGHDFCRGCWESFLNLKIQEGEAHNIFCPAYDCFQLVPVDIIESVVSKEMDKRYLQFDIKAFVENNPAIKWCPTPGCDRAVRLTKQGSNTSGSDTLSFPLLRAPAVDCGKGHLFCWECLGEAHEPCDCQTWKNWLQKITEMKPEELVGVSEAYEDAANCLWLLTNSKPCANCKSPIQKNEGCNHMQCAKCKYDFCWICLEEWKKHSSSTGGYYRCTRYEVIQHVEEQSKEMTVEAEKKHKRFQELDRFMHYYTRFKNHEHSYQLEQRLLKTAKEKMEQLSRALKETEGGCPDTTFIEDAVHVLLKTRRILKCSYPYGFFLEPKSTKKEIFELMQTDLEMVTEDLAQKVNRPYLRTPRHKIIKAACLVQQKRQEFLASVARGVAPADSPEAPRRSFAGGTWDWEYLGFASPEEYAEFQYRRRHRQRRRGDVHSLLSNPPDPDEPSESTLDIPEGGSSSRRPGTSVVSSASMSVLHSSSLRDYTPASRSENQDSLQALSSLDEDDPNILLAIQLSLQESGLALDEETRDFLSNEASLGAIGTSLPSRLDSVPRNTDSPRAALSSSELLELGDSLMRLGAENDPFSTDTLSSHPLSEARSDFCPSSSDPDSAGQDPNINDNLLGNIMAWFHDMNPQSIALIPPATTEISADSQLPCIKDGSEGVKDVELVLPEDSMFEDASVSEGRGTQIEENPLEENILAGEAASQAGDSGNEAANRGDGSDVSSQTPQTSSDWLEQVHLV

SEQ ID NO: 6787 - DNA, 6081 bp, Homo sapiens
cgcagcggccggagagggatggggggcgcccacccagtctgagcctcgccgcgggcgccttcggctcacgcagcgcttcccgcgggccgccagtgcgcaccctcggccacatcagcctccgcctggcgggtgcacccgggccggcgaggaaggggcaaccgtccgggtgggtggggcgggctgggtacctgaggtcaccagctcggctgtagaggcaggggcggcggaggcggaactgcggagttgctgggtccaccgacccttaccctcagcgagagaagtaaccaatgtgaaagatgttgcagaagtgttccagaagtggctgaagatagaaggaaaaaagtgccactgcctatcagaaaaaacaaaacaaaacatgggaaatacaaccaccaaattccgtaaagcactcatcaatggtgatgaaaacctggcctgccaaatatatgaaaacaatcctcagctaaaagaatctcttgatccaaatacatcttatggggagccctaccagcacaatactccattacattatgctgctagacatggaatgaataaaatattagggacttttcttggtagagatggaaatccaaataaacggaatgtgcacaatgaaacatctatgcatttgttgtgtatgggacctcaaattatgatatctgaaggagcccttcatcctcgcttggcacgccccacagaagatgatttcagaagagcagattgtctgcagatgatcttaaaatggaaaggagcaaaacttgaccagggtgaatatgagagagcagctattgatgctgttgataacaaaaaaaacacacccttgcactatgctgctgcctcagggatgaaagcctgtgtagagcttttagtaaaacatggaggagacttgtttgctgagaatgaaaataaagatactccttgtgattgtgctgaaaagcaacaccacaaagatttggccctcaatctggaatctcaaatggtattctcacgggatcccgaggctgaagaaatagaagctgaatatgctgcattagacaaacgagagccatatgaaggattaaggcctcaggatcttcgtagactaaaagatatgcttattgtggaaactgcagacatgcttcaggctcctctctttactgctgaagctttacttcgagctcatgactgggacagggagaaattacttgaagcttggatgtccaacccggagaactgctgccaacgatcaggtgttcaaatgccaactccaccaccaagtgggtataatgcctgggacacgctcccatctccaagaactccaaggactacacgctcttctgtcacctccccagatgaaatcagcttatctcctggggatttagacaccagtttgtgtgacatttgtatgtgcagtatctctgtatttgaagaccctgtggatatgccctgtggacatgacttttgtagaggatgttgggagtcgtttttgaatctgaaaattcaagaaggtgaagctcacaacattttttgccctgcatatgattgcttccaacttgtacctgtggatatcatagaaagtgtagtttcaaaggagatggacaaacgatacctacagtttgatattaaggcctttgttgaaaataatcctgccattaaatggtgtcctactccaggctgtgacagagcagtaagactaacgaaacaagggtcaaatacatctggatctgatacactcagcttcccattgctgagagctcctgctgttgattgtggaaaaggacacctcttctgctgggagtgccttggtgaagcacatgagccttgtgactgccaaacatggaagaattggctgcaaaaaataaccgaaatgaaaccagaagaacttgtgggagttagtgaagcctacgaggatgccgccaattgtctctggttattaactaactccaagccttgtgccaactgtaagtctccaatacagaagaatgaaggctgcaatcacatgcagtgtgctaagtgcaagtatgacttttgctggatttgccttgaagagtggaaaaaacatagttcgtccactggaggttattacagatgtactcgctatgaagtcattcaacacgtggaggagcaatccaaggaaatgactgtggaggctgagaaaaaacacaaacgatttcaggaacttgacagatttatgcactattatacaagatttaaaaaccatgagcatagttatcagctagaacaacgccttcttaaaacagccaaagaaaagatggagcaattgagcagagctctcaaagaaactgaaggaggctgtccagataccactttcattgaagatgcagttcatgtgctcttaaaaactcggcgcattctcaagtgttcttatccatatggatttttcttggaacctaaaagcacaaagaaagaaatttttgaactaatgcaaacagacctagaaatggtcactgaagaccttgcccagaaagtcaataggccttaccttcgcacaccccgccacaagatcatcaaagcagcatgccttgtacagcagaagaggcaagaattcctggcatctgtggctcggggagtagctcctgcagactcaccagaagctccaaggcgcagctttgctggtggaacatgggattgggaatatttaggatttgcatcaccagaggaatatgctgaatttcagtatcggaggaggcacagacaacgtcgtcgaggagatgttcacagtctactcagtaatcctccagaccctgatgagccaagtgaaagcactttagatattccagaaggcggcagcagcagccgcaggcctggcacatccgtggtaagttctgcatctatgagtgtgctgcacagctcttccctgcgtgactacacccctgccagtcgctctgaaaaccaggactctcttcaggctctgagttccttggatgaagacgatcccaatatacttcttgcaatacagttatcactgcaagagtctgggctggccctcgatgaagaaactagagacttcctcagtaatgaagcatccttaggtgcgataggcacttctttaccttccaggctggactctgtccccagaaatacagatagccctcgggctgcattgagcagctctgagcttttggaacttggtgacagcctcatgagactaggagcagagaatgacccattttcaactgacaccctgagctcacaccctctcagtgaggcaagaagtgatttctgtccctcatctagtgatcctgactcagctggccaggaccccaacatcaatgacaatcttctcggcaacatcatggcttggtttcatgacatgaaccctcagagtattgccctgattcctccagcaactacagaaatcagtgcagattcccagctcccctgtatcaaagatgggtcagaaggtgtgaaggatgtggaactggtgctgccagaagattcaatgtttgaagatgccagtgtcagtgaaggtagaggaacccagatagaagaaaatcctttggaagaaaatattctggcgggggaagcagcatctcaagctggtgacagtggtaacgaggcagccaacagaggagatggttcagatgtttcaagtcaaacacctcaaacctcaagtgactggcttgaacaagtacatttagtgtgaactgcacacatctgggctctaaatgaattacaggtacagatggtatgctaggtggagtatgcttgatagagactttgattcacttaattccaactcagtgataaaccactgacattagggttgaatacagagaagttcccttgaatggtagcttcattttttattttaaccttacagggaatttcctttgtacttaattgaatagcttttcccctttttgctgacaaaaagaagagcaagagaaagagaaacaaaaatgaaataaataagttgtattccacactctaagaaaatgcagtcctctatttagcctaggcttgacaatacttaaattgaacatttaaactaaaggcttactccctaatctttgggtggctttcctttaaaaaaaaaaaaaaagttttcttcattctagaaatttattttggataaatccgataacatatatgtcctcaatctctttgtgctcttccataacttacttcctttttgtctgagcaatgtgaattgaagtctctttagtaccacatctaccatagtgtaattagttttaattttcacatgaatcaaaggtttcctttcatgtctatttacagtccaattgtgccaaactcttacttgtgtgctgactaacaaggcatttaggtgtgcagcatcctagagtgctccagggcagtgtcagcgttctcgggagtaaaaggtgccacttggtagcaatgatattccagaattaaatgggtttttgttgccatggagactgcatttatataaatgtagcctgtagcttaagttaactaaacctaatgctgctgttaaaaacagtttattttaatattaaaatacagttgattagcaacagcggtgctgtattttaagagacactttattggaagtgcaatcatagttatttgttttcacaattttacagtgcattctaattactgatgggtgcaattacttttaatcgtgttttataaaatagaaaaaaagtggagttttcatgagttatagtaaatcccacgattattaagaaattcagtaaaacatcctgcgcaacatgttaccgtgcctttgcctaacctaaatggatagttgccagttaaataagtgagtaattcaaatttcaatgtctcttctgaagtaactatgctatgaattgcaaagacctccataaaaccacccatggccttgcttttacactaactataacaactaaatgttcaatcagtttgtttgcctaactagcaaatgctgacatgtgtttgttctactgcgcaatactcatttgctgtgtgattactgtttagtgttgaaaaaaatcaacttcctagttatcagtgtcttactgtgaagaaaatactggtcttagttgtaattaggatacaatggtacagtgtgtaattaaaactagagtaaactgttggaatggctgttttacttaaatattatcaaaactagcataacataagcaaaatagataagtacaacactccatttagtgttttgccagattgttaccagaagtctacagataccaaactttcagttctgagtttgtacaggcaagtcctgggctgggtaaaaagttatattaatattgttatccacaagagatgtgattatgggttttgattactttttttttttccaaaccctgcttttgaaatatccttgtacttaaaattcatattgctaagacactgtattagaatatttaatattccccagatcctcttaggataaactgtgggaatcctcctatgccatggatatcaaaggtccacattagtttttatttctccagtgatcagaaacattgatatcaatccctattaaattagtggggggaatattaactttatctacagtgtattactgtatattaaactgaaatagtccattaaaggatttttttataaatttattttggattaaaaatatcaacaccaataagtttttagaccaagttgtaatttttccaatatagagtctttgcatcacactgaggcatcttgcacagctgcagttaaggtgagaaagaatgctctgtgtgaagacagtgtacacaatgggttccggtttccttgcaccttgtgcagtatcctttatttctgtgctgttctctcctgagcatgaaaaatgatcattatccaatttgtatttccttggtacatattttaaaaacaacacagtcattgactttacaattcagtaatgaagtttggcaaagcctattttgtaaacaagttaattttataatgtaaaaaaaaaaagttaatctaaccttgacttgttatttgcactttcatagtctatacttgatacattcccactttatatacagtaggattctacaaacgtgtagatgtttggccaaatgaatgctgttaataatatgtaaaattctttgattaaacatttattacttaaactac

SEQ ID NO: 6788 - protein, 1089 aa, Homo sapiens; identical to SEQ ID NO: 6786

SEQ ID NO: 6789 - DNA, 6763 bp, Homo sapiens
cgcagcggccggagagggatggggggcgcccacccagtctgagcctcgccgcgggcgccttcggctcacgcagcgcttcccgcgggccgccagtgcgcaccctcggccacatcagcctccgcctggcgggtgcacccgggccggcgaggaaggggcaaccgtccgggtgggtggggcgggctgggtacctgaggtcaccagctcggctgtagaggcaggggcggcggaggcggaactgcggagttgctgggtccaccgacccttaccctcagcgagagaagtaaccaatgtgaaagatgttgcagaagtgttccagaagtggctgaagatagaaggaaaaaagtgccactgcctatcagaaaaaacaaaacaaaacatgggaaatacaaccaccaaattccgtaaagcactcatcaatggtgatgaaaacctggcctgccaaatatatgaaaacaatcctcagctaaaagaatctcttgatccaaatacatcttatggggagccctaccagcacaatactccattacattatgctgctagacatggaatgaataaaatattagggacttttcttggtagagatggaaatccaaataaacggaatgtgcacaatgaaacatctatgcatttgttgtgtatgggacctcaaattatgatatctgaaggagcccttcatcctcgcttggcacgccccacagaagatgatttcagaagagcagattgtctgcagatgatcttaaaatggaaaggagcaaaacttgaccagggtgaatatgagagagcagctattgatgctgttgataacaaaaaaaacacacccttgcactatgctgctgcctcagggatgaaagcctgtgtagagcttttagtaaaacatggaggagacttgtttgctgagaatgaaaataaagatactccttgtgattgtgctgaaaagcaacaccacaaagatttggccctcaatctggaatctcaaatggtattctcacgggatcccgaggctgaagaaatagaagctgaatatgctgcattagacaaacgagagccatatgaaggattaaggcctcaggatcttcgtagactaaaagatatgcttattgtggaaactgcagacatgcttcaggctcctctctttactgctgaagctttacttcgagctcatgactgggacagggagaaattacttgaagcttggatgtccaacccggagaactgctgccaacgatcaggtgttcaaatgccaactccaccaccaagtgggtataatgcctgggacacgctcccatctccaagaactccaaggactacacgctcttctgtcacctccccagatgaaatcagcttatctcctggggatttagacaccagtttgtgtgacatttgtatgtgcagtatctctgtatttgaagaccctgtggatatgccctgtggacatgacttttgtagaggatgttgggagtcgtttttgaatctgaaaattcaagaaggtgaagctcacaacattttttgccctgcatatgattgcttccaacttgtacctgtggatatcatagaaagtgtagtttcaaaggagatggacaaacgatacctacagtttgatattaaggcctttgttgaaaataatcctgccattaaatggtgtcctactccaggctgtgacagagcagtaagactaacgaaacaagggtcaaatacatctggatctgatacactcagcttcccattgctgagagctcctgctgttgattgtggaaaaggacacctcttctgctgggagtgccttggtgaagcacatgagccttgtgactgccaaacatggaagaattggctgcaaaaaataaccgaaatgaaaccagaagaacttgtgggagttagtgaagcctacgaggatgccgccaattgtctctggttattaactaactccaagccttgtgccaactgtaagtctccaatacagaagaatgaaggctgcaatcacatgcagtgtgctaagtgcaagtatgacttttgctggatttgccttgaagagtggaaaaaacatagttcgtccactggaggttattacagatgtactcgctatgaagtcattcaacacgtggaggagcaatccaaggaaatgactgtggaggctgagaaaaaacacaaacgatttcaggaacttgacagatttatgcactattatacaagatttaaaaaccatgagcatagttatcagctagaacaacgccttcttaaaacagccaaagaaaagatggagcaattgagcagagctctcaaagaaactgaaggaggctgtccagataccactttcattgaagatgcagttcatgtgctcttaaaaactcggcgcattctcaagtgttcttatccatatggatttttcttggaacctaaaagcacaaagaaagaaatttttgaactaatgcaaacagacctagaaatggtcactgaagaccttgcccagaaagtcaataggccttaccttcgcacaccccgccacaagatcatcaaagcagcatgccttgtacagcagaagaggcaagaattcctggcatctgtggctcggggagtagctcctgcagactcaccagaagctccaaggcgcagctttgctggtggaacatgggattgggaatatttaggatttgcatcaccagaggaatatgctgaatttcagtatcggaggaggcacagacaacgtcgtcgaggagatgttcacagtctactcagtaatcctccagaccctgatgagccaagtgaaagcactttagatattccagaaggcggcagcagcagccgcaggcctggcacatccgtggtaagttctgcatctatgagtgtgctgcacagctcttccctgcgtgactacacccctgccagtcgctctgaaaaccaggactctcttcaggctctgagttccttggatgaagacgatcccaatatacttcttgcaatacagttatcactgcaagagtctgggctggccctcgatgaagaaactagagacttcctcagtaatgaagcatccttaggtgcgataggcacttctttaccttccaggctggactctgtccccagaaatacagatagccctcgggctgcattgagcagctctgagcttttggaacttggtgacagcctcatgagactaggagcagagaatgacccattttcaactgacaccctgagctcacaccctctcagtgaggcaagaagtgatttctgtccctcatctagtgatcctgactcagctggccaggaccccaacatcaatgacaatcttctcggcaacatcatggcttggtttcatgacatgaaccctcagagtattgccctgattcctccagcaactacagaaatcagtgcagattcccagctcccctgtatcaaagatgggtcagaaggtgtgaaggatgtggaactggtgctgccagaagattcaatgtttgaagatgccagtgtcagtgaaggtagaggaacccagatagaagaaaatcctttggaagaaaatattctggcgggggaagcagcatctcaagctggtgacagtggtaacgaggcagccaacagaggagatggttcagatgtttcaagtcaaacacctcaaacctcaagtgactggcttgaacaagtacatttagtgtgaactgcacacatctgggctctaaatgaattacaggtacagatggtatgctaggtggagtatgcttgatagagactttgattcacttaattccaactcagtgataaaccactgacattagggttgaatacagagaagttcccttgaatggtagcttcattttttattttaaccttacagggaatttcctttgtacttaattgaatagcttttcccctttttgctgacaaaaagaagagcaagagaaagagaaacaaaaatgaaataaataagttgtattccacactctaagaaaatgcagtcctctatttagcctaggcttgacaatacttaaattgaacatttaaactaaaggcttactccctaatctttgggtggctttcctttaaaaaaaaaaaaaaagttttcttcattctagaaatttattttggataaatccgataacatatatgtcctcaatctctttgtgctcttccataacttacttcctttttgtctgagcaatgtgaattgaagtctctttagtaccacatctaccatagtgtaattagttttaattttcacatgaatcaaaggtttcctttcatgtctatttacagtccaattgtgccaaactcttacttgtgtgctgactaacaaggcatttaggtgtgcagcatcctagagtgctccagggcagtgtcagcgttctcgggagtaaaaggtgccacttggtagcaatgatattccagaattaaatgggtttttgttgccatggagactgcatttatataaatgtagcctgtagcttaagttaactaaacctaatgctgctgttaaaaacagtttattttaatattaaaatacagttgattagcaacagcggtgctgtattttaagagacactttattggaagtgcaatcatagttatttgttttcacaattttacagtgcattctaattactgatgggtgcaattacttttaatcgtgttttataaaatagaaaaaaagtggagttttcatgagttatagtaaatcccacgattattaagaaattcagtaaaacatcctgcgcaacatgttaccgtgcctttgcctaacctaaatggatagttgccagttaaataagtgagtaattcaaatttcaatgtctcttctgaagtaactatgctatgaattgcaaagacctccataaaaccacccatggccttgcttttacactaactataacaactaaatgttcaatcagtttgtttgcctaactagcaaatgctgacatgtgtttgttctactgcgcaatactcatttgctgtgtgattactgtttagtgttgaaaaaaatcaacttcctagttatcagtgtcttactgtgaagaaaatactggtcttagttgtaattaggatacaatggtacagtgtgtaattaaaactagagtaaactgttggaatggctgttttacttaaatattatcaaaactagcataacataagcaaaatagataagtacaacactccatttagtgttttgccagattgttaccagaagtctacagataccaaactttcagttctgagtttgtacaggcaagtcctgggctgggtaaaaagttatattaatattgttatccacaagagatgtgattatgggttttgattactttttttttttccaaaccctgcttttgaaatatccttgtacttaaaattcatattgctaagacactgtattagaatatttaatattccccagatcctcttaggataaactgtgggaatcctcctatgccatggatatcaaaggtccacattagtttttatttctccagtgatcagaaacattgatatcaatccctattaaattagtggggggaatattaactttatctacagtgtattactgtatattaaactgaaatagtccattaaaggatttttttataaatttattttggattaaaaatatcaacaccaataagtttttagaccaagttgtaatttttccaatatagagtctttgcatcacactgaggcatcttgcacagctgcagttaaggtgagaaagaatgctctgtgtgaagacagtgtacacaatgggttccggtttccttgcaccttgtgcagtatcctttatttctgtgctgttctctcctgagcatgaaaaatgatcattatccaatttgtatttccttggtacatattttaaaaacaacacagtcattgactttacaattcagtaatgaagtttggcaaagcctattttgtaaacaagttaattttataatgtaaaaaaaaaaagttaatctaaccttgacttgttatttgcactttcatagtctatacttgatacattcccactttatatacagtaggattctacaaacgtgtagatgtttggccaaatgaatgctgttaataatatgtaaaattctttgattaaacatttattacttaaactacttccattttgtctcattacattgtagactttgttttaaccaagtcagaaagctgattttcttcaaattaaatccctccaatgtgatgggatcaatttggttcttacatgtaattgattagtgcctaatatttttacactagccacttactgagcattttatatcccagttataaatatgaaaacactgcatgacaatgtgttaaaacattatgacatcagtgctcattttattgacatcactgtagctttcaggagaaaaatgttattttttcttgaactctaatagaaatacatagaaaaataactttaagatatgttttgtgaaattgcttaggaaagaaaaaaattttatgccatgtgaataaaaatgcctgcttctctttcactttattattgtgtcccttatgagttaccaaaataacccatgacatttgaccatgccccagctggtgcttcatggggtctgctggtgataatcatttaaagtggcgtcatcttatttatgcctttcattatgtggatctgaagcttaactaccaatgttcataggctgaattattccttaattgttgttcattacagccactgatctcattttttatctcctttgagtcctcaaatatttatcatttacgtgttatgaattaaaatctggaatttattaaagtttgatcataattt

SEQ ID NO: 6790 - protein, 1089 aa, Homo sapiens; identical to SEQ ID NO: 6786

SEQ ID NO: 6791 - DNA, 4876 bp, Homo sapiens
gcgcttcccgcgggccgccagtgcgcaccctcggccacatcagcctccgcctggcgggtgcacccgggccggcgaggaaggggcaaccgtccggaatgtgaaagatgttgcagaagtgttccagaagtggctgaagatagaaggaaaaaagtgccactgcctatcagaaaaaacaaaacaaaacatgggaaatacaaccaccaaattccgtaaagcactcatcaatggtgatgaaaacctggcctgccaaatatatgaaaacaatcctcagctaaaagaatctcttgatccaaatacatcttatggggagccctaccagcacaatactccattacattatgctgctagacatggaatgaataaaatattagggacttttcttggtagagatggaaatccaaataaacggaatgtgcacaatgaaacatctatgcatttgttgtgtatgggacctcaaattatgatatctgaaggagcccttcatcctcgcttggcacgccccacagaagatgatttcagaagagcagattgtctgcagatgatcttaaaatggaaaggagcaaaacttgaccagggtgaatatgagagagcagctattgatgctgttgataacaaaaaaaacacacccttgcactatgctgctgcctcagggatgaaagcctgtgtagagcttttagtaaaacatggaggagacttgtttgctgagaatgaaaataaagatactccttgtgattgtgctgaaaagcaacaccacaaagatttggccctcaatctggaatctcaaatggtattctcacgggatcccgaggctgaagaaatagaagctgaatatgctgcattagacaaacgagagccatatgaaggattaaggcctcaggatcttcgtagactaaaagatatgcttattgtggaaactgcagacatgcttcaggctcctctctttactgctgaagctttacttcgagctcatgactgggacagggagaaattacttgaagcttggatgtccaacccggagaactgctgccaacgatcaggtgttcaaatgccaactccaccaccaagtgggtataatgcctgggacacgctcccatctccaagaactccaaggactacacgctcttctgtcacctccccagatgaaatcagcttatctcctggggatttagacaccagtttgtgtgacatttgtatgtgcagtatctctgtatttgaagaccctgtggatatgccctgtggacatgacttttgtagaggatgttgggagtcgtttttgaatctgaaaattcaagaaggtgaagctcacaacattttttgccctgcatatgattgcttccaacttgtacctgtggatatcatagaaagtgtagtttcaaaggagatggacaaacgatacctacagtttgatattaaggcctttgttgaaaataatcctgccattaaatggtgtcctactccaggctgtgacagagcagtaagactaacgaaacaagggtcaaatacatctggatctgatacactcagcttcccattgctgagagctcctgctgttgattgtggaaaaggacacctcttctgctgggagtgccttggtgaagcacatgagccttgtgactgccaaacatggaagaattggctgcaaaaaataaccgaaatgaaaccagaagaacttgtgggagttagtgaagcctacgaggatgccgccaattgtctctggttattaactaactccaagccttgtgccaactgtaagtctccaatacagaagaatgaaggctgcaatcacatgcagtgtgctaagtgcaagtatgacttttgctggatttgccttgaagagtggaaaaaacatagttcgtccactggaggttattacagatgtactcgctatgaagtcattcaacacgtggaggagcaatccaaggaaatgactgtggaggctgagaaaaaacacaaacgatttcaggaacttgacagatttatgcactattatacaagatttaaaaaccatgagcatagttatcagctagaacaacgccttcttaaaacagccaaagaaaagatggagcaattgagcagagctctcaaagaaactgaaggaggctgtccagataccactttcattgaagatgcagttcatgtgctcttaaaaactcggcgcattctcaagtgttcttatccatatggatttttcttggaacctaaaagcacaaagaaagaaatttttgaactaatgcaaacagacctagaaatggtcactgaagaccttgcccagaaagtcaataggccttaccttcgcacaccccgccacaagatcatcaaagcagcatgccttgtacagcagaagaggcaagaattcctggcatctgtggctcggggagtagctcctgcagactcaccagaagctccaaggcgcagctttgctggtggaacatgggattgggaatatttaggatttgcatcaccagaggaatatgctgaatttcagtatcggaggaggcacagacaacgtcgtcgaggagatgttcacagtctactcagtaatcctccagaccctgatgagccaagtgaaagcactttagatattccagaaggcggcagcagcagccgcaggcctggcacatccgtggtaagttctgcatctatgagtgtgctgcacagctcttccctgcgtgactacacccctgccagtcgctctgaaaaccaggactctcttcaggctctgagttccttggatgaagacgatcccaatatacttcttgcaatacagttatcactgcaagagtctgggctggccctcgatgaagaaactagagacttcctcagtaatgaagcatccttaggtgcgataggcacttctttaccttccaggctggactctgtccccagaaatacagatagccctcgggctgcattgagcagctctgagcttttggaacttggtgacagcctcatgagactaggagcagagaatgacccattttcaactgacaccctgagctcacaccctctcagtgaggcaagaagtgatttctgtccctcatctagtgatcctgactcagctggccaggaccccaacatcaatgacaatcttctcggcaacatcatggcttggtttcatgacatgaaccctcagagtattgccctgattcctccagcaactacagaaatcagtgcagattcccagctcccctgtatcaaagatgggtcagaaggtgtgaaggatgtggaactggtgctgccagaagattcaatgtttgaagatgccagtgtcagtgaaggtagaggaacccagatagaagaaaatcctttggaagaaaatattctggcgggggaagcagcatctcaagctggtgacagtggtaacgaggcagccaacagaggagatggttcagatgtttcaagtcaaacacctcaaacctcaagtgactggcttgaacaagtacatttagtgtgaactgcacacatctgggctctaaatgaattacaggtacagatggtatgctaggtggagtatgcttgatagagactttgattcacttaattccaactcagtgataaaccactgacattagggttgaatacagagaagttcccttgaatggtagcttcattttttattttaaccttacagggaatttcctttgtacttaattgaatagcttttcccctttttgctgacaaaaagaagagcaagagaaagagaaacaaaaatgaaataaataagttgtattccacactctaagaaaatgcagtcctctatttagcctaggcttgacaatacttaaattgaacatttaaactaaaggcttactccctaatctttgggtggctttcctttaaaaaaaaaaaaaaagttttcttcattctagaaatttattttggataaatccgataacatatatgtcctcaatctctttgtgctcttccataacttacttcctttttgtctgagcaatgtgaattgaagtctctttagtaccacatctaccatagtgtaattagttttaattttcacatgaatcaaaggtttcctttcatgtctatttacagtccaattgtgccaaactcttacttgtgtgctgactaacaaggcatttaggtgtgcagcatcctagagtgctccagggcagtgtcagcgttctcgggagtaaaaggtgccacttggtagcaatgatattccagaattaaatgggtttttgttgccatggagactgcatttatataaatgtagcctgtagcttaagttaactaaacctaatgctgctgttaaaaacagtttattttaatattaaaatacagttgattagcaacagcggtgctgtattttaagagacactttattggaagtgcaatcatagttatttgttttcacaattttacagtgcattctaattactgatgggtgcaattacttttaatcgtgttttataaaatagaaaaaaagtggagttttcatgagttatagtaaatcccacgattattaagaaattcagtaaaacatcctgcgcaacatgttaccgtgcctttgcctaacctaaatggatagttgccagttaaataagtgagtaattcaaatttcaatgtctcttctgaagtaactatgctatgaattgcaaagacctccataaaaccacccatggccttgcttttacactaactataacaactaaatgttcaatcagtttgtttgcctaactagcaaatgctgacatgtgtttgttctactgcgcaatactcatttgctgtgtgattactgtttagtgttgaaaaaaatcaacttcctagttatcagtgtcttactgtgaagaaaatactggtcttagttgtaattaggatacaatggtacagtgtgtaattaaaactagagtaaactgtt

SEQ ID NO: 6792 - protein, 1089 aa, Homo sapiens; identical to SEQ ID NO: 6786

SEQ ID NO: 6793 - DNA, 5889 bp, Homo sapiens
gcgcttcccgcgggccgccagtgcgcaccctcggccacatcagcctccgcctggcgggtgcacccgggccggcgaggaaggggcaaccgtccggaatgtgaaagatgttgcagaagtgttccagaagtggctgaagatagaaggaaaaaagtgccactgcctatcagaaaaaacaaaacaaaacatgggaaatacaaccaccaaattccgtaaagcactcatcaatggtgatgaaaacctggcctgccaaatatatgaaaacaatcctcagctaaaagaatctcttgatccaaatacatcttatggggagccctaccagcacaatactccattacattatgctgctagacatggaatgaataaaatattagggacttttcttggtagagatggaaatccaaataaacggaatgtgcacaatgaaacatctatgcatttgttgtgtatgggacctcaaattatgatatctgaaggagcccttcatcctcgcttggcacgccccacagaagatgatttcagaagagcagattgtctgcagatgatcttaaaatggaaaggagcaaaacttgaccagggtgaatatgagagagcagctattgatgctgttgataacaaaaaaaacacacccttgcactatgctgctgcctcagggatgaaagcctgtgtagagcttttagtaaaacatggaggagacttgtttgctgagaatgaaaataaagatactccttgtgattgtgctgaaaagcaacaccacaaagatttggccctcaatctggaatctcaaatggtattctcacgggatcccgaggctgaagaaatagaagctgaatatgctgcattagacaaacgagagccatatgaaggattaaggcctcaggatcttcgtagactaaaagatatgcttattgtggaaactgcagacatgcttcaggctcctctctttactgctgaagctttacttcgagctcatgactgggacagggagaaattacttgaagcttggatgtccaacccggagaactgctgccaacgatcaggtgttcaaatgccaactccaccaccaagtgggtataatgcctgggacacgctcccatctccaagaactccaaggactacacgctcttctgtcacctccccagatgaaatcagcttatctcctggggatttagacaccagtttgtgtgacatttgtatgtgcagtatctctgtatttgaagaccctgtggatatgccctgtggacatgacttttgtagaggatgttgggagtcgtttttgaatctgaaaattcaagaaggtgaagctcacaacattttttgccctgcatatgattgcttccaacttgtacctgtggatatcatagaaagtgtagtttcaaaggagatggacaaacgatacctacagtttgatattaaggcctttgttgaaaataatcctgccattaaatggtgtcctactccaggctgtgacagagcagtaagactaacgaaacaagggtcaaatacatctggatctgatacactcagcttcccattgctgagagctcctgctgttgattgtggaaaaggacacctcttctgctgggagtgccttggtgaagcacatgagccttgtgactgccaaacatggaagaattggctgcaaaaaataaccgaaatgaaaccagaagaacttgtgggagttagtgaagcctacgaggatgccgccaattgtctctggttattaactaactccaagccttgtgccaactgtaagtctccaatacagaagaatgaaggctgcaatcacatgcagtgtgctaagtgcaagtatgacttttgctggatttgccttgaagagtggaaaaaacatagttcgtccactggaggttattacagatgtactcgctatgaagtcattcaacacgtggaggagcaatccaaggaaatgactgtggaggctgagaaaaaacacaaacgatttcaggaacttgacagatttatgcactattatacaagatttaaaaaccatgagcatagttatcagctagaacaacgccttcttaaaacagccaaagaaaagatggagcaattgagcagagctctcaaagaaactgaaggaggctgtccagataccactttcattgaagatgcagttcatgtgctcttaaaaactcggcgcattctcaagtgttcttatccatatggatttttcttggaacctaaaagcacaaagaaagaaatttttgaactaatgcaaacagacctagaaatggtcactgaagaccttgcccagaaagtcaataggccttaccttcgcacaccccgccacaagatcatcaaagcagcatgccttgtacagcagaagaggcaagaattcctggcatctgtggctcggggagtagctcctgcagactcaccagaagctccaaggcgcagctttgctggtggaacatgggattgggaatatttaggatttgcatcaccagaggaatatgctgaatttcagtatcggaggaggcacagacaacgtcgtcgaggagatgttcacagtctactcagtaatcctccagaccctgatgagccaagtgaaagcactttagatattccagaaggcggcagcagcagccgcaggcctggcacatccgtggtaagttctgcatctatgagtgtgctgcacagctcttccctgcgtgactacacccctgccagtcgctctgaaaaccaggactctcttcaggctctgagttccttggatgaagacgatcccaatatacttcttgcaatacagttatcactgcaagagtctgggctggccctcgatgaagaaactagagacttcctcagtaatgaagcatccttaggtgcgataggcacttctttaccttccaggctggactctgtccccagaaatacagatagccctcgggctgcattgagcagctctgagcttttggaacttggtgacagcctcatgagactaggagcagagaatgacccattttcaactgacaccctgagctcacaccctctcagtgaggcaagaagtgatttctgtccctcatctagtgatcctgactcagctggccaggaccccaacatcaatgacaatcttctcggcaacatcatggcttggtttcatgacatgaaccctcagagtattgccctgattcctccagcaactacagaaatcagtgcagattcccagctcccctgtatcaaagatgggtcagaaggtgtgaaggatgtggaactggtgctgccagaagattcaatgtttgaagatgccagtgtcagtgaaggtagaggaacccagatagaagaaaatcctttggaagaaaatattctggcgggggaagcagcatctcaagctggtgacagtggtaacgaggcagccaacagaggagatggttcagatgtttcaagtcaaacacctcaaacctcaagtgactggcttgaacaagtacatttagtgtgaactgcacacatctgggctctaaatgaattacaggtacagatggtatgctaggtggagtatgcttgatagagactttgattcacttaattccaactcagtgataaaccactgacattagggttgaatacagagaagttcccttgaatggtagcttcattttttattttaaccttacagggaatttcctttgtacttaattgaatagcttttcccctttttgctgacaaaaagaagagcaagagaaagagaaacaaaaatgaaataaataagttgtattccacactctaagaaaatgcagtcctctatttagcctaggcttgacaatacttaaattgaacatttaaactaaaggcttactccctaatctttgggtggctttcctttaaaaaaaaaaaaaaagttttcttcattctagaaatttattttggataaatccgataacatatatgtcctcaatctctttgtgctcttccataacttacttcctttttgtctgagcaatgtgaattgaagtctctttagtaccacatctaccatagtgtaattagttttaattttcacatgaatcaaaggtttcctttcatgtctatttacagtccaattgtgccaaactcttacttgtgtgctgactaacaaggcatttaggtgtgcagcatcctagagtgctccagggcagtgtcagcgttctcgggagtaaaaggtgccacttggtagcaatgatattccagaattaaatgggtttttgttgccatggagactgcatttatataaatgtagcctgtagcttaagttaactaaacctaatgctgctgttaaaaacagtttattttaatattaaaatacagttgattagcaacagcggtgctgtattttaagagacactttattggaagtgcaatcatagttatttgttttcacaattttacagtgcattctaattactgatgggtgcaattacttttaatcgtgttttataaaatagaaaaaaagtggagttttcatgagttatagtaaatcccacgattattaagaaattcagtaaaacatcctgcgcaacatgttaccgtgcctttgcctaacctaaatggatagttgccagttaaataagtgagtaattcaaatttcaatgtctcttctgaagtaactatgctatgaattgcaaagacctccataaaaccacccatggccttgcttttacactaactataacaactaaatgttcaatcagtttgtttgcctaactagcaaatgctgacatgtgtttgttctactgcgcaatactcatttgctgtgtgattactgtttagtgttgaaaaaaatcaacttcctagttatcagtgtcttactgtgaagaaaatactggtcttagttgtaattaggatacaatggtacagtgtgtaattaaaactagagtaaactgttggaatggctgttttacttaaatattatcaaaactagcataacataagcaaaatagataagtacaacactccatttagtgttttgccagattgttaccagaagtctacagataccaaactttcagttctgagtttgtacaggcaagtcctgggctgggtaaaaagttatattaatattgttatccacaagagatgtgattatgggttttgattactttttttttttccaaaccctgcttttgaaatatccttgtacttaaaattcatattgctaagacactgtattagaatatttaatattccccagatcctcttaggataaactgtgggaatcctcctatgccatggatatcaaaggtccacattagtttttatttctccagtgatcagaaacattgatatcaatccctattaaattagtggggggaatattaactttatctacagtgtattactgtatattaaactgaaatagtccattaaaggatttttttataaatttattttggattaaaaatatcaacaccaataagtttttagaccaagttgtaatttttccaatatagagtctttgcatcacactgaggcatcttgcacagctgcagttaaggtgagaaagaatgctctgtgtgaagacagtgtacacaatgggttccggtttccttgcaccttgtgcagtatcctttatttctgtgctgttctctcctgagcatgaaaaatgatcattatccaatttgtatttccttggtacatattttaaaaacaacacagtcattgactttacaattcagtaatgaagtttggcaaagcctattttgtaaacaagttaattttataatgtaaaaaaaaaaagttaatctaaccttgacttgttatttgcactttcatagtctatacttgatacattcccactttatatacagtaggattctacaaacgtgtagatgtttggccaaatgaatgctgttaataatatgtaaaattctttgattaaacatttattacttaaactac

SEQ ID NO: 6794 - protein, 1089 aa, Homo sapiens; identical to SEQ ID NO: 6786

SEQ ID NO: 6795 - DNA, 6571 bp, Homo sapiens
gcgcttcccgcgggccgccagtgcgcaccctcggccacatcagcctccgcctggcgggtgcacccgggccggcgaggaaggggcaaccgtccggaatgtgaaagatgttgcagaagtgttccagaagtggctgaagatagaaggaaaaaagtgccactgcctatcagaaaaaacaaaacaaaacatgggaaatacaaccaccaaattccgtaaagcactcatcaatggtgatgaaaacctggcctgccaaatatatgaaaacaatcctcagctaaaagaatctcttgatccaaatacatcttatggggagccctaccagcacaatactccattacattatgctgctagacatggaatgaataaaatattagggacttttcttggtagagatggaaatccaaataaacggaatgtgcacaatgaaacatctatgcatttgttgtgtatgggacctcaaattatgatatctgaaggagcccttcatcctcgcttggcacgccccacagaagatgatttcagaagagcagattgtctgcagatgatcttaaaatggaaaggagcaaaacttgaccagggtgaatatgagagagcagctattgatgctgttgataacaaaaaaaacacacccttgcactatgctgctgcctcagggatgaaagcctgtgtagagcttttagtaaaacatggaggagacttgtttgctgagaatgaaaataaagatactccttgtgattgtgctgaaaagcaacaccacaaagatttggccctcaatctggaatctcaaatggtattctcacgggatcccgaggctgaagaaatagaagctgaatatgctgcattagacaaacgagagccatatgaaggattaaggcctcaggatcttcgtagactaaaagatatgcttattgtggaaactgcagacatgcttcaggctcctctctttactgctgaagctttacttcgagctcatgactgggacagggagaaattacttgaagcttggatgtccaacccggagaactgctgccaacgatcaggtgttcaaatgccaactccaccaccaagtgggtataatgcctgggacacgctcccatctccaagaactccaaggactacacgctcttctgtcacctccccagatgaaatcagcttatctcctggggatttagacaccagtttgtgtgacatttgtatgtgcagtatctctgtatttgaagaccctgtggatatgccctgtggacatgacttttgtagaggatgttgggagtcgtttttgaatctgaaaattcaagaaggtgaagctcacaacattttttgccctgcatatgattgcttccaacttgtacctgtggatatcatagaaagtgtagtttcaaaggagatggacaaacgatacctacagtttgatattaaggcctttgttgaaaataatcctgccattaaatggtgtcctactccaggctgtgacagagcagtaagactaacgaaacaagggtcaaatacatctggatctgatacactcagcttcccattgctgagagctcctgctgttgattgtggaaaaggacacctcttctgctgggagtgccttggtgaagcacatgagccttgtgactgccaaacatggaagaattggctgcaaaaaataaccgaaatgaaaccagaagaacttgtgggagttagtgaagcctacgaggatgccgccaattgtctctggttattaactaactccaagccttgtgccaactgtaagtctccaatacagaagaatgaaggctgcaatcacatgcagtgtgctaagtgcaagtatgacttttgctggatttgccttgaagagtggaaaaaacatagttcgtccactggaggttattacagatgtactcgctatgaagtcattcaacacgtggaggagcaatccaaggaaatgactgtggaggctgagaaaaaacacaaacgatttcaggaacttgacagatttatgcactattatacaagatttaaaaaccatgagcatagttatcagctagaacaacgccttcttaaaacagccaaagaaaagatggagcaattgagcagagctctcaaagaaactgaaggaggctgtccagataccactttcattgaagatgcagttcatgtgctcttaaaaactcggcgcattctcaagtgttcttatccatatggatttttcttggaacctaaaagcacaaagaaagaaatttttgaactaatgcaaacagacctagaaatggtcactgaagaccttgcccagaaagtcaataggccttaccttcgcacaccccgccacaagatcatcaaagcagcatgccttgtacagcagaagaggcaagaattcctggcatctgtggctcggggagtagctcctgcagactcaccagaagctccaaggcgcagctttgctggtggaacatgggattgggaatatttaggatttgcatcaccagaggaatatgctgaatttcagtatcggaggaggcacagacaacgtcgtcgaggagatgttcacagtctactcagtaatcctccagaccctgatgagccaagtgaaagcactttagatattccagaaggcggcagcagcagccgcaggcctggcacatccgtggtaagttctgcatctatgagtgtgctgcacagctcttccctgcgtgactacacccctgccagtcgctctgaaaaccaggactctcttcaggctctgagttccttggatgaagacgatcccaatatacttcttgcaatacagttatcactgcaagagtctgggctggccctcgatgaagaaactagagacttcctcagtaatgaagcatccttaggtgcgataggcacttctttaccttccaggctggactctgtccccagaaatacagatagccctcgggctgcattgagcagctctgagcttttggaacttggtgacagcctcatgagactaggagcagagaatgacccattttcaactgacaccctgagctcacaccctctcagtgaggcaagaagtgatttctgtccctcatctagtgatcctgactcagctggccaggaccccaacatcaatgacaatcttctcggcaacatcatggcttggtttcatgacatgaaccctcagagtattgccctgattcctccagcaactacagaaatcagtgcagattcccagctcccctgtatcaaagatgggtcagaaggtgtgaaggatgtggaactggtgctgccagaagattcaatgtttgaagatgccagtgtcagtgaaggtagaggaacccagatagaagaaaatcctttggaagaaaatattctggcgggggaagcagcatctcaagctggtgacagtggtaacgaggcagccaacagaggagatggttcagatgtttcaagtcaaacacctcaaacctcaagtgactggcttgaacaagtacatttagtgtgaactgcacacatctgggctctaaatgaattacaggtacagatggtatgctaggtggagtatgcttgatagagactttgattcacttaattccaactcagtgataaaccactgacattagggttgaatacagagaagttcccttgaatggtagcttcattttttattttaaccttacagggaatttcctttgtacttaattgaatagcttttcccctttttgctgacaaaaagaagagcaagagaaagagaaacaaaaatgaaataaataagttgtattccacactctaagaaaatgcagtcctctatttagcctaggcttgacaatacttaaattgaacatttaaactaaaggcttactccctaatctttgggtggctttcctttaaaaaaaaaaaaaaagttttcttcattctagaaatttattttggataaatccgataacatatatgtcctcaatctctttgtgctcttccataacttacttcctttttgtctgagcaatgtgaattgaagtctctttagtaccacatctaccatagtgtaattagttttaattttcacatgaatcaaaggtttcctttcatgtctatttacagtccaattgtgccaaactcttacttgtgtgctgactaacaaggcatttaggtgtgcagcatcctagagtgctccagggcagtgtcagcgttctcgggagtaaaaggtgccacttggtagcaatgatattccagaattaaatgggtttttgttgccatggagactgcatttatataaatgtagcctgtagcttaagttaactaaacctaatgctgctgttaaaaacagtttattttaatattaaaatacagttgattagcaacagcggtgctgtattttaagagacactttattggaagtgcaatcatagttatttgttttcacaattttacagtgcattctaattactgatgggtgcaattacttttaatcgtgttttataaaatagaaaaaaagtggagttttcatgagttatagtaaatcccacgattattaagaaattcagtaaaacatcctgcgcaacatgttaccgtgcctttgcctaacctaaatggatagttgccagttaaataagtgagtaattcaaatttcaatgtctcttctgaagtaactatgctatgaattgcaaagacctccataaaaccacccatggccttgcttttacactaactataacaactaaatgttcaatcagtttgtttgcctaactagcaaatgctgacatgtgtttgttctactgcgcaatactcatttgctgtgtgattactgtttagtgttgaaaaaaatcaacttcctagttatcagtgtcttactgtgaagaaaatactggtcttagttgtaattaggatacaatggtacagtgtgtaattaaaactagagtaaactgttggaatggctgttttacttaaatattatcaaaactagcataacataagcaaaatagataagtacaacactccatttagtgttttgccagattgttaccagaagtctacagataccaaactttcagttctgagtttgtacaggcaagtcctgggctgggtaaaaagttatattaatattgttatccacaagagatgtgattatgggttttgattactttttttttttccaaaccctgcttttgaaatatccttgtacttaaaattcatattgctaagacactgtattagaatatttaatattccccagatcctcttaggataaactgtgggaatcctcctatgccatggatatcaaaggtccacattagtttttatttctccagtgatcagaaacattgatatcaatccctattaaattagtggggggaatattaactttatctacagtgtattactgtatattaaactgaaatagtccattaaaggatttttttataaatttattttggattaaaaatatcaacaccaataagtttttagaccaagttgtaatttttccaatatagagtctttgcatcacactgaggcatcttgcacagctgcagttaaggtgagaaagaatgctctgtgtgaagacagtgtacacaatgggttccggtttccttgcaccttgtgcagtatcctttatttctgtgctgttctctcctgagcatgaaaaatgatcattatccaatttgtatttccttggtacatattttaaaaacaacacagtcattgactttacaattcagtaatgaagtttggcaaagcctattttgtaaacaagttaattttataatgtaaaaaaaaaaagttaatctaaccttgacttgttatttgcactttcatagtctatacttgatacattcccactttatatacagtaggattctacaaacgtgtagatgtttggccaaatgaatgctgttaataatatgtaaaattctttgattaaacatttattacttaaactacttccattttgtctcattacattgtagactttgttttaaccaagtcagaaagctgattttcttcaaattaaatccctccaatgtgatgggatcaatttggttcttacatgtaattgattagtgcctaatatttttacactagccacttactgagcattttatatcccagttataaatatgaaaacactgcatgacaatgtgttaaaacattatgacatcagtgctcattttattgacatcactgtagctttcaggagaaaaatgttattttttcttgaactctaatagaaatacatagaaaaataactttaagatatgttttgtgaaattgcttaggaaagaaaaaaattttatgccatgtgaataaaaatgcctgcttctctttcactttattattgtgtcccttatgagttaccaaaataacccatgacatttgaccatgccccagctggtgcttcatggggtctgctggtgataatcatttaaagtggcgtcatcttatttatgcctttcattatgtggatctgaagcttaactaccaatgttcataggctgaattattccttaattgttgttcattacagccactgatctcattttttatctcctttgagtcctcaaatatttatcatttacgtgttatgaattaaaatctggaatttattaaagtttgatcataattt

SEQ ID NO: 6796 - protein, 1089 aa, Homo sapiens; identical to SEQ ID NO: 6786

SEQ ID NO: 6797 - DNA, 821 bp, Homo sapiens
cgcaagataatggattgtcaaaaaggaggcaatatggcaaacggaagttgtttggacctgaagtcagaagaatcaagttcagctcactttgattctgatgggatctaccaaagcatgtttgttgatatgatcaatccaaaagagaaggtgagactgatgaacaggaggactggagtcttgtagtaggaggagtaaatgggattcatatctcacatcagcaccttatttatttgacactgctgatactgttaatttaactactaaagtctggatgtcctggcatggcagacaaaagtttcattcattatccagtgaaacactgaaatgaaattaggatgagcaagtcactgagttctttggaacgggaatcctcacggttctcctacagtcctaagaatgcttacaaaacaacgggcttatatcaatgccagatctggaagccatgggctaacttgacaagcccactggatttgactttagcttcttgctctagccagaggttaccaacacctaaacacaaaatagactatctgctcctgactgctgcagaactaaagagctgactttattcttgagttctttattcagagtcccagaaaattatttctaaaatgcatgctgggataactttcaaaatcaggatttggtttactttgcaacagatattaccacacaaaaaatattaaattttagaaaacaagacaaatcatctttaacttaatgccctagtcttccttaacaaaagcaaagacaacaaaatttaagaagctgtaccctaacagaatcttggtaaggggaaccttattaaaaggatatgccag

SEQ ID NO: 6798 - protein, 75 aa, Homo sapiens [sequence omitted]

SEQ ID NO: 6799 - DNA, 1098 bp, Homo sapiens
atggccttaaatttcacaataagggaaaaagaggaatgccgaattccccaggggattgtcagtgcctgcatgcagtctaatttgcatgatttaaatgttacaaggaaattggacttggaggtcagcgaaccaatagactttggttctggaggtcatcaacatctgattcaggaagcagcagataaaagcatccagtcccaatctggtgagcgctacacaccttcatcttcagctgggccacaagaaactcggaagaagccacggccaaaggacaccgagcagttgaatacctgtgtgatagaaatttcagatgacgtcaccccaggtgataacaatgcaactttaggcaatcctttctcagacgcatctgtccgcagaggtgcaaacacatttcgttatggagagtggattccacgtctagttcacaaagtccctctgctcctggccatccttggccagcgggagttcaaagccttctctcgcaggcctcgtactaggatgggccttcatttttacccctggagactggaggagtctttcctggctctgcccgtggaccagtggcctgactgcctgctggctctcagcccctgcccctatcccacctttccccgcacccctggctctatttgggtgatgacagtcctcctaagcccaggactgcacctgcagacgcagctccacactctgctctgccagtatctgccctccagccccatctccggcactgggaagaccttgtttctcatcccatgtctgaggttggaaggctgtccctcaggtgccttggaaagcatctgtacccagaatgttatgaagcttagataccgcatatcctgtcctgatgaaacattgatacatttctacaaggccgaggaagtgtcatgggcaacagctgcaaccactctggtgatgctagcactcactttgtttgctctacaaacaaaatacttggtgatcgatgtgcagctcatgctgggagggcaccgccattattccctggaccctgaagggtatgtttttgctatcctgaacatctacttggacatcatcgaccttttcatttttattctgcgtctgattggacggggacggtag

SEQ ID NO: 6800 - protein, 365 aa, Homo sapiens [sequence omitted]

SEQ ID NO: 6801 - DNA, 938 bp, Homo sapiens
agacaatactgtgtatctttatgttgtgaatcatccccacatgaagtccactgtggagatatttaaatttgaggaacaacaacgttctctggtatacctgaaaactataaaacatgaacttctcaaaagtgtgaatgacattgtggttcttggaccagaacagttctatgccaccagagaccactattttaccaactccctcctgtcattttttgagatgatcttggatcttcgctggacttatgttcttttctacagcccaagggaggttaaagtggtggccaaaggattttgtagtgccaatgggatcacagtctcagcagaccagaagtatgtctatgtagctgatgtagcagctaagaacattcacataatggaaaaacatgataactgggatttaactcaactgaaggagacattttggcaggatgccatcctaatcctatgaagctactgaactataaccctgaggaccctccaggatcagaagtacttcgcatccagaatgttttgtctgagaagcccagggtgagcaccgtgtatgccaacaatggctctgtgcttcagggcacctctgtggcttctgtgtaccatgggaaaattctcataggcaccgtatttcacaaaactctgtactgtgagctctagactctagatagtaaaaaaaaaaaaaaaaagtctacatattttgtaaaagtaaactgataattgtatgataagtggcactgtaagtaaatagcaaacaccaaccagtgagtgtggcttttcttatggatagaagtaaaggagcagacagagattccttgatagccatcaaattgcaagtcaggttaatgacagtccaacaagaagccaaactttacggatctttgttagcagccccaatgttctttctacaataaaacatgtggactatgtccagtgaggtctccgactca

SEQ ID NO: 6802 - protein, 135 aa, Homo sapiens
MKSTVEIFKFEEQQRSLVYLKTIKHELLKSVNDIVVLGPEQFYATRDHYFTNSLLSFFEMILDLRWTYVLFYSPREVKVVAKGFCSANGITVSADQKYVYVADVAAKNIHIMEKHDNWDLTQLKETFWQDAILIL

SEQ ID NO: 6803 - DNA, 1312 bp, Homo sapiens
gcaccccgagaccatggggaagctcgtggcgctggtcctgctgggggtcggcctgtccttagtcggggagatgttcctggcgtttagagaaagggtgaatgcctctcgagaagtggagccagtagaacctgaaaactgccaccttattgaggaacttgggattaaaatatccaggcatgccaaactttgcgccagatgaaccaggaaaaatcttcttgatggatctgaatgaacaaaacccaagggcacaagcgctagaaatcagtggtggatttgacaaagaattatttaatccacatgggatcagtattttcatcgacaaagacaatactgtgtatctttatgttgtgaatcatccccacatgaagtccactgtggagatatttaaatttgaggaacaacaacgttctctggtatacctgaaaactataaaacatgaacttctcaaaagtgtgaatgacattgtggttcttggaccagaacagttctatgccaccagagaccactattttaccaactccctcctgtcattttttgagatgatcttggatcttcgctggacttatgttcttttctacagcccaagggaggttaaagtggtggccaaaggattttgtagtgccaatgggatcacagtctcagcagaccagaagtatgtctatgtagctgatgtagcagctaagaacattcacataatggaaaaacatgataactgggatttaactcaactgaaggtgatacagttgggcaccttagtggataacctgactgtcgatcctgccacaggagacattttggcaggatgccatcctaatcctatgaagctactgaactataaccctgaggaccctccaggatcagaagtacttcgcatccagaatgttttgtctgagaagcccagggtgagcaccgtgtatgccaacaatggctctgtgcttcagggcacctctgtggcttctgtgtaccatgggaaaattctcataggcaccgtatttcacaaaactctgtactgtgagctctagactctagatagtaaaaaaaaaaaaaaaaagtctacatattttgtaaaagtaaactgataattgtatgataagtggcactgtaagtaaatagcaaacaccaaccagtgagtgtggcttttcttatggatagaagtaaaggagcagacagagattccttgatagccatcaaattgcaagtcaggttaatgacagtccaacaagaagccaaactttacggatctttgttagcagccccaatgttctttctacaataaaacatgtggactatgtccagtgaggtctccgactca

SEQ ID NO: 6804 - protein, 281 aa, Homo sapiens [sequence omitted]

SEQ ID NO: 6805 - DNA, 1520 bp, Homo sapiens
gccgctgggcaccccgagaccatggggaagctcgtggcgctggtcctgctgggggtcggcctgtccttagtcggggagatgttcctggcgtttagagaaagggtgaatgcctctcgagaagtggagccagtagaacctgaaaactgccaccttattgaggaacttgaaagtggctctgaagatattgatatacttcctagtgggctggcttttatctccagtctgcaggtctgttggagtttgctggaagtccactccagaccctgtttgcctgggtatcaccagtggaggctgcagaacggcaaatattgctgcctgatttttcttctggaagcttcatcccagaggggcatccgcctgtatgagggattaaaatatccaggcatgccaaactttgcgccagatgaaccaggaaaaatcttcttgatggatctgaatgaacaaaacccaagggcacaagcgctagaaatcagtggtggatttgacaaagaattatttaatccacatgggatcagtattttcatcgacaaagacaatactgtgtatctttatgttgtgaatcatccccacatgaagtccactgtggagatatttaaatttgaggaacaacaacgttctctggtatacctgaaaactataaaacatgaacttctcaaaagtgtgaatgacattgtggttcttggaccagaacagttctatgccaccagagaccactattttaccaactccctcctgtcattttttgagatgatcttggatcttcgctggacttatgttcttttctacagcccaagggaggttaaagtggtggccaaaggattttgtagtgccaatgggatcacagtctcagcagaccagaagtatgtctatgtagctgatgtagcagctaagaacattcacataatggaaaaacatgataactgggatttaactcaactgaaggtgatacagttgggcaccttagtggataacctgactgtcgatcctgccacaggagacattttggcaggatgccatcctaatcctatgaagctactgaactataaccctgaggaccctccaggatcagaagtacttcgcatccagaatgttttgtctgagaagcccagggtgagcaccgtgtatgccaacaatggctctgtgcttcagggcacctctgtggcttctgtgtaccatgggaaaattctcataggcaccgtatttcacaaaactctgtactgtgagctctagactctagatagtaaaaaaaaaaaaaaaaagtctacatattttgtaaaagtaaactgataattgtatgataagtggcactgtaagtaaatagcaaacaccaaccagtgagtgtggcttttcttatggatagaagtaaaggagcagacagagattccttgatagccatcaaattgcaagtcaggttaatgacagtccaacaagaagccaaactttacggatctttgttagcagccccaatgttctttctacaataaaacatgtggactatgtccagtgaggtctccgactca

SEQ ID NO: 6806 - protein, 402 aa, Homo sapiens
MGKLVALVLLGVGLSLVGEMFLAFRERVNASREVEPVEPENCHLIEELESGSEDIDILPSGLAFISSLQVCWSLLEVHSRPCLPGYHQWRLQNGKYCCLIFLLEASSQRGIRLYEGLKYPGMPNFAPDEPGKIFLMDLNEQNPRAQALEISGGFDKELFNPHGISIFIDKDNTVYLYVVNHPHMKSTVEIFKFEEQQRSLVYLKTIKHELLKSVNDIVVLGPEQFYATRDHYFTNSLLSFFEMILDLRWTYVLFYSPREVKVVAKGFCSANGITVSADQKYVYVADVAAKNIHIMEKHDNWDLTQLKVIQLGTLVDNLTVDPATGDILAGCHPNPMKLLNYNPEDPPGSEVLRIQNVLSEKPRVSTVYANNGSVLQGTSVASVYHGKILIGTVFHKTLYCEL

SEQ ID NO: 6807 - DNA, 1169 bp, Homo sapiens
agtcgccgctgggcaccccgagaccatggggaagctcgtggcgctggtcctgctgggggtcggcctgtccttagtcggggagatgttcctggcgtttagagaaagggtgaatgcctctcgagaagtggagccagtagaacctgaaaactgccaccttattgaggaacttgaaagtggctctgaagatattgatatacttcctagtgggctggcttttatctccagtggattaaaatatccaggcatgccaaactttgcgccagatgaaccaggaaaaatcttcttgatggatctgaatgaacaaaacccaagggcacaagcgctagaaatcagtggtggatttgacaaagaattatttaatccacatgggatcagtattttcatcgacaaagacaatactgtgtatctttatgttgtgaatcatccccacatgaagtccactgtggagatatttaaatttgaggaacaacaacgttctctggtatacctgaaaactataaaacatgaacttctcaaaagtgtgaatgacattgtggttcttggaccagaacagttctatgccaccagagaccactattttaccaactccctcctgtcattttttgagatgatcttggatcttcgctggacttatgttcttttctacagcccaagggaggttaaagtggtggccaaaggattttgtagtgccaatgggatcacagtctcagcagaccagaagtacttcgcatccagaatgttttgtctgagaagcccagggtgagcaccgtgtatgccaacaatggctctgtgcttcagggcacctctgtggcttctgtgtaccatgggaaaattctcataggcaccgtatttcacaaaactctgtactgtgagctctagactctagatagtaaaaaaaaaaaaaaaaagtctacatattttgtaaaagtaaactgataattgtatgataagtggcactgtaagtaaatagcaaacaccaaccagtgagtgtggcttttcttatggatagaagtaaaggagcagacagagattccttgatagccatcaaattgcaagtcaggttaatgacagtccaacaagaagccaaactttacggatctttgttagcagccccaatgttctttctacaataaaacatgtggactatgtccagtgaggtctccgactca

SEQ ID NO: 6808 - protein, 245 aa, Homo sapiens
MGKLVALVLLGVGLSLVGEMFLAFRERVNASREVEPVEPENCHLIEELESGSEDIDILPSGLAFISSGLKYPGMPNFAPDEPGKIFLMDLNEQNPRAQALEISGGFDKELFNPHGISIFIDKDNTVYLYVVNHPHMKSTVEIFKFEEQQRSLVYLKTIKHELLKSVNDIVVLGPEQFYATRDHYFTNSLLSFFEMILDLRWTYVLFYSPREVKVVAKGFCSANGITVSADQKYFASRMFCLRSPG

SEQ ID NO: 6809 - DNA, 1380 bp, Homo sapiens
agtcgccgctgggcaccccgagaccatggggaagctcgtggcgctggtcctgctgggggtcggcctgtccttagtcggggagatgttcctggcgtttagagaaagggtgaatgcctctcgagaagtggagccagtagaacctgaaaactgccaccttattgaggaacttgaaagtggctctgaagatattgatatacttcctagtgggctggcttttatctccagtggattaaaatatccaggcatgccaaactttgcgccagatgaaccaggaaaaatcttcttgatggatctgaatgaacaaaacccaagggcacaagcgctagaaatcagtggtggatttgacaaagaattatttaatccacatgggatcagtattttcatcgacaaagacaatactgtgtatctttatgttgtgaatcatccccacatgaagtccactgtggagatatttaaatttgaggaacaacaacgttctctggtatacctgaaaactataaaacatgaacttctcaaaagtgtgaatgacattgtggttcttggaccagaacagttctatgccaccagagaccactattttaccaactccctcctgtcattttttgagatgatcttggatcttcgctggacttatgttcttttctacagcccaagggaggttaaagtggtggccaaaggattttgtagtgccaatgggatcacagtctcagcagaccagaagtatgtctatgtagctgatgtagcagctaagaacattcacataatggaaaaacatgataactgggatttaactcaactgaaggtgatacagttgggcaccttagtggataacctgactgtcgatcctgccacaggagacattttggcaggatgccatcctaatcctatgaagctactgaactataaccctgaggaccctccaggatcagaagtacttcgcatccagaatgttttgtctgagaagcccagggtgagcaccgtgtatgccaacaatggctctgtgcttcagggcacctctgtggcttctgtgtaccatgggaaaattctcataggcaccgtatttcacaaaactctgtactgtgagctctagactctagatagtaaaaaaaaaaaaaaaaagtctacatattttgtaaaagtaaactgataattgtatgataagtggcactgtaagtaaatagcaaacaccaaccagtgagtgtggcttttcttatggatagaagtaaaggagcagacagagattccttgatagccatcaaattgcaagtcaggttaatgacagtccaacaagaagccaaactttacggatctttgttagcagccccaatgttctttctacaataaaacatgtggactatgtccagtgaggtctccgactca

SEQ ID NO: 6810 - protein, 354 aa, Homo sapiens; identical to SEQ ID NO: 897

SEQ ID NO: 6811 - DNA, 1253 bp, Homo sapiens
agtcgccgctgggcaccccgagaccatggggaagctcgtggcgctggtcctgctgggggtcggcctgtccttagtcggggagatgttcctggcgtttagagaaagggtgaatgcctctcgagaagtggagccagtagaacctgaaaactgccaccttattgaggaacttgaaagtggctctgaagatattgatatacttcctagtgggctggcttttatctccagtggattaaaatatccaggcatgccaaactttgcgccagatgaaccaggaaaaatcttcttgatggatctgaatgaacaaaacccaagggcacaagcgctagaaatcagtggtggatttgacaaagaattatttaatccacatgggatcagtattttcatcgacaaagtgtgaatgacattgtggttcttggaccagaacagttctatgccaccagagaccactattttaccaactccctcctgtcattttttgagatgatcttggatcttcgctggacttatgttcttttctacagcccaagggaggttaaagtggtggccaaaggattttgtagtgccaatgggatcacagtctcagcagaccagaagtatgtctatgtagctgatgtagcagctaagaacattcacataatggaaaaacatgataactgggatttaactcaactgaaggtgatacagttgggcaccttagtggataacctgactgtcgatcctgccacaggagacattttggcaggatgccatcctaatcctatgaagctactgaactataaccctgaggaccctccaggatcagaagtacttcgcatccagaatgttttgtctgagaagcccagggtgagcaccgtgtatgccaacaatggctctgtgcttcagggcacctctgtggcttctgtgtaccatgggaaaattctcataggcaccgtatttcacaaaactctgtactgtgagctctagactctagatagtaaaaaaaaaaaaaaaaagtctacatattttgtaaaagtaaactgataattgtatgataagtggcactgtaagtaaatagcaaacaccaaccagtgagtgtggcttttcttatggatagaagtaaaggagcagacagagattccttgatagccatcaaattgcaagtcaggttaatgacagtccaacaagaagccaaactttacggatctttgttagcagccccaatgttctttctacaataaaacatgtggactatgtccagtgaggtctccgactca

SEQ ID NO: 6812 - protein, 160 aa, Homo sapiens [sequence omitted]

SEQ ID NO: 6813 - DNA, 1328 bp, Homo sapiens
agtcgccgctgggcaccccgagaccatggggaagctcgtggcgctggtcctgctgggggtcggcctgtccttagtcggggagatgttcctggcgtttagagaaagggtgaatgcctctcgagaagtggagccagtagaacctgaaaactgccaccttattgaggaacttgaaagtggctctgaagatattgatatacttcctagtgggctggcttttatctccagtggattaaaatatccaggcatgccaaactttgcgccagatgaaccaggaaaaatcttcttgatggatctgaatgaacaaaacccaagggcacaagcgctagaaatcagtggtggatttgacaaagaattatttaatccacatgggatcagtattttcatcgacaaagacaatactgtgtatctttatgttgtgaatcatccccacatgaagtccactgtggagatatttaaatttgaggaacaacaacgttctctggtatacctgaaaactataaaacatgaacttctcaaaagtgtgaatgacattgtggttcttggaccagaacagttctatgccaccagagaccactattttaccaactccctcctgtcattttttgagatgatcttggatcttcgctggacttatgttcttttctacagcccaagggaggttaaagtggtggccaaaggattttgtagtgccaatgggatcacagtctcagcagaccagaagtatgtctatgtagctgatgtagcagctaagaacattcacataatggaaaaacatgataactgggatttaactcaactgaaggagacattttggcaggatgccatcctaatcctatgaagctactgaactataaccctgaggaccctccaggatcagaagtacttcgcatccagaatgttttgtctgagaagcccagggtgagcaccgtgtatgccaacaatggctctgtgcttcagggcacctctgtggcttctgtgtaccatgggaaaattctcataggcaccgtatttcacaaaactctgtactgtgagctctagactctagatagtaaaaaaaaaaaaaaaaagtctacatattttgtaaaagtaaactgataattgtatgataagtggcactgtaagtaaatagcaaacaccaaccagtgagtgtggcttttcttatggatagaagtaaaggagcagacagagattccttgatagccatcaaattgcaagtcaggttaatgacagtccaacaagaagccaaactttacggatctttgttagcagccccaatgttctttctacaataaaacatgtggactatgtccagtgaggtctccgactca

SEQ ID NO: 6814 - protein, 270 aa, Homo sapiens
MGKLVALVLLGVGLSLVGEMFLAFRERVNASREVEPVEPENCHLIEELESGSEDIDILPSGLAFISSGLKYPGMPNFAPDEPGKIFLMDLNEQNPRAQALEISGGFDKELFNPHGISIFIDKDNTVYLYVVNHPHMKSTVEIFKFEEQQRSLVYLKTIKHELLKSVNDIVVLGPEQFYATRDHYFTNSLLSFFEMILDLRWTYVLFYSPREVKVVAKGFCSANGITVSADQKYVYVADVAAKNIHIMEKHDNWDLTQLKETFWQDAILIL

SEQ ID NO: 6815 - DNA, 1251 bp, Homo sapiens
agtcgccgctgggcaccccgagaccatggggaagctcgtggcgctggtcctgctgggggtcggcctgtccttagtcggggagatgttcctggcgtttagagaaagggtgaatgcctctcgagaagtggagccagtagaacctgaaaactgccaccttattgaggaacttgaaagtggctctgaagatattgatatacttcctagtgggctggcttttatctccagtggattaaaatatccaggcatgccaaactttgcgccagatgaaccaggaaaaatcttcttgatggatctgaatgaacaaaacccaagggcacaagcgctagaaatcagtggtggatttgacaaagaattatttaatccacatgggatcagtattttcatcgacaaagacaatactgtgtatctttatgttgtgaatcatccccacatgaagtccactgtggagatatttaaatttgaggaacaacaacgttctctggtatacctgaaaactataaaacatgaacttctcaaaagcccaagggaggttaaagtggtggccaaaggattttgtagtgccaatgggatcacagtctcagcagaccagaagtatgtctatgtagctgatgtagcagctaagaacattcacataatggaaaaacatgataactgggatttaactcaactgaaggtgatacagttgggcaccttagtggataacctgactgtcgatcctgccacaggagacattttggcaggatgccatcctaatcctatgaagctactgaactataaccctgaggaccctccaggatcagaagtacttcgcatccagaatgttttgtctgagaagcccagggtgagcaccgtgtatgccaacaatggctctgtgcttcagggcacctctgtggcttctgtgtaccatgggaaaattctcataggcaccgtatttcacaaaactctgtactgtgagctctagactctagatagtaaaaaaaaaaaaaaaaagtctacatattttgtaaaagtaaactgataattgtatgataagtggcactgtaagtaaatagcaaacaccaaccagtgagtgtggcttttcttatggatagaagtaaaggagcagacagagattccttgatagccatcaaattgcaagtcaggttaatgacagtccaacaagaagccaaactttacggatctttgttagcagccccaatgttctttctacaataaaacatgtggactatgtccagtgaggtctccgactca

SEQ ID NO: 6816 - protein, 311 aa, Homo sapiens
MGKLVALVLLGVGLSLVGEMFLAFRERVNASREVEPVEPENCHLIEELESGSEDIDILPSGLAFISSGLKYPGMPNFAPDEPGKIFLMDLNEQNPRAQALEISGGFDKELFNPHGISIFIDKDNTVYLYVVNHPHMKSTVEIFKFEEQQRSLVYLKTIKHELLKSPREVKVVAKGFCSANGITVSADQKYVYVADVAAKNIHIMEKHDNWDLTQLKVIQLGTLVDNLTVDPATGDILAGCHPNPMKLLNYNPEDPPGSEVLRIQNVLSEKPRVSTVYANNGSVLQGTSVASVYHGKILIGTVFHKTLYCEL

SEQ ID NO: 6817 - DNA, 1102 bp, Homo sapiens
agtcgccgctgggcaccccgagaccatggggaagctcgtggcgctggtcctgctgggggtcggcctgtccttagtcggggagatgttcctggcgtttagagaaagggtgaatgcctctcgagaagtggagccagtagaacctgaaaactgccaccttattgaggaacttgaaagtggctctgaagatattgatatacttcctagtgggctggcttttatctccagtggattaaaatatccaggcatgccaaactttgcgccagatgaaccaggaaaaatcttcttgatggatctgaatgaacaaaacccaagggcacaagcgctagaaatcagtggtggatttgacaaagaattatttaatccacatgggatcagtattttcatcgacaaagacaatactgtgtatctttatgttgtgaatcatccccacatgaagtccactgtggagatatttaaatttgaggaacaacaacgttctctggtatacctgaaaactataaaacatgaacttctcaaaagtgtgaatgacattgtggttcttggaccagaacagttctatgccaccagagaccactattttaccaactccctcctgtcattttttgagatgatcttggatcttcgctggacttatgttcttttctacagcccaagggaggttaaagtggtggccaaaggattttgtagtgccaatgggatcacagtctcagcagaccagaagtatgtctatgtagctgatgtagcagctaagaacattcacataatggaaaaacatgataactgggatttaactcaactgaaggtgatacagttgggcaccttagtggataacctgactgtcgatcctgccacaggagacattttggcaggatgccatcctaatcctatgaagctactgaactataaccctgaggaccctccaggatcagaagtacttcgcatccagaatgttttgtctgagaagcccagggtgagcaccgtgtatgccaacaatggctctgtgcttcagggcacctctgtggcttctgtgtaccatgggaaaattctcataggcaccgtatttcacaaaactctgtactgtgagctctagactctagatagt

SEQ ID NO: 6818 - protein, 354 aa, Homo sapiens; identical to SEQ ID NO: 897

SEQ ID NO: 6819 - DNA, 1232 bp, Homo sapiens
ggaagggggcgccaggcagcccctgacctcacttggaagaggagagaaagagagtcgaagacgccctgtcaagatgccactcacctaaacgccaggaacatctccccgactaaggacaggccgacccccagcaggaccagcgccacgagcttccccatggtctcggggtgcccagcggcgactgcgcggcgccgagagctctcgggggcgcggcgggcggttcctgcctcgcgtacggattggggcccgctcggccccgcccgcacacgcctcctacttacctgagcggcccgggtgccgcagcagggcgctgacgagtcccgccgagccccgccgcccgggttcaaggccgccttcacgcccacgattccttgttttttgggcagaggtcaaggctcaacggagagggagcccgggaccgagttgtggtgggagtttgctcctaacacccgcgaaatcctacctcaattcctcagatggcctgagggagaaaccggagggcccgggaatggcggggagctccagttcagagccggaactccggacttctgcaaggccagacgtgaggcgacactgaattgctcccgagacgcgggaagggcgaaggcaatcgaagcgaagagctttaactcatcttctccaggatttggggcacgggaacctgtctcctgaccttcgtgccttacctcggagtgtgctgcccagacggacttgtgaatagctgcgtctgtccccatagttaacgggagaaggaaacaccaggagaaaagaaggaaaagacaggaaacgggaagaggagcagaggcgaggaaggggaaggtcatttccttggcaggggtctcgctgtgttgcctaggctggagtacattggcacaatcatagctcactgcagtctggacctcccggactcaagggaccctccagcctcagcctcctgagtagctgggaccgcaggcctggcagctgtggcgactgaatctaagaagaaaggctgataatgctctggctggtttcataataggacttttcaaggcactgtcccatccattaactcatttgaaatgaaagatgaagaaaccgagccacacagaggttaaataacttgcccaagggtgcacaactactagtagtattgagtctatacgcttaagtattgtgctattccatttcttactgaatacaaagcaaaaaaacataaggatcagaggaggagtgtgagtgtcctcatactc

SEQ ID NO: 6820 - protein, 42 aa, Homo sapiens
MVSGCPAATARRRELSGARRAVPASRTDWGPLGPARTRLLLT

SEQ ID NO: 6821 - DNA, 2949 bp, Homo sapiens
gcagggcgatgtgtaatttcctcacatgcatagaggcaggaaggttacctctaaattatttaatcaagtttctcatgtcatttagattttgacaatttctcatttggaaggtacttgagctggatacactggtggataatttatctattgatccttcctcgggggacatctgggtaggctgtcatcctaatggccagaagctcttcgtgtatgacccgaacaatcctccctcgtcagaggttctccgcatccagaacattctatctgagaagcctacagtgactacagtttatgccaacaatgggtctgttctccaaggaagttctgtagcctcagtgtatgatgggaagctgctcataggcactttataccacagagccttgtattgtgaactctaaattgtacttttggcatgaaagtgcgataacttaacaattaattttctatgaattgctaattctgagggaatttaaccagcaacattgacccagaaatgtatggcatgtgtagttaattttattccagtaaggaacggcccttttagttcttagagcacttttaacaaaaaaggaaaatgaacaggttctttaaaatgccaagcaagggacagaaaagaaagctgctttcgaataaagtgaatacattttgcacaaagtaagcctcacctttgccttccaactgccagaacatggattccactgaaatagagtgaattatatttccttaaaatgtgagtgacctcacttctggcactgtgactactatggctgtttagaactactgataacgtattttgatgttttgtacttacatctttgtttaccattaaaaagttggagttatattaaagactaactaaaatcccagttttgtctgtgtttaattctgaaggcatatggctaggagaaatgggaaagcagctgcttccttatggagtttggataggcaagcatggccatattaatttctcttgtggaaagctgaaagtgaatggactcttaatttgaaacaacaacaacaaaaatcaatgaaatattgcaactcaaattcccagttcctaaggaggtttccatcagctctcttccttaatgggagtccactttagagacaaagaggaaataagggttgggacaggaaggtcttgccacctcctcattgaacagaactgtgaactaaagccaggagaatgaagtcagtcgtccgtgaccacatggttaagcagcagcaatgctaggatcagggccgcgtgcccagctcacagagggagagtttttctgctcactgtacctcctataaaatcatcataagccctagagagagactttcatgtgtttctttccattgtaatttatcaaaccactttacttcacttctcatactttttccctatcatcatcatgaaaatatttgtcagttaattacaatatgccaaacaatgcaatgaaagtattacattcgttatcttatttaatcctaattgcagcctggagtaagtattgatattatatcactgttaacatttcacagatattcagtctatttctgatgccagagcctgtaccgctaaccactacatgatgctactgccatagaacgaactagtattttattactgtttttcctgatgtatacagtttcttcatgttttgtagatatgtttgagttctgcttttagatgaatcatttaatggattttaaatttaaatttcagtagtattcttaaatttggcctgtatccatttggcctgtgttgttatttatatatttaagtagtttgctacatattgtattggatttatttcatgctaaaataattattttcttttttgtttacattgtccatgggaaaatgctaagtcacagatgaatacagcaagattaaatattgcagacctagggatccaaatgaagaactagatgttttagattttatgagattatatcagactatctaaaaagctacatttataaaaagtactggaatacagtaggcataaaacaaacttggtttctattgcatttattacaaattttagaacaaaaccatgtcctttgcagcaacatggatgcagctagaggtcatcctaagcaaattaatgcaggaacagaaaaccaaatattgcatgtcctcacttataagtgggagctaaacattgaatacacatagacaaaaatgggaacaacagacactggggaccactagacagaagggagaatgaggctatgggctgaaaaactaactgttgggtactatgctcatcacttgggtgacaggaccatccatatcccaaacctcagcatcatgcagtatacccaggtaacaactctacacctgtactctttcactaccccctcaaaaaacactggggagtacaatttgctggatcatatggtagaagtatgtttaattttgaaggaaactgccaaattattccaagtggctatactgctttgcatttgcaccaagcagtgaatgagagctcctattactccacatcctggccagcatttggtggtgtcagtattttggattatactattatgaagtggtatctcattttgatttccaattacctgatgacataaaatgttgaacattatgcttgtttgctatctgtatgtcttctctgataaggtgcctgtttataccattggcccattttaaaaatcttccttttgttgttgttttgttttcttattaagttttaagagtgctttgaatatttggaataacaatcttttgttaggtatgtctcttgcaaatattttctcccagtctgttgcttgtcttctcattctcttgacagtgtgttctgcagaggatatttatttttaaaaacaaaatcagggcacctctataagataatatagccacttcaaatgatactacagaatattagcatagacatgtactcacagtgtattttgaataaagcatgcaagtatttt

SEQ ID NO: 6822 - protein, 30 aa, Homo sapiens
MARSSSCMTRTILPRQRFSASRTFYLRSLQ

SEQ ID NO: 6823 - DNA, 3619 bp, Homo sapiens
aatgtgtacaaaccagtgagatttgttccaacacactataaactttcaaggagagaggctgtgtcttcttcatgtttatatctgctgcaacactgagttcatggcttttcacacataattgctcaacagagcaggtgccatggaaagtcaattcaatgagtaaaattacctcaaaatagtctgttaattcactcacctttgaagtagacagattattctgcattgatacttatctcttactcttaaaattcgctatgtattaataaatattttattgaatattaaggaatgatcactattttaataagatgttctttaccatatatttctatatgtacatgataattagaagtatcaaattatattgtggaatgtaaaagcttttcttctgaagccaagcatttgttttattgtcatttcagtggcaaatatggacttcatattcaaaatgatgttctatattatttttccttacaagctttttgaaaaacaatttaataattccatgattgttgtagcaccactgaattgattctgaaagcttactttttaaataaaaattgacctttatcaagcattccttgagggcccatgattgattaacttcttggcaggttattaagacttattctttcacactgtattaatgaagctttatattggcatggagctctaaccactgtgtcctttctgcaaaggtatatctatgttgctgacatattggctcatgaaattcatgttttggaaaaacacactaatatgaatttaactcagttgaaggtacttgagctggatacactggtggataatttatctattgatccttcctcgggggacatctgggtaggctgtcatcctaatggccagaagctcttcgtgtatgacccgaacaatcctccctcgtcagaggttctccgcatccagaacattctatctgagaagcctacagtgactacagtttatgccaacaatgggtctgttctccaaggaagttctgtagcctcagtgtatgatgggaagctgctcataggcactttataccacagagccttgtattgtgaactctaaattgtacttttggcatgaaagtgcgataacttaacaattaattttctatgaattgctaattctgagggaatttaaccagcaacattgacccagaaatgtatggcatgtgtagttaattttattccagtaaggaacggcccttttagttcttagagcacttttaacaaaaaaggaaaatgaacaggttctttaaaatgccaagcaagggacagaaaagaaagctgctttcgaataaagtgaatacattttgcacaaagtaagcctcacctttgccttccaactgccagaacatggattccactgaaatagagtgaattatatttccttaaaatgtgagtgacctcacttctggcactgtgactactatggctgtttagaactactgataacgtattttgatgttttgtacttacatctttgtttaccattaaaaagttggagttatattaaagactaactaaaatcccagttttgtctgtgtttaattctgaaggcatatggctaggagaaatgggaaagcagctgcttccttatggagtttggataggcaagcatggccatattaatttctcttgtggaaagctgaaagtgaatggactcttaatttgaaacaacaacaacaaaaatcaatgaaatattgcaactcaaattcccagttcctaaggaggtttccatcagctctcttccttaatgggagtccactttagagacaaagaggaaataagggttgggacaggaaggtcttgccacctcctcattgaacagaactgtgaactaaagccaggagaatgaagtcagtcgtccgtgaccacatggttaagcagcagcaatgctaggatcagggccgcgtgcccagctcacagagggagagtttttctgctcactgtacctcctataaaatcatcataagccctagagagagactttcatgtgtttctttccattgtaatttatcaaaccactttacttcacttctcatactttttccctatcatcatcatgaaaatatttgtcagttaattacaatatgccaaacaatgcaatgaaagtattacattcgttatcttatttaatcctaattgcagcctggagtaagtattgatattatatcactgttaacatttcacagatattcagtctatttctgatgccagagcctgtaccgctaaccactacatgatgctactgccatagaacgaactagtattttattactgtttttcctgatgtatacagtttcttcatgttttgtagatatgtttgagttctgcttttagatgaatcatttaatggattttaaatttaaatttcagtagtattcttaaatttggcctgtatccatttggcctgtgttgttatttatatatttaagtagtttgctacatattgtattggatttatttcatgctaaaataattattttcttttttgtttacattgtccatgggaaaatgctaagtcacagatgaatacagcaagattaaatattgcagacctagggatccaaatgaagaactagatgttttagattttatgagattatatcagactatctaaaaagctacatttataaaaagtactggaatacagtaggcataaaacaaacttggtttctattgcatttattacaaattttagaacaaaaccatgtcctttgcagcaacatggatgcagctagaggtcatcctaagcaaattaatgcaggaacagaaaaccaaatattgcatgtcctcacttataagtgggagctaaacattgaatacacatagacaaaaatgggaacaacagacactggggaccactagacagaagggagaatgaggctatgggctgaaaaactaactgttgggtactatgctcatcacttgggtgacaggaccatccatatcccaaacctcagcatcatgcagtatacccaggtaacaactctacacctgtactctttcactaccccctcaaaaaacactggggagtacaatttgctggatcatatggtagaagtatgtttaattttgaaggaaactgccaaattattccaagtggctatactgctttgcatttgcaccaagcagtgaatgagagctcctattactccacatcctggccagcatttggtggtgtcagtattttggattatactattatgaagtggtatctcattttgatttccaattacctgatgacataaaatgttgaacattatgcttgtttgctatctgtatgtcttctctgataaggtgcctgtttataccattggcccattttaaaaatcttccttttgttgttgttttgttttcttattaagttttaagagtgctttgaatatttggaataacaatcttttgttaggtatgtctcttgcaaatattttctcccagtctgttgcttgtcttctcattctcttgacagtgtgttctgcagaggatatttatttttaaaaacaaaatcagggcacctctataagataatatagccacttcaaatgatactacagaatattagcatagacatgtactcacagtgtattttgaataaagcatgcaagtatttt

SEQ ID NO: 6824 - protein, 102 aa, Homo sapiens [sequence omitted]

SEQ ID NO: 6825 - DNA, 3659 bp, Homo sapiens
aggcagcgcgcccggctcccgcgccatggggcggctggtggctgtgggcttgctggggatcgcgctggcgctcctgggcgagaggcttctggcactcagaaatcgacttaaagcctccagagaagtagaatctgtagaccttccacactgccacctgattaaaggaattgtgtggtgagtgtcttcttccttccccaaattcagcagaggagatacaagggtatttgatgagggctgcagaacaggtctaaaattcccaggactccacagctttgcaccagataagcctggaggaatactaatgatggatctaaaagaagaaaaaccaagggcacgggaattaagaatcagtcgtgggtttgatttggcctcattcaatccacatggcatcagcactttcatagacaacgatgacacagtttatctctttgttgtaaaccacccagaattcaagaatacagtggaaatttttaaatttgaagaagcagaaaattctctgttgcatctgaaaacagtcaaacatgagcttcttccaagtgtgaatgacatcacagctgttggaccggcacatttctatgccacaaatgaccactacttctctgatcctttcttaaagtatttagaaacatacttgaacttacactgggcaaatgttgtttactacagtccaaatgaagttaaagtggtagcagaaggatttgattcagcaaatgggatcaatatttcacctgatgataagtatatctatgttgctgacatattggctcatgaaattcatgttttggaaaaacacactaatatgaatttaactcagttgaaggtacttgagctggatacactggtggataatttatctattgatccttcctcgggggacatctgggtaggctgtcatcctaatggccagaagctcttcgtgtatgacccgaacaatcctccctcgtcagaggttctccgcatccagaacattctatctgagaagcctacagtgactacagtttatgccaacaatgggtctgttctccaaggaagttctgtagcctcagtgtatgatgggaagctgctcataggcactttataccacagagccttgtattgtgaactctaaattgtacttttggcatgaaagtgcgataacttaacaattaattttctatgaattgctaattctgagggaatttaaccagcaacattgacccagaaatgtatggcatgtgtagttaattttattccagtaaggaacggcccttttagttcttagagcacttttaacaaaaaaggaaaatgaacaggttctttaaaatgccaagcaagggacagaaaagaaagctgctttcgaataaagtgaatacattttgcacaaagtaagcctcacctttgccttccaactgccagaacatggattccactgaaatagagtgaattatatttccttaaaatgtgagtgacctcacttctggcactgtgactactatggctgtttagaactactgataacgtattttgatgttttgtacttacatctttgtttaccattaaaaagttggagttatattaaagactaactaaaatcccagttttgtctgtgtttaattctgaaggcatatggctaggagaaatgggaaagcagctgcttccttatggagtttggataggcaagcatggccatattaatttctcttgtggaaagctgaaagtgaatggactcttaatttgaaacaacaacaacaaaaatcaatgaaatattgcaactcaaattcccagttcctaaggaggtttccatcagctctcttccttaatgggagtccactttagagacaaagaggaaataagggttgggacaggaaggtcttgccacctcctcattgaacagaactgtgaactaaagccaggagaatgaagtcagtcgtccgtgaccacatggttaagcagcagcaatgctaggatcagggccgcgtgcccagctcacagagggagagtttttctgctcactgtacctcctataaaatcatcataagccctagagagagactttcatgtgtttctttccattgtaatttatcaaaccactttacttcacttctcatactttttccctatcatcatcatgaaaatatttgtcagttaattacaatatgccaaacaatgcaatgaaagtattacattcgttatcttatttaatcctaattgcagcctggagtaagtattgatattatatcactgttaacatttcacagatattcagtctatttctgatgccagagcctgtaccgctaaccactacatgatgctactgccatagaacgaactagtattttattactgtttttcctgatgtatacagtttcttcatgttttgtagatatgtttgagttctgcttttagatgaatcatttaatggattttaaatttaaatttcagtagtattcttaaatttggcctgtatccatttggcctgtgttgttatttatatatttaagtagtttgctacatattgtattggatttatttcatgctaaaataattattttcttttttgtttacattgtccatgggaaaatgctaagtcacagatgaatacagcaagattaaatattgcagacctagggatccaaatgaagaactagatgttttagattttatgagattatatcagactatctaaaaagctacatttataaaaagtactggaatacagtaggcataaaacaaacttggtttctattgcatttattacaaattttagaacaaaaccatgtcctttgcagcaacatggatgcagctagaggtcatcctaagcaaattaatgcaggaacagaaaaccaaatattgcatgtcctcacttataagtgggagctaaacattgaatacacatagacaaaaatgggaacaacagacactggggaccactagacagaagggagaatgaggctatgggctgaaaaactaactgttgggtactatgctcatcacttgggtgacaggaccatccatatcccaaacctcagcatcatgcagtatacccaggtaacaactctacacctgtactctttcactaccccctcaaaaaacactggggagtacaatttgctggatcatatggtagaagtatgtttaattttgaaggaaactgccaaattattccaagtggctatactgctttgcatttgcaccaagcagtgaatgagagctcctattactccacatcctggccagcatttggtggtgtcagtattttggattatactattatgaagtggtatctcattttgatttccaattacctgatgacataaaatgttgaacattatgcttgtttgctatctgtatgtcttctctgataaggtgcctgtttataccattggcccattttaaaaatcttccttttgttgttgttttgttttcttattaagttttaagagtgctttgaatatttggaataacaatcttttgttaggtatgtctcttgcaaatattttctcccagtctgttgcttgtcttctcattctcttgacagtgtgttctgcagaggatatttatttttaaaaacaaaatcagggcacctctataagataatatagccacttcaaatgatactacagaatattagcatagacatgtactcacagtgtattttgaataaagcatgcaagtatttt

SEQ ID NO: 6826 - protein, 268 aa, Homo sapiens
MMDLKEEKPRARELRISRGFDLASFNPHGISTFIDNDDTVYLFVVNHPEFKNTVEIFKFEEAENSLLHLKTVKHELLPSVNDITAVGPAHFYATNDHYFSDPFLKYLETYLNLHWANVVYYSPNEVKVVAEGFDSANGINISPDDKYIYVADILAHEIHVLEKHTNMNLTQLKVLELDTLVDNLSIDPSSGDIWVGCHPNGQKLFVYDPNNPPSSEVLRIQNILSEKPTVTTVYANNGSVLQGSSVASVYDGKLLIGTLYHRALYCEL

SEQ ID NO: 6827 - DNA, 3739 bp, Homo sapiens
agggactcggcctaggcggaggacggggcggagcgcggccggcaccatcgagccgggaagatggcaccgcccacggagctgctggccaggccggagcgaggcagcgcgcccggctcccgcgccatggggcggctggtggctgtgggcttgctggggatcgcgctggcgctcctgggcgagaggcttctggcactcagaaatcgacttaaagcctccagagaagtagaatctgtagaccttccacactgccacctgattaaaggaattgaagctggctctgaagatattgacatacttcccaatggtctggctttttttagtgtgggtctaaaattcccaggactccacagctttgcaccagataagcctggaggaatactaatgatggatctaaaagaagaaaaaccaagggcacgggaattaagaatcagtcgtgggtttgatttggcctcattcaatccacatggcatcagcactttcatagacaacgatgacacagtttatctctttgttgtaaaccacccagaattcaagaatacagtggaaatttttaaatttgaagaagcagaaaattctctgttgcatctgaaaacagtcaaacatgagcttcttccaagtgtgaatgacatcacagctgttggaccggcacatttctatgccacaaatgaccactacttctctgatcctttcttaaagtatttagaaacatacttgaacttacactgggcaaatgttgtttactacagtccaaatgaagttaaagtggtagcagaaggatttgattcagcaaatgggatcaatatttcacctgatgataagtatatctatgttgctgacatattggctcatgaaattcatgttttggaaaaacacactaatatgaatttaactcagttgaaggtacttgagctggatacactggtggataatttatctattgatccttcctcgggggacatctgggtaggctgtcatcctaatggccagaagctcttcgtgtatgacccgaacaatcctccctcgtcagaggttctccgcatccagaacattctatctgagaagcctacagtgactacagtttatgccaacaatgggtctgttctccaaggaagttctgtagcctcagtgtatgatgggaagctgctcataggcactttataccacagagccttgtattgtgaactctaaattgtacttttggcatgaaagtgcgataacttaacaattaattttctatgaattgctaattctgagggaatttaaccagcaacattgacccagaaatgtatggcatgtgtagttaattttattccagtaaggaacggcccttttagttcttagagcacttttaacaaaaaaggaaaatgaacaggttctttaaaatgccaagcaagggacagaaaagaaagctgctttcgaataaagtgaatacattttgcacaaagtaagcctcacctttgccttccaactgccagaacatggattccactgaaatagagtgaattatatttccttaaaatgtgagtgacctcacttctggcactgtgactactatggctgtttagaactactgataacgtattttgatgttttgtacttacatctttgtttaccattaaaaagttggagttatattaaagactaactaaaatcccagttttgtctgtgtttaattctgaaggcatatggctaggagaaatgggaaagcagctgcttccttatggagtttggataggcaagcatggccatattaatttctcttgtggaaagctgaaagtgaatggactcttaatttgaaacaacaacaacaaaaatcaatgaaatattgcaactcaaattcccagttcctaaggaggtttccatcagctctcttccttaatgggagtccactttagagacaaagaggaaataagggttgggacaggaaggtcttgccacctcctcattgaacagaactgtgaactaaagccaggagaatgaagtcagtcgtccgtgaccacatggttaagcagcagcaatgctaggatcagggccgcgtgcccagctcacagagggagagtttttctgctcactgtacctcctataaaatcatcataagccctagagagagactttcatgtgtttctttccattgtaatttatcaaaccactttacttcacttctcatactttttccctatcatcatcatgaaaatatttgtcagttaattacaatatgccaaacaatgcaatgaaagtattacattcgttatcttatttaatcctaattgcagcctggagtaagtattgatattatatcactgttaacatttcacagatattcagtctatttctgatgccagagcctgtaccgctaaccactacatgatgctactgccatagaacgaactagtattttattactgtttttcctgatgtatacagtttcttcatgttttgtagatatgtttgagttctgcttttagatgaatcatttaatggattttaaatttaaatttcagtagtattcttaaatttggcctgtatccatttggcctgtgttgttatttatatatttaagtagtttgctacatattgtattggatttatttcatgctaaaataattattttcttttttgtttacattgtccatgggaaaatgctaagtcacagatgaatacagcaagattaaatattgcagacctagggatccaaatgaagaactagatgttttagattttatgagattatatcagactatctaaaaagctacatttataaaaagtactggaatacagtaggcataaaacaaacttggtttctattgcatttattacaaattttagaacaaaaccatgtcctttgcagcaacatggatgcagctagaggtcatcctaagcaaattaatgcaggaacagaaaaccaaatattgcatgtcctcacttataagtgggagctaaacattgaatacacatagacaaaaatgggaacaacagacactggggaccactagacagaagggagaatgaggctatgggctgaaaaactaactgttgggtactatgctcatcacttgggtgacaggaccatccatatcccaaacctcagcatcatgcagtatacccaggtaacaactctacacctgtactctttcactaccccctcaaaaaacactggggagtacaatttgctggatcatatggtagaagtatgtttaattttgaaggaaactgccaaattattccaagtggctatactgctttgcatttgcaccaagcagtgaatgagagctcctattactccacatcctggccagcatttggtggtgtcagtattttggattatactattatgaagtggtatctcattttgatttccaattacctgatgacataaaatgttgaacattatgcttgtttgctatctgtatgtcttctctgataaggtgcctgtttataccattggcccattttaaaaatcttccttttgttgttgttttgttttcttattaagttttaagagtgctttgaatatttggaataacaatcttttgttaggtatgtctcttgcaaatattttctcccagtctgttgcttgtcttctcattctcttgacagtgtgttctgcagaggatatttatttttaaaaacaaaatcagggcacctctataagataatatagccacttcaaatgatactacagaatattagcatagacatgtactcacagtgtattttgaataaagcatgcaagtatttt

SEQ ID NO: 6828 - protein, 375 aa, Homo sapiens
MAPPTELLARPERGSAPGSRAMGRLVAVGLLGIALALLGERLLALRNRLKASREVESVDLPHCHLIKGIEAGSEDIDILPNGLAFFSVGLKFPGLHSFAPDKPGGILMMDLKEEKPRARELRISRGFDLASFNPHGISTFIDNDDTVYLFVVNHPEFKNTVEIFKFEEAENSLLHLKTVKHELLPSVNDITAVGPAHFYATNDHYFSDPFLKYLETYLNLHWANVVYYSPNEVKVVAEGFDSANGINISPDDKYIYVADILAHEIHVLEKHTNMNLTQLKVLELDTLVDNLSIDPSSGDIWVGCHPNGQKLFVYDPNNPPSSEVLRIQNILSEKPTVTTVYANNGSVLQGSSVASVYDGKLLIGTLYHRALYCEL

SEQ ID NO: 6829 - DNA, 865 bp, Homo sapiens
gcagggcgatgtgtaatttcctcacatgcatagaggcaggaaggttacctctaaattatttaatcaagtttctcatgtcatttagattttgacaatttctcatttggaaggtacttgagctggatacactggtggataatttatctattgatccttcctcgggggacatctgggtaggctgtcatcctaatggccagaagctcttcgtgtatgacccgaacaatcctccctcgtcagaggttctccgcatccagaacattctatctgagaagcctacagtgactacagtttatgccaacaatgggtctgttctccaaggaagttctgtagcctcagtgtatgatgggaagctgctcataggcactttataccacagagccttgtattgtgaactctaaattgtacttttggcatgaaagtgcgataacttaacaattaattttctatgaattgctaattctgagggaatttaaccagcaacattgacccagaaatgtatggcatgtgtagttaattttattccagtaaggaacggcccttttagttcttagagcacttttaacaaaaaaggaaaatgaacaggttctttaaaatgccaagcaagggacagaaaagaaagctgctttcgaataaagtgaatacattttgcacaaagtaagcctcacctttgccttccaactgccagaacatggattccactgaaatagagtgaattatatttccttaaaatgtgagtgacctcacttctggcactgtgactactatggctgtttagaactactgataacgtattttgatgttttgtacttacatctttgtttaccattaaaaagttggagttatattaaagactaactaaaatccc

SEQ ID NO: 6830 - protein, 30 aa, Homo sapiens; identical to SEQ ID NO: 6822

SEQ ID NO: 6831 - DNA, 1535 bp, Homo sapiens
aatgtgtacaaaccagtgagatttgttccaacacactataaactttcaaggagagaggctgtgtcttcttcatgtttatatctgctgcaacactgagttcatggcttttcacacataattgctcaacagagcaggtgccatggaaagtcaattcaatgagtaaaattacctcaaaatagtctgttaattcactcacctttgaagtagacagattattctgcattgatacttatctcttactcttaaaattcgctatgtattaataaatattttattgaatattaaggaatgatcactattttaataagatgttctttaccatatatttctatatgtacatgataattagaagtatcaaattatattgtggaatgtaaaagcttttcttctgaagccaagcatttgttttattgtcatttcagtggcaaatatggacttcatattcaaaatgatgttctatattatttttccttacaagctttttgaaaaacaatttaataattccatgattgttgtagcaccactgaattgattctgaaagcttactttttaaataaaaattgacctttatcaagcattccttgagggcccatgattgattaacttcttggcaggttattaagacttattctttcacactgtattaatgaagctttatattggcatggagctctaaccactgtgtcctttctgcaaaggtatatctatgttgctgacatattggctcatgaaattcatgttttggaaaaacacactaatatgaatttaactcagttgaaggtacttgagctggatacactggtggataatttatctattgatccttcctcgggggacatctgggtaggctgtcatcctaatggccagaagctcttcgtgtatgacccgaacaatcctccctcgtcagaggttctccgcatccagaacattctatctgagaagcctacagtgactacagtttatgccaacaatgggtctgttctccaaggaagttctgtagcctcagtgtatgatgggaagctgctcataggcactttataccacagagccttgtattgtgaactctaaattgtacttttggcatgaaagtgcgataacttaacaattaattttctatgaattgctaattctgagggaatttaaccagcaacattgacccagaaatgtatggcatgtgtagttaattttattccagtaaggaacggcccttttagttcttagagcacttttaacaaaaaaggaaaatgaacaggttctttaaaatgccaagcaagggacagaaaagaaagctgctttcgaataaagtgaatacattttgcacaaagtaagcctcacctttgccttccaactgccagaacatggattccactgaaatagagtgaattatatttccttaaaatgtgagtgacctcacttctggcactgtgactactatggctgtttagaactactgataacgtattttgatgttttgtacttacatctttgtttaccattaaaaagttggagttatattaaagactaactaaaatccc

SEQ ID NO: 6832 - protein, 102 aa, Homo sapiens [sequence omitted]

SEQ ID NO: 6833 - DNA, 1575 bp, Homo sapiens
aggcagcgcgcccggctcccgcgccatggggcggctggtggctgtgggcttgctggggatcgcgctggcgctcctgggcgagaggcttctggcactcagaaatcgacttaaagcctccagagaagtagaatctgtagaccttccacactgccacctgattaaaggaattgtgtggtgagtgtcttcttccttccccaaattcagcagaggagatacaagggtatttgatgagggctgcagaacaggtctaaaattcccaggactccacagctttgcaccagataagcctggaggaatactaatgatggatctaaaagaagaaaaaccaagggcacgggaattaagaatcagtcgtgggtttgatttggcctcattcaatccacatggcatcagcactttcatagacaacgatgacacagtttatctctttgttgtaaaccacccagaattcaagaatacagtggaaatttttaaatttgaagaagcagaaaattctctgttgcatctgaaaacagtcaaacatgagcttcttccaagtgtgaatgacatcacagctgttggaccggcacatttctatgccacaaatgaccactacttctctgatcctttcttaaagtatttagaaacatacttgaacttacactgggcaaatgttgtttactacagtccaaatgaagttaaagtggtagcagaaggatttgattcagcaaatgggatcaatatttcacctgatgataagtatatctatgttgctgacatattggctcatgaaattcatgttttggaaaaacacactaatatgaatttaactcagttgaaggtacttgagctggatacactggtggataatttatctattgatccttcctcgggggacatctgggtaggctgtcatcctaatggccagaagctcttcgtgtatgacccgaacaatcctccctcgtcagaggttctccgcatccagaacattctatctgagaagcctacagtgactacagtttatgccaacaatgggtctgttctccaaggaagttctgtagcctcagtgtatgatgggaagctgctcataggcactttataccacagagccttgtattgtgaactctaaattgtacttttggcatgaaagtgcgataacttaacaattaattttctatgaattgctaattctgagggaatttaaccagcaacattgacccagaaatgtatggcatgtgtagttaattttattccagtaaggaacggcccttttagttcttagagcacttttaacaaaaaaggaaaatgaacaggttctttaaaatgccaagcaagggacagaaaagaaagctgctttcgaataaagtgaatacattttgcacaaagtaagcctcacctttgccttccaactgccagaacatggattccactgaaatagagtgaattatatttccttaaaatgtgagtgacctcacttctggcactgtgactactatggctgtttagaactactgataacgtattttgatgttttgtacttacatctttgtttaccattaaaaagttggagttatattaaagactaactaaaatccc

SEQ ID NO: 6834 - protein, 268 aa, Homo sapiens; identical to SEQ ID NO: 6826

SEQ ID NO: 6835 - DNA, 1602 bp, Homo sapiens
agggactcggcctaggcggaggacggggcggagcgcggccggcaccatcgagccgggaagatggcaccgcccacggagctgctggccaggccggagcgaggcagcgcgcccggctcccgcgccatggggcggctggtggctgtgggcttgctggggatcgcgctggcgctcctgggcgagaggcttctggcactcagaaatcgacttaaagcctccagagaagtagaatctgtagaccttccacactgccacctgattaaaggaattgaagctggctctgaagatattgacatacttcccaatggtctggctttttttagtgtgggtctaaaattcccaggactccacagctttgcaccagataagcctggaggaatactaatgatggatctaaaagaagaaaaaccaagggcacgggaattaagaatcagtcgtgggtttgatttggcctcattcaatccacatggcatcagcactttcatagacaacgatgacacagtttatctctttgttgtaaaccacccagaattcaagaatacagtggaaatttttaaatttgaagaagcagaaaattctctgttgcatctgaaaacagtcaaacatgagcttcttccaagtgtgaatgacatcacagctgttggaccggcacatttctatgccacaaatgaccactacttctctgatcctttcttaaagtatttagaaacatacttgaacttacactgggcaaatgttgtttactacagtccaaatgaagttaaagtggtatatctatgttgctgacatattggctcatgaaattcatgttttggaaaaacacactaatatgaatttaactcagttgaaggtacttgagctggatacactggtggataatttatctattgatccttcctcgggggacatctgggtaggctgtcatcctaatggccagaagctcttcgtgtatgacccgaacaatcctccctcgtcagaggttctccgcatccagaacattctatctgagaagcctacagtgactacagtttatgccaacaatgggtctgttctccaaggaagttctgtagcctcagtgtatgatgggaagctgctcataggcactttataccacagagccttgtattgtgaactctaaattgtacttttggcatgaaagtgcgataacttaacaattaattttctatgaattgctaattctgagggaatttaaccagcaacattgacccagaaatgtatggcatgtgtagttaattttattccagtaaggaacggcccttttagttcttagagcacttttaacaaaaaaggaaaatgaacaggttctttaaaatgccaagcaagggacagaaaagaaagctgctttcgaataaagtgaatacattttgcacaaagtaagcctcacctttgccttccaactgccagaacatggattccactgaaatagagtgaattatatttccttaaaatgtgagtgacctcacttctggcactgtgactactatggctgtttagaactactgataacgtattttgatgttttgtacttacatctttgtttaccattaaaaagttggagttatattaaagactaactaaaatccc

SEQ ID NO: 6836 - protein, 240 aa, Homo sapiens
MAPPTELLARPERGSAPGSRAMGRLVAVGLLGIALALLGERLLALRNRLKASREVESVDLPHCHLIKGIEAGSEDIDILPNGLAFFSVGLKFPGLHSFAPDKPGGILMMDLKEEKPRARELRISRGFDLASFNPHGISTFIDNDDTVYLFVVNHPEFKNTVEIFKFEEAENSLLHLKTVKHELLPSVNDITAVGPAHFYATNDHYFSDPFLKYLETYLNLHWANVVYYSPNEVKVVYLCC

SEQ ID NO: 6837 - DNA, 1655 bp, Homo sapiens
agggactcggcctaggcggaggacggggcggagcgcggccggcaccatcgagccgggaagatggcaccgcccacggagctgctggccaggccggagcgaggcagcgcgcccggctcccgcgccatggggcggctggtggctgtgggcttgctggggatcgcgctggcgctcctgggcgagaggcttctggcactcagaaatcgacttaaagcctccagagaagtagaatctgtagaccttccacactgccacctgattaaaggaattgaagctggctctgaagatattgacatacttcccaatggtctggctttttttagtgtgggtctaaaattcccaggactccacagctttgcaccagataagcctggaggaatactaatgatggatctaaaagaagaaaaaccaagggcacgggaattaagaatcagtcgtgggtttgatttggcctcattcaatccacatggcatcagcactttcatagacaacgatgacacagtttatctctttgttgtaaaccacccagaattcaagaatacagtggaaatttttaaatttgaagaagcagaaaattctctgttgcatctgaaaacagtcaaacatgagcttcttccaagtgtgaatgacatcacagctgttggaccggcacatttctatgccacaaatgaccactacttctctgatcctttcttaaagtatttagaaacatacttgaacttacactgggcaaatgttgtttactacagtccaaatgaagttaaagtggtagcagaaggatttgattcagcaaatgggatcaatatttcacctgatgataagtatatctatgttgctgacatattggctcatgaaattcatgttttggaaaaacacactaatatgaatttaactcagttgaaggtacttgagctggatacactggtggataatttatctattgatccttcctcgggggacatctgggtaggctgtcatcctaatggccagaagctcttcgtgtatgacccgaacaatcctccctcgtcagaggttctccgcatccagaacattctatctgagaagcctacagtgactacagtttatgccaacaatgggtctgttctccaaggaagttctgtagcctcagtgtatgatgggaagctgctcataggcactttataccacagagccttgtattgtgaactctaaattgtacttttggcatgaaagtgcgataacttaacaattaattttctatgaattgctaattctgagggaatttaaccagcaacattgacccagaaatgtatggcatgtgtagttaattttattccagtaaggaacggcccttttagttcttagagcacttttaacaaaaaaggaaaatgaacaggttctttaaaatgccaagcaagggacagaaaagaaagctgctttcgaataaagtgaatacattttgcacaaagtaagcctcacctttgccttccaactgccagaacatggattccactgaaatagagtgaattatatttccttaaaatgtgagtgacctcacttctggcactgtgactactatggctgtttagaactactgataacgtattttgatgttttgtacttacatctttgtttaccattaaaaagttggagttatattaaagactaactaaaatccc

SEQ ID NO: 6838 - protein, 375 aa, Homo sapiens; identical to SEQ ID NO: 6828

SEQ ID NO: 6839 - DNA, 1273 bp, Homo sapiens
aggcagcgcgcccggctcccgcgccatggggcggctggtggctgtgggcttgctggggatcgcgctggcgctcctgggcgagaggcttctggcactcagaaatcgacttaaagcctccagagaagtagaatctgtagaccttccacactgccacctgattaaaggaattgtgtggtgagtgtcttcttccttccccaaattcagcagaggagatacaagggtatttgatgagggctgcagaacaggtctaaaattcccaggactccacagctttgcaccagataagcctggaggaatactaatgatggatctaaaagaagaaaaaccaagggcacgggaattaagaatcagtcgtgggtttgatttggcctcattcaatccacatggcatcagcactttcatagacaacgatgacacagtttatctctttgttgtaaaccacccagaattcaagaatacagtggaaatttttaaatttgaagaagcagaaaattctctgttgcatctgaaaacagtcaaacatgagcttcttccaagtgtgaatgacatcacagctgttggaccggcacatttctatgccacaaatgaccactacttctctgatcctttcttaaagtatttagaaacatacttgaacttacactgggcaaatgttgtttactacagtccaaatgaagttaaagtggtagcagaaggatttgattcagcaaatgggatcaatatttcacctgatgataagtatatctatgttgctgacatattggctcatgaaattcatgttttggaaaaacacactaatatgaatttaactcagttgaaggtacttgagctggatacactggtggataatttatctattgatccttcctcgggggacatctgggtaggctgtcatcctaatggccagaagctcttcgtgtatgacccgaacaatcctccctcgtcagaggttctccgcatccagaacattctatctgagaagcctacagtgactacagtttatgccaacaatgggtctgttctccaaggaagttctgtagcctcagtgtatgatgggaagctgctcataggcactttataccacagagccttgtattgtgaactctaaattgtacttttggcatgaaagtgcgataacttaacaattaattttctatgaattgctaattctgagggaatttaaccagcaacattgacccagaaatgtatggcatgtgtagttaattttattccagtaaggaacggcccttttagttcttagagcacttttaac

SEQ ID NO: 6840 - protein, 268 aa, Homo sapiens; identical to SEQ ID NO: 6826

SEQ ID NO: 6841 - DNA, 1353 bp, Homo sapiens
agggactcggcctaggcggaggacggggcggagcgcggccggcaccatcgagccgggaagatggcaccgcccacggagctgctggccaggccggagcgaggcagcgcgcccggctcccgcgccatggggcggctggtggctgtgggcttgctggggatcgcgctggcgctcctgggcgagaggcttctggcactcagaaatcgacttaaagcctccagagaagtagaatctgtagaccttccacactgccacctgattaaaggaattgaagctggctctgaagatattgacatacttcccaatggtctggctttttttagtgtgggtctaaaattcccaggactccacagctttgcaccagataagcctggaggaatactaatgatggatctaaaagaagaaaaaccaagggcacgggaattaagaatcagtcgtgggtttgatttggcctcattcaatccacatggcatcagcactttcatagacaacgatgacacagtttatctctttgttgtaaaccacccagaattcaagaatacagtggaaatttttaaatttgaagaagcagaaaattctctgttgcatctgaaaacagtcaaacatgagcttcttccaagtgtgaatgacatcacagctgttggaccggcacatttctatgccacaaatgaccactacttctctgatcctttcttaaagtatttagaaacatacttgaacttacactgggcaaatgttgtttactacagtccaaatgaagttaaagtggtagcagaaggatttgattcagcaaatgggatcaatatttcacctgatgataagtatatctatgttgctgacatattggctcatgaaattcatgttttggaaaaacacactaatatgaatttaactcagttgaaggtacttgagctggatacactggtggataatttatctattgatccttcctcgggggacatctgggtaggctgtcatcctaatggccagaagctcttcgtgtatgacccgaacaatcctccctcgtcagaggttctccgcatccagaacattctatctgagaagcctacagtgactacagtttatgccaacaatgggtctgttctccaaggaagttctgtagcctcagtgtatgatgggaagctgctcataggcactttataccacagagccttgtattgtgaactctaaattgtacttttggcatgaaagtgcgataacttaacaattaattttctatgaattgctaattctgagggaatttaaccagcaacattgacccagaaatgtatggcatgtgtagttaattttattccagtaaggaacggcccttttagttcttagagcacttttaac

SEQ ID NO: 6842 - protein, 375 aa, Homo sapiens; identical to SEQ ID NO: 6828

SEQ ID NO: 6843 - DNA, 2234 bp, Homo sapiens
catgataaaggtgatattttgaatcagtgggagaaggatggactgtatgccaggcactgttccaggcactgggatctagcagtgaacaaatttccacagtcagtatgtagatgtcacttttctccaccctcagctctccctggaatcacctagtccaccaaccttctgattactctctgaagagaataaatccctgatcttcttttcagttattttcaggctttcagtattccacctccccgttattattttttctgttatcttttctctgttttttgagtttttgtggctttatgccactactttaaccacaatctctatttatccttcatgtacagttcccatgttagtccataaaaatacttaagcttttgtatttaacatttttcaccgttttggaaagggtctaaaattcccaggactccacagctttgcaccagataagcctggaggaatactaatgatggatctaaaagaagaaaaaccaagggcacgggaattaagaatcagtcgtgggtttgatttggcctcattcaatccacatggcatcagcactttcatagacaacgatgacacagtttatctctttgttgtaaaccacccagaattcaagaatacagtggaaatttttaaatttgaagaagcagaaaattctctgttgcatctgaaaacagtcaaacatgagcttcttccaagtgtgaatgacatcacagctgttggaccggcacatttctatgccacaaatgaccactacttctctgatcctttcttaaagtatttagaaacatacttgaacttacactgggcaaatgttgtttactacagtccaaatgaagttaaagtggtagcagaaggatttgattcagcaaatgggatcaatatttcacctgatgataagtatggccccttatagaatatcttcatttttcttcagttgtggtgctggccaaattctttactttgctttctttgtcaatgtgaaaatagttttcttgacatttatggtatattatacatataatatatagatacactatatatataattatatatgttttgtatatatatttacatatacttagtcacatgtatttatatgcaaatacaataccatatttaagtaaactatataatacagtaatatatatgtatttatatataatatataaagtttggaatacatcattgtcaaatttaattttataaatataaattttaaagtgtgatcatactgatgcatacatattgaagtatcaggtatttccttttaaataaatgtattatttttattggctatacattattccattataaggatgatcttaaactaatttaaccaattctctattgatggatatgtgtataggggtggggagttctacataaaaaatattttatacttcttatttaccatggaattttaaacaagtattttttttaaagaaaaagtccctaggagagtgttttttttttgttttgttttttggagatggagtctcactccgtcgcccaggctggagtgcaatggcatgatctcagctcacctcaacctccgcctcctgggttcaagtgattctcctgcctcagcctcccaagtagctgggattataggcatgcgccaccatgcttggctaattttgtatttttagtagagatgaggtttctccatgttggtcaggctagtcttgaacctccaacctcaggtgatccgcccacctcagcctcccgaagtgctgggattacaggcatatgccaccacacctggctctaagagagtattataacataatggttaaacttgcagattttggactcatacaggcctgggttcaaatcccacccagggcactggctaaatggttctatgagctacttttctgtagaacagacccctagaaatagaactatttgctcaaacagtgtgattcttttaaatgttaactttaatagatattgccaaattgtcctccagaattatctcattatttttatatgcacaaccacaacctataagagaagatattaaattcttgatagctttcttatctactgcctcagcacactgaaaaatttaaactactacaaatacaacataaaataaatttggcactccttgacaactaaatgcccttatttttgtaatccaatttctcctcctttcttgttgactatagaaaaagaatgtagaatcatttaatttaaattgtctctaactgacctgatccaacctctgc

SEQ ID NO: 6844 - protein, 150 aa, Homo sapiens [sequence omitted]

SEQ ID NO: 6845 - DNA, 2078 bp, Homo sapiens
agctgctggccaggccggagcgaggcagcgcgcccggctcccgcgccatggggcggctggtggctgtgggcttgctggggatcgcgctggcgctcctgggcgagaggcttctggcactcagaagctggctctgaagatattgacatacttcccaatggtctggctttttttagtgtggtgagtgtcttcttccttccccaaattcagcagaggagatacaagggtatttgatgagggctgcagaacaggtctaaaattcccaggactccacagctttgcaccagataagcctggaggaatactaatgatggatctaaaagaagaaaaaccaagggcacgggaattaagaatcagtcgtgggtttgatttggcctcattcaatccacatggcatcagcactttcatagacaacgatgacacagtttatctctttgttgtaaaccacccagaattcaagaatacagtggaaatttttaaatttgaagaagcagaaaattctctgttgcatctgaaaacagtcaaacatgagcttcttccaagtgtgaatgacatcacagctgttggaccggcacatttctatgccacaaatgaccactacttctctgatcctttcttaaagtatttagaaacatacttgaacttacactgggcaaatgttgtttactacagtccaaatgaagttaaagtggtagcagaaggatttgattcagcaaatgggatcaatatttcacctgatgataagtatggccccttatagaatatcttcatttttcttcagttgtggtgctggccaaattctttactttgctttctttgtcaatgtgaaaatagttttcttgacatttatggtatattatacatataatatatagatacactatatatataattatatatgttttgtatatatatttacatatacttagtcacatgtatttatatgcaaatacaataccatatttaagtaaactatataatacagtaatatatatgtatttatatataatatataaagtttggaatacatcattgtcaaatttaattttataaatataaattttaaagtgtgatcatactgatgcatacatattgaagtatcaggtatttccttttaaataaatgtattatttttattggctatacattattccattataaggatgatcttaaactaatttaaccaattctctattgatggatatgtgtataggggtggggagttctacataaaaaatattttatacttcttatttaccatggaattttaaacaagtattttttttaaagaaaaagtccctaggagagtgttttttttttgttttgttttttggagatggagtctcactccgtcgcccaggctggagtgcaatggcatgatctcagctcacctcaacctccgcctcctgggttcaagtgattctcctgcctcagcctcccaagtagctgggattataggcatgcgccaccatgcttggctaattttgtatttttagtagagatgaggtttctccatgttggtcaggctagtcttgaacctccaacctcaggtgatccgcccacctcagcctcccgaagtgctgggattacaggcatatgccaccacacctggctctaagagagtattataacataatggttaaacttgcagattttggactcatacaggcctgggttcaaatcccacccagggcactggctaaatggttctatgagctacttttctgtagaacagacccctagaaatagaactatttgctcaaacagtgtgattcttttaaatgttaactttaatagatattgccaaattgtcctccagaattatctcattatttttatatgcacaaccacaacctataagagaagatattaaattcttgatagctttcttatctactgcctcagcacactgaaaaatttaaactactacaaatacaacataaaataaatttggcactccttgacaactaaatgcccttatttttgtaatccaatttctcctcctttcttgttgactatagaaaaagaatgtagaatcatttaatttaaattgtctctaactgacctgatccaacctctgc

SEQ ID NO: 6846 - protein, 150 aa, Homo sapiens [sequence omitted]

SEQ ID NO: 6847 - DNA, 2073 bp, Homo sapiens
atcgagccgggaagatggcaccgcccacggagctgctggccaggccggagcgaggcagcgcgcccggctcccgcgccatggggcggctggtggctgtgggcttgctggggatcgcgctggcgctcctgggcgagaggcttctggcactcagaaatcgacttaaagcctccagagaagtagaatctgtagaccttccacactgccacctgattaaaggaattgaagctggctctgaagatattgacatacttcccaatggtctggctttttttagtgtgggtctaaaattcccaggactccacagctttgcaccagataagcctggaggaatactaatgatggatctaaaagaagaaaaaccaagggcacgggaattaagaatcagtcgtgggtttgatttggcctcattcaatccacatggcatcagcactttcatagacaacgaattcaagaatacagtggaaatttttaaatttgaagaagcagaaaattctctgttgcatctgaaaacagtcaaacatgagcttcttccaagtgtgaatgacatcacagctgttggaccggcacatttctatgccacaaatgaccactacttctctgatcctttcttaaagtatttagaaacatacttgaacttacactgggcaaatgttgtttactacagtccaaatgaagttaaagtggtagcagaaggatttgattcagcaaatgggatcaatatttcacctgatgataagtatggccccttatagaatatcttcatttttcttcagttgtggtgctggccaaattctttactttgctttctttgtcaatgtgaaaatagttttcttgacatttatggtatattatacatataatatatagatacactatatatataattatatatgttttgtatatatatttacatatacttagtcacatgtatttatatgcaaatacaataccatatttaagtaaactatataatacagtaatatatatgtatttatatataatatataaagtttggaatacatcattgtcaaatttaattttataaatataaattttaaagtgtgatcatactgatgcatacatattgaagtatcaggtatttccttttaaataaatgtattatttttattggctatacattattccattataaggatgatcttaaactaatttaaccaattctctattgatggatatgtgtataggggtggggagttctacataaaaaatattttatacttcttatttaccatggaattttaaacaagtattttttttaaagaaaaagtccctaggagagtgttttttttttgttttgttttttggagatggagtctcactccgtcgcccaggctggagtgcaatggcatgatctcagctcacctcaacctccgcctcctgggttcaagtgattctcctgcctcagcctcccaagtagctgggattataggcatgcgccaccatgcttggctaattttgtatttttagtagagatgaggtttctccatgttggtcaggctagtcttgaacctccaacctcaggtgatccgcccacctcagcctcccgaagtgctgggattacaggcatatgccaccacacctggctctaagagagtattataacataatggttaaacttgcagattttggactcatacaggcctgggttcaaatcccacccagggcactggctaaatggttctatgagctacttttctgtagaacagacccctagaaatagaactatttgctcaaacagtgtgattcttttaaatgttaactttaatagatattgccaaattgtcctccagaattatctcattatttttatatgcacaaccacaacctataagagaagatattaaattcttgatagctttcttatctactgcctcagcacactgaaaaatttaaactactacaaatacaacataaaataaatttggcactccttgacaactaaatgcccttatttttgtaatccaatttctcctcctttcttgttgactatagaaaaagaatgtagaatcatttaatttaaattgtctctaactgacctgatccaacctctgc

SEQ ID NO: 6848 - protein, 245 aa, Homo sapiens
MAPPTELLARPERGSAPGSRAMGRLVAVGLLGIALALLGERLLALRNRLKASREVESVDLPHCHLIKGIEAGSEDIDILPNGLAFFSVGLKFPGLHSFAPDKPGGILMMDLKEEKPRARELRISRGFDLASFNPHGISTFIDNEFKNTVEIFKFEEAENSLLHLKTVKHELLPSVNDITAVGPAHFYATNDHYFSDPFLKYLETYLNLHWANVVYYSPNEVKVVAEGFDSANGINISPDDKYGPL

SEQ ID NO: 6849 - DNA, 2270 bp, Homo sapiens
aagaccagggccaggcccagggcggagcctccgcggccccgacgcagggactcggcctaggcggaggacggggcggagcgcggccggcaccatcgagccgggaagatggcaccgcccacggagctgctggccaggccggagcgaggcagcgcgcccggctcccgcgccatggggcggctggtggctgtgggcttgctggggatcgcgctggcgctcctgggcgagaggcttctggcactcagaaatcgacttaaagcctccagagaagtagaatctgtagaccttccacactgccacctgattaaaggaattgaagctggctctgaagatattgacatacttcccaatggtctggctttttttagtgtggtgagtgtcttcttccttccccaaattcagcagaggagatacaagggtatttgatgagggctgcagaacaggtctaaaattcccaggactccacagctttgcaccagataagcctggaggaatactaatgatggatctaaaagaagaaaaaccaagggcacgggaattaagaatcagtcgtgggtttgatttggcctcattcaatccacatggcatcagcactttcatagacaacgatgacacagtttatctctttgttgtaaaccacccagaattcaagaatacagtggaaatttttaaatttgaagaagcagaaaattctctgttgcatctgaaaacagtcaaacatgagcttcttccaagtgtgaatgacatcacagctgttggaccggcacatttctatgccacaaatgaccactacttctctgatcctttcttaaagtatttagaaacatacttgaacttacactgggcaaatgttgtttactacagtccaaatgaagttaaagtggtagcagaaggatttgattcagcaaatgggatcaatatttcacctgatgataagtatggccccttatagaatatcttcatttttcttcagttgtggtgctggccaaattctttactttgctttctttgtcaatgtgaaaatagttttcttgacatttatggtatattatacatataatatatagatacactatatatataattatatatgttttgtatatatatttacatatacttagtcacatgtatttatatgcaaatacaataccatatttaagtaaactatataatacagtaatatatatgtatttatatataatatataaagtttggaatacatcattgtcaaatttaattttataaatataaattttaaagtgtgatcatactgatgcatacatattgaagtatcaggtatttccttttaaataaatgtattatttttattggctatacattattccattataaggatgatcttaaactaatttaaccaattctctattgatggatatgtgtataggggtggggagttctacataaaaaatattttatacttcttatttaccatggaattttaaacaagtattttttttaaagaaaaagtccctaggagagtgttttttttttgttttgttttttggagatggagtctcactccgtcgcccaggctggagtgcaatggcatgatctcagctcacctcaacctccgcctcctgggttcaagtgattctcctgcctcagcctcccaagtagctgggattataggcatgcgccaccatgcttggctaattttgtatttttagtagagatgaggtttctccatgttggtcaggctagtcttgaacctccaacctcaggtgatccgcccacctcagcctcccgaagtgctgggattacaggcatatgccaccacacctggctctaagagagtattataacataatggttaaacttgcagattttggactcatacaggcctgggttcaaatcccacccagggcactggctaaatggttctatgagctacttttctgtagaacagacccctagaaatagaactatttgctcaaacagtgtgattcttttaaatgttaactttaatagatattgccaaattgtcctccagaattatctcattatttttatatgcacaaccacaacctataagagaagatattaaattcttgatagctttcttatctactgcctcagcacactgaaaaatttaaactactacaaatacaacataaaataaatttggcactccttgacaactaaatgcccttatttttgtaatccaatttctcctcctttcttgttgactatagaaaaagaatgtagaatcatttaatttaaattgtctctaactgacctgatccaacctctgc

SEQ ID NO: 6850 - protein, 150 aa, Homo sapiens [sequence omitted]

SEQ ID NO: 6851 - DNA, 584 bp, Homo sapiens
ttttttttttttttttttgtagagacagagtcttgctatgttgcccaggctggtctcaaactgctggcctcaagcagtcctcccacgtcagcctcccaaagtgctggaattataggcatgagccaccaggcctgacctaaagctgtagtaatttaaaaagtgttatattggcacaggaatagacatgagacattaaaataacaaaacagagagtccctaaatagaccaatatgtaaatgtcagagatctagcacatgataaaggtgatattttgaatcagtgggagaaggatggactgtatgccaggcactgttccaggcactgggatctagcagtgaacaaatttccacagtcagtatgtagatgtcacttttctccaccctcagctctccctggaatcacctagtccaccaaccttctgattactctctgaagagaataaatccctgatcttcttttcagttattttcaggtaatgatggatctaaaagaagaaaaaccaagggcacgggaattaagaatcagtcgtgggtttgatttggcctcattcaatccacatggcatcagcactttcatagacaacg

SEQ ID NO: 6852 - protein, 35 aa, Homo sapiens
MMDLKEEKPRARELRISRGFDLASFNPHGISTFID

SEQ ID NO: 6853 - DNA, 579 bp, Homo sapiens
ggctcccgcgccatggggcggctggtggctgtgggcttgctggggatcgcgctggcgctcctgggcgagaggcttctggcactcagaaatcgacttaaagcctccagagaagtagaatctgtagaccttccacactgccacctgattaaaggaattgaagctggctctgaagatattgacatacttcccaatggtctggctttttttagtgtggtgagtgtcttcttccttccccaaattcagcagaggagatacaagggtatttgatgagggctgcagaacagtaagttgcttttaaaattcattttccaaaatgcattctgaagaaaagagaggtcaaacaagatcttggaaaacttcctccagcttttctaaatgtagagatgaagactctttgcccattgagatagtgttctttatttccccattgcattgcactaaaatattccaatgcaatctgtgttttgttttgttttttcttttttaattttttttattttttgagacggagtcttgttctggttgccccggctggagtgcagtggcatgatctcagcttactgcaacctccgcctcccg

SEQ ID NO: 6854 - protein, 84 aa, Homo sapiens
MGRLVAVGLLGIALALLGERLLALRNRLKASREVESVDLPHCHLIKGIEAGSEDIDILPNGLAFFSVVSVFFLPQIQQRRYKGI

SEQ ID NO: 6855 - DNA, 680 bp, Homo sapiens
aacacagattgcattggaatattttagtgcaatgcaatggggaaataaagaacactatctcaatgggcaaagagtcttcatctctacatttagaaaagctggaggaagttttccaagatcttgtttgacctctcttttcttcagaatgcattttggaaaatgaattttaaaagcaacttactgttctgcagccctcatcaaatacccttgtatctcctctgctgaatttggggaaggaagaagacactcaccacactaaaaaaagccagaccattgggaagtatgtcaatatcttcagagccagcttctagtgaagactattggaggctttggaaaagttaagcaattgctcaaggtcacaaactgggaagctgggactcaaagcctttgctctgacttaaaggcaaacagaaaatattcaagttagaatttaatgaatttcctctctcagaaacatcccctgattcctctgtaaagccacttcacttgtaaattcaattgtggtcaattccatatgttgtctttttcccctgaagttttgcttccaagcctctcaccaacatctttaccaatgaatatcctgcacttttctttaaaacctctttcaaaaccttttctgtctttttcgtatttcaacttattttatttcaaaacaaatttattaaatctttacttttttt

SEQ ID NO: 6856 - protein, 54 aa, Homo sapiens
MLSFSPEVLLPSLSPTSLPMNILHFSLKPLSKPFLSFSYFNLFYFKTNLLNLYF

SEQ ID NO: 6857 - DNA, 743 bp, Homo sapiens
ccatcgagccgggaagatggcaccgcccacggagctgctggccaggccggagcgaggcagcgcgcccggctcccgcgccatggggcggctggtggctgtgggcttgctggggatcgcgctggcgctcctgggcgagaggcttctggcactcagaaatcgacttaaagcctccagagaagtagaatctgtagaccttccacactgccacctgattaaaggaattgtcagagcaaaggctttgagtcccagcttcccagtttgtgaccttgagcaattgcttaacttttccaaagcctccaatagtcttcactctaaaataaaagataatcatatgagatattgtatgcagggtatttacaaggagcctggtacttggtgtacctaatgtatgttagttattattattaaattagaggagcaaaaatttctctagcattgactgctcctgacataatcacaccgaagaggggatacacgatgataaaaccttcctgcagtagtggctatagaaatgatgacggggagaagatctggaaaatattccaaagaaggctacagatagatacattttttccattggaattaggcaatggagttaaacagaagttacaatatggttgaaataaatgtatttttttaaaaaaagatttctctttccttaattattaaaaaatatacaattttgtagaaaattttaaacaaagtataaagaaaaaaataaaaatcattcataatcctatcaa

SEQ ID NO: 6858 - protein, 122 aa, Homo sapiens
MAPPTELLARPERGSAPGSRAMGRLVAVGLLGIALALLGERLLALRNRLKASREVESVDLPHCHLIKGIVRAKALSPSFPVCDLEQLLNFSKASNSLHSKIKDNHMRYCMQGIYKEPGTWCT

SEQ ID NO: 6859 - DNA, 1146 bp, Homo sapiens
agtctttctctgttgtccaggctggagtccagtggctcaatcttggctcactgcaacctctacctctggggttcaagcaattctcctgactcagcctcccaagaggctgaggagggaggactgcttgtgcctaggtgtttgagattgcagtgagctttgatgtaccactgtactctggcttgggcggcagagcaagaccttgtgtcaaaataaaaaacaaagaaaaacaaaaaacaaacaaacaaaaacctgtaaataaactatcaggcattctgtcaataagttttatttactttttcttttttttttagatttgcagctataactttaaaaccttaagattagtgagaagggggaatatttgactgttgagaaaacttccaacttgcagaaaaactggtggcttacacattagtgacaacataataagcttgtgaattttggtggtcttgcctttgaaatggagagcaggacagatcatatacaaagtcatccaactcatgaatgttctgtagagcacaatgggcattacctaacatgaaaattaaggtcaacatgtccatttcctacccataagcgttctttcctcaaatctcactcccatctcagccaccacacgcttcctctttgcactgctttatcagtagatgaaactacaaccatgggacagtggagctgtggcacaaactctggtagcacctttgacttctccctcatccctggggttccagagtttgggtccctgttatcctctctgacctactgcaataccttaaccagttaccccatgtctgctctctattctagtagttctcgaccttgactgctcattagaattatcaggaatgtttttaaaaataaaaaatgccactgctactgtcagccactgttcttacattatgcacttccttatttatctatttacctgggaaccctgaagccagcttgccaaacaatacattattccatatcacattttaattataacgaaaaatctctggtaggtagacaccatagtttataaattaccaactcaaattttgttttttatttatttatttatttatttattcattttgtagaggtgggatcttgctatgttgcccaggcctgtcactaactcctgggctcaagcaatcttctggc

SEQ ID NO: 6860 - protein, 53 aa, Homo sapiens
MGQWSCGTNSGSTFDFSLIPGVPEFGSLLSSLTYCNTLTSYPMSALYSSSSRP

SEQ ID NO: 6861 - DNA, 742 bp, Homo sapiens
gtgaaatgaatagtctgtcaaaattcaggtgggccagtgcttggttactgcttatgtcaatccagccattctgacatccaccacctgtaaagagagtcgctgaaacggaacaatctagcatcgtgccagcgaccaagattctccggaaacactcagggttactggttgcctagctataaattgaagtcttcctgggccacaggcctccatctctctgtcttgtttggccatgtggaatgtcttctggtgctactggaccacaatgctacaatcaactgtagacccaatgggaaaacccctcttcacgtggcttgtgaaatggccaatgtggattgtgttaagatcctctgtgatcgtggggcaaagctcaattgctactccttaagtggacacacagctttgcacttttgtacaactccaagttccattctctgtgccaagcaattggtttggagaggtaagcctttctgggtggccaacattgttgtctgcttgtacactcatggtttcaagactttgtgacccctacctaccccagatgatgtagtaagcataaagatgcaattatgcctagtacagaaggccctaaaaaatacatagttctgttgattcaggtaattcaatgatgatcacattaaaatcttattatctaatagcaggaagttcattcatttactcatttacttaacaaatatttatttagctcctattatgcatcaggtaatgcactaagtcaatgaaa

SEQ ID NO: 6862 - protein, 67 aa, Homo sapiens
MANVDCVKILCDRGAKLNCYSLSGHTALHFCTTPSSILCAKQLVWRGKPFWVANIVVCLYTHGFKTL

SEQ ID NO: 6863 - DNA, 1519 bp, Homo sapiens
tctctcgataaatcacaacaaagcttccagagggagaggaaggatggacggcaccactgcccctgtcactaaatctggagctgccaagttagttaagagaaatttccttgaggcgctaaagtccaatgacttcggaaaattgaaggctattttgatccaaaggcaaatagatgtggacactgtttttgaagtcgaagatgagaatatggttttggcatcttataaacaaggttactggttgcctagctataaattgaagtcttcctgggccacaggcctccatctctctgtcttgtttggccatgtggaatgtcttctggtgctactggaccacaatgctacaatcaactgtagacccaatgggaaaacccctcttcacgtggcttgtgaaatggccaatgtggattgtgttaagatcctctgtgatcgtggggcaaagctcaattgctactccttaagtggacacacagctttgcacttttgtacaactccaagttccattctctgtgccaagcaattggtttggagaggggcgaatgtgaacatgaagaccaacaaccaagatgaggagacgcccttgcacacggctgcccacttcggcctttcggagctggtggccttctacgtggaacacggggccatagtggacagcgtgaatgcccacatggagacccccctggccatcgccgcctactgggccctccgctttaaggagcaggagtacagcacggagcaccacctggtctgccgcatgctgcttgactacaaagccgaagtcaatgcccgagatgacgactttaaatctcccctccacaaggcagcctggaactgtgaccacgtgctcatgcacatgatgctggaagctggcgccgaagccaatctcatggatatcaacggctgtgctgccatccagtacgtgctgaaggtcacctccgtgcgccctgctgcccagcctgagatctgctaccagctcctgttgaaccatggggctgcccgaatataccctccacagttccataaggtgaggctctgcccagtggtcagcaggttgaggaagattcaaatggcagccttgtctgaaatctccaagtaactcaagcttgcttgaggcttgagtcctgggctaactacctctgatcctctttgaccttccattacatacctaatcctagctgtctcctcatctcatcctagtctaggtttgcttgaaattgggtgtgagagctagaatgagaaaaagagtagcaaataatttgttttgccttgtgtgaacaccagtgcactggtggcttcctgagggactgaggtaagtctgccagaaaggtgaatagtgttagacaggcatacatttgccatcttttaaacagaatgactgatctaaagatgactcagcctgctttgaaattagcttgtagccatgaaagggccacccgattttccagtttaatgaaagctaacgtttattaagtactaaaattatatttattatgtataataaataagcacactgttataagca

SEQ ID NO: 6864 - protein, 349 aa, Homo sapiens; identical to SEQ ID NO: 905

SEQ ID NO: 6865 - DNA, 1345 bp, Homo sapiens
tctctcgataaatcacaacaaagcttccagagggagaggaaggatggacggcaccactgcccctgtcactaaatctggagctgccaagttagttaagagaaatttccttgaggcgctaaagtccaatgacttcggaaaattgaaggctattttgatccaaaggcaaatagatgtggacactgtttttgaagtcgaagatgagaatatggttttggcatcttataaacaaggttactggttgcctagctataaattgaagtcttcctgggccacaggcctccatctctctgtcttgtttggccatgtggaatgtcttctggtgctactggaccacaatgctacaatcaactgtagacccaatgggaaaacccctcttcacgtggcttgtgaaatggccaatgtggattgtgttaagatcctctgtgatcgtggggcaaagctcaattgctactccttaagtggacacacagctttgcacttttgtacaactccaagttccattctctgtgccaagcaattggtttggagaggggcgaatgtgaacatgaagaccaacaaccaagatgaggagacgcccttgcacacggctgcccacttcggcctttcggagctggtggccttctacgtggaacacggggccatagtggacagcgtgaatgcccacatggagacccccctggccatcgccgcctactgggccctccgctttaaggagcaggagtacagcacggagcaccacctggtctgccgcatgctgcttgactacaaagccgaagtcaatgcccgagatgacgactttaaatctcccctccacaaggcagcctggaactgtgaccacgtgctcatgcacatgatgctggaagctggcgccgaagccaatctcatggatatcaacggctgtgctgccatccagtacgtgctgaaggtcacctccgtgcgccctgctgcccagcctgagatctgctaccagctcctgttgaaccatggggctgcccgaatataccctccacagttccataaggtgatacaggcctgccattcttgtcctaaagcaattgaagttgtagtcaatgcctatgaacacatcagatggaacacaaagtggagaagagctatccccgatgatgacttggagaaatactgggatttttaccactctctctttactgtgtgctgtaactctccaaggactctcatgcacttatcgagatgtgccattagaagaacattacacaacagatgccatagagcaattcctttgctttccctcccattgtcattgaaaaagtacttgcttttagagccagagggaattatttattaagccttatgagacagcagttcc

SEQ ID NO: 6866 - protein, 426 aa, Homo sapiens; identical to SEQ ID NO: 903

SEQ ID NO: 6867 - DNA, 694 bp, Homo sapiens
tccaatgacttcggaaaattgaaggctattttgatccaaaggcaaatagatgtggacactgtttttgaagtcgaagatgagaatatggttttggcatcttataaacaaggttactggttgcctagctataaattgaagtcttcctgggccacaggcctccatctctctgtcttgtttggccatgtggaatgtcttctggtgctactggaccacaatgctacaatcaactgtagacccaatgggaaaacccctcttcacgtggcttgtgaaatggccaatgtggattgtgttaagatcctctgtgatcgtggggcaaagctcaattgctactccttaagtggacacacagctttgcacttttgtacaactccaagttccattctctgtgccaagcaattggtttggagaggtaagcctttctgggtggccaacattgttgtctgcttgtacactcatggtttcaagactttgtgacccctacctaccccagatgatgtagtaagcataaagatgcaattatgcctagtacagaaggccctaaaaaatacatagttctgttgattcaggtaattcaatgatgatcacattaaaatcttattatctaatagcaggaagttcattcatttactcatttacttaacaaatatttatttagctcctattatgcatcaggtaatgcactaagtcaatgaaa

SEQ ID NO: 6868 - protein, 129 aa, Homo sapiens
MVLASYKQGYWLPSYKLKSSWATGLHLSVLFGHVECLLVLLDHNATINCRPNGKTPLHVACEMANVDCVKILCDRGAKLNCYSLSGHTALHFCTTPSSILCAKQLVWRGKPFWVANIVVCLYTHGFKTL

SEQ ID NO: 6869 - DNA, 3509 bp, Homo sapiens
atgatattagatattaatcattattttataaagagaagacttaatgaatacatctgatgaatgcattggttataaggctaatagttttacatataagctagaaacaaaatgagtctgtttgtgaaattatctcctctactctagtggaagaatctgtagtgagattactaataaaggactaatgttttatcatttgatttgttcagatgggtaatgcaaaaaaaactttagccttctgtgaagtaaccttaggagtataagtgaatgaaacgtatttgaacttttactaaccataaatattgtggcttagctttgtagatacactcatcaaagttcgaaatagacaccataatgtagtccctacaatggcacaaggaatcatagagtataaagatgcctgtacagttgacccagtcaccaatcaaaatcttcaatatttcttggatcgattttacatgaaccgtatttctactcggatgctgatgaaccagcacagtaagttagctcatcatgatcatggtatatagacatgggtgtagaatataagccatactataactagatgtctcactaatcagcgggtcacattctcagtgatagtactaatcattatcctgaattttataacaatttttttttgtttttatttttcaacagttcttatatttagtgactcacagacaggaaacccaagccacattggaagcattgatcctaactgtgatgtggtagcagtggtccaagatgcctttgagtgttcaaggatgctctgtgatcagtattatttatcatctccagaattaaagcttacacaagtgaatggaaaatttccagaccaaccaattcacatcgtgtatgttccttctcacctccatcatatgctctttgaactatttaagaatgcaatgcgggcaacagttgaacaccaggaaaatcagccttcccttacaccaatagaggttattgttgtcttgggaaaagaagaccttaccattaagatttcagacagaggaggtggtgttcccctgagaattattgaccgcctctttagttatacatactccactgcaccaacgcctgtgatggataattcccggaatgctcctttggctggttttggttacggcttgccaatttctcgtctgtatgcaaagtactttcaaggagatctgaatctctactctttatcaggatatggaacagatgctatcatctacttaaaggctttgtcttctgagtctatagaaaaacttccagtttttaacaagtcagccttcaaacattatcagatgagctctgaggctgatgactggtgtatcccaagcagggaaccaaagaacctggcaaaagaagtggccatgtgaagagggacactcaggacactttacgggatcaaagtgggtctacaccagtgctgcttcctgaatgtttgtgtgtgaacccttgtttcctccaaaacaaacgacagcaacgaaaactccttaatcagaacactgatccaatgaggaatggagcttgtttctgtgacccaggagaacttagtgcaagactacaggagttaacagatggccagctccttattttttaatgtagaataactcctgagtttatatcaaatcctgaagaaataagcctcagttttccatctgtttttgataagaataagaaagggagtgagtgtgaagatggtggttagcagtttcactaagactgatattttaggcctcttgttcacatcaaaagatattggtgtcagaataccagcattttcctgccatgcaaaggattaaaacttagtttacactatgtggttacaaatatatgtcaatgtacattttgaacatatttatgtgctatggaaggaaatgctggtgactaaaataaggtttactctgaaagaggaggaattttattcaaagcattcaaacattttattcaagtgtttcaaaattcaaagcattgtattcaaagttgcagtgaaggcatcaacttatgtaaaaactcagaaggaaggctcctctgataaaaacacagctcctttattatgctgcttttcttgttcactttacacactaagtaaacacttattgtcaggtgcctagtcttgagtgaattgttagatgtgcactgaactcgggatgttggggattggagagagagaattgccaaagtaacagcaaaaatatctcttactttgctttgtttataaataaattagtagattggaaaaactagtgttagggaaagaaatcacatgttcagagcctaattcagtaggaagggcttttctctaccctgaaatgaaggtaatccaaaggcatccattttctaggcttaaaagatatatttttgatatatttaattatattctctacactccagcattaatatgtctgtttaaaaattactaattctcaaatggctcaagaacattagaatttaagtaccttttagagtaattattttaagcaaatagcctggacgtaagagattctcatgccagcatgctttcatttgtcagttgttgtgactgagagataatgaatgacacctgaaatgcatatggtatttttgggagagttaaggtataatttgaaggttggcagaccagttgcgctgattactcttagagaagaagaaatggaaaaatgaaagaaggcaggaaggaaagaaaggatataggaagagagggaagcagaaggcaggcatttttctattttccccacaaattatttcaaaaaaaatctgtattttctgggatatgtcattggcaagaggaagaactggtgttttgaaagcagtatggattctttaaatgcctctcactcttacaagatagtaggctttgagataataaacttacccgtgtcaattaacatttaaactggcatatagaaaaaaaggaggatttttctgcattgtaaaataatcagtatggtttatatgttgaatttgacatttgtgtgtaatttcatggtggcctagtgttgtggtgcttctggtaatggtaatagaagctcaactatttttttgtggatttcagtttttatcatcagaagtcctagacagtgacatttcttaatggtgggagtccagctcatgcatttctgattatacaaaacagtttgcagtaggttatttgtcatttcagttttttactgaaatttgagctaaacatttttacatgtaaatacttgtatttaccaaagatttaaatcagttgattaattaattaactcaaatactgtgaactatctctaaaacactagaaaaaagaaatgttagtatctcaattacaccaactgtgcaaatgaactttgataaaatagaaataatctacattggcctttgtgaaatctggggaagagctttaggattctagtagatggatactgaatactcaggcccacttaaattattaatgtatacattgtgtttttgtctttatgctatgtacagagaaatgtgataattttttataataaatattttttatgatgataaaagac

SEQ ID NO: 6870 - protein, 199 aa, Homo sapiens
MLCDQYYLSSPELKLTQVNGKFPDQPIHIVYVPSHLHHMLFELFKNAMRATVEHQENQPSLTPIEVIVVLGKEDLTIKISDRGGGVPLRIIDRLFSYTYSTAPTPVMDNSRNAPLAGFGYGLPISRLYAKYFQGDLNLYSLSGYGTDAIIYLKALSSESIEKLPVFNKSAFKHYQMSSEADDWCIPSREPKNLAKEVAM

SEQ ID NO: 6871 - DNA, 3662 bp, Homo sapiens
gactcggggggagagtgcggggagacaaataaaacctcgggcggcggcggctggtgggaagacttgaacttgaatctcgaaccactgcatctccgactctgcccagactcttcactccgcggcaccctcaaaccccagcccaggccggggcgcacaagccagccagcgcacctgcagtcctcgcccggacgcgccgcgccccctcggaaccaggctctgctccgagcagccttcgcccctcaagccagccacagtccccgccaggccgggtgggcgtcaagatgaaggcggcccgcttcgtgctgcgcagcgctggctcgctcaacggcgccggcctggtgccccgagaggtggagcatttctcgcgctacagcccgtccccgctgtccatgaagcagctactggactttggttcagaaaatgcatgtgaaagaacttcttttgcatttttgcgacaagaattgcctgtgagactcgccaacattctgaaggaaattgatatcctcccgacccaattagtaaatacctcttcagtgcaattggttaaaagctggtatatacagagcctgatggatttggtggaattccatgagaaaagcccagatgaccagaaagcattatcagactttgtagatacactcatcaaagttcgaaatagacaccataatgtagtccctacaatggcacaaggaatcatagagtataaagatgcctgtacagttgacccagtcaccaatcaaaatcttcaatatttcttggatcgattttacatgaaccgtatttctactcggatgctgatgaaccagcacattcttatatttagtgactcacagacaggaaacccaagccacattggaagcattgatcctaactgtgatgtggtagcagtggtccaagatgcctttgagtgttcaaggatgctctgtgatcagtattatttatcatctccagaattaaagcttacacaagtgaatggaaaatttccagaccaaccaattcacatcgtgtatgttccttctcacctccatcatatgctctttgaactatttaagaatgcaatgcgggcaacagttgaacaccaggaaaatcagccttcccttacaccaatagaggttattgttgtcttgggaaaagaagaccttaccattaagatttcagacagaggaggtggtgttcccctgagaattattgaccgcctctttagttatacatactccactgcaccaacgcctgtgatggataattcccggaatgctcctttggctggttttggttacggcttgccaatttctcgtctgtatgcaaagtactttcaaggagatctgaatctctactctttatcaggatatggaacagatgctatcatctacttaaaggctttgtcttctgagtctatagaaaaacttccagtttttaacaagtcagccttcaaacattatcagatgagctctgaggctgatgactggtgtatcccaagcagggaaccaaagaacctggcaaaagaagtggccatgtgaagagggacactcaggacactttacgggatcaaagtgggtctacaccagtgctgcttcctgaatgtttgtgtgtgaacccttgtttcctccaaaacaaacgacagcaacgaaaactccttaatcagaacactgatccaatgaggaatggagcttgtttctgtgacccaggagaacttagtgcaagactacaggagttaacagatggccagctccttattttttaatgtagaataactcctgagtttatatcaaatcctgaagaaataagcctcagttttccatctgtttttgataagaataagaaagggagtgagtgtgaagatggtggttagcagtttcactaagactgatattttaggcctcttgttcacatcaaaagatattggtgtcagaataccagcattttcctgccatgcaaaggattaaaacttagtttacactatgtggttacaaatatatgtcaatgtacattttgaacatatttatgtgctatggaaggaaatgctggtgactaaaataaggtttactctgaaagaggaggaattttattcaaagcattcaaacattttattcaagtgtttcaaaattcaaagcattgtattcaaagttgcagtgaaggcatcaacttatgtaaaaactcagaaggaaggctcctctgataaaaacacagctcctttattatgctgcttttcttgttcactttacacactaagtaaacacttattgtcaggtgcctagtcttgagtgaattgttagatgtgcactgaactcgggatgttggggattggagagagagaattgccaaagtaacagcaaaaatatctcttactttgctttgtttataaataaattagtagattggaaaaactagtgttagggaaagaaatcacatgttcagagcctaattcagtaggaagggcttttctctaccctgaaatgaaggtaatccaaaggcatccattttctaggcttaaaagatatatttttgatatatttaattatattctctacactccagcattaatatgtctgtttaaaaattactaattctcaaatggctcaagaacattagaatttaagtaccttttagagtaattattttaagcaaatagcctggacgtaagagattctcatgccagcatgctttcatttgtcagttgttgtgactgagagataatgaatgacacctgaaatgcatatggtatttttgggagagttaaggtataatttgaaggttggcagaccagttgcgctgattactcttagagaagaagaaatggaaaaatgaaagaaggcaggaaggaaagaaaggatataggaagagagggaagcagaaggcaggcatttttctattttccccacaaattatttcaaaaaaaatctgtattttctgggatatgtcattggcaagaggaagaactggtgttttgaaagcagtatggattctttaaatgcctctcactcttacaagatagtaggctttgagataataaacttacccgtgtcaattaacatttaaactggcatatagaaaaaaaggaggatttttctgcattgtaaaataatcagtatggtttatatgttgaatttgacatttgtgtgtaatttcatggtggcctagtgttgtggtgcttctggtaatggtaatagaagctcaactatttttttgtggatttcagtttttatcatcagaagtcctagacagtgacatttcttaatggtgggagtccagctcatgcatttctgattatacaaaacagtttgcagtaggttatttgtcatttcagttttttactgaaatttgagctaaacatttttacatgtaaatacttgtatttaccaaagatttaaatcagttgattaattaattaactcaaatactgtgaactatctctaaaacactagaaaaaagaaatgttagtatctcaattacaccaactgtgcaaatgaactttgataaaatagaaataatctacattggcctttgtgaaatctggggaagagctttaggattctagtagatggatactgaatactcaggcccacttaaattattaatgtatacattgtgtttttgtctttatgctatgtacagagaaatgtgataattttttataataaatattttttatgatgataaaagac

SEQ ID NO: 6872 - protein, 411 aa, Homo sapiens; identical to SEQ ID NO: 907

SEQ ID NO: 6873 - DNA, 3557 bp, Homo sapiens
gactcggggggagagtgcggggagacaaataaaacctcgggcggcggcggctggtgggaagacttgaacttgaatctcgaaccactgcatctccgactctgcccagactcttcactccgcggcaccctcaaaccccagcccaggccggggcgcacaagccagccagcgcacctgcagtcctcgcccggacgcgccgcgccccctcggaaccaggctctgctccgagcagccttcgcccctcaaaggtggagcatttctcgcgctacagcccgtccccgctgtccatgaagcagctactggactttggttcagaaaatgcatgtgaaagaacttcttttgcatttttgcgacaagaattgcctgtgagactcgccaacattctgaaggaaattgatatcctcccgacccaattagtaaatacctcttcagtgcaattggttaaaagctggtatatacagagcctgatggatttggtggaattccatgagaaaagcccagatgaccagaaagcattatcagactttgtagatacactcatcaaagttcgaaatagacaccataatgtagtccctacaatggcacaaggaatcatagagtataaagatgcctgtacagttgacccagtcaccaatcaaaatcttcaatatttcttggatcgattttacatgaaccgtatttctactcggatgctgatgaaccagcacattcttatatttagtgactcacagacaggaaacccaagccacattggaagcattgatcctaactgtgatgtggtagcagtggtccaagatgcctttgagtgttcaaggatgctctgtgatcagtattatttatcatctccagaattaaagcttacacaagtgaatggaaaatttccagaccaaccaattcacatcgtgtatgttccttctcacctccatcatatgctctttgaactatttaagaatgcaatgcgggcaacagttgaacaccaggaaaatcagccttcccttacaccaatagaggttattgttgtcttgggaaaagaagaccttaccattaagatttcagacagaggaggtggtgttcccctgagaattattgaccgcctctttagttatacatactccactgcaccaacgcctgtgatggataattcccggaatgctcctttggctggttttggttacggcttgccaatttctcgtctgtatgcaaagtactttcaaggagatctgaatctctactctttatcaggatatggaacagatgctatcatctacttaaaggctttgtcttctgagtctatagaaaaacttccagtttttaacaagtcagccttcaaacattatcagatgagctctgaggctgatgactggtgtatcccaagcagggaaccaaagaacctggcaaaagaagtggccatgtgaagagggacactcaggacactttacgggatcaaagtgggtctacaccagtgctgcttcctgaatgtttgtgtgtgaacccttgtttcctccaaaacaaacgacagcaacgaaaactccttaatcagaacactgatccaatgaggaatggagcttgtttctgtgacccaggagaacttagtgcaagactacaggagttaacagatggccagctccttattttttaatgtagaataactcctgagtttatatcaaatcctgaagaaataagcctcagttttccatctgtttttgataagaataagaaagggagtgagtgtgaagatggtggttagcagtttcactaagactgatattttaggcctcttgttcacatcaaaagatattggtgtcagaataccagcattttcctgccatgcaaaggattaaaacttagtttacactatgtggttacaaatatatgtcaatgtacattttgaacatatttatgtgctatggaaggaaatgctggtgactaaaataaggtttactctgaaagaggaggaattttattcaaagcattcaaacattttattcaagtgtttcaaaattcaaagcattgtattcaaagttgcagtgaaggcatcaacttatgtaaaaactcagaaggaaggctcctctgataaaaacacagctcctttattatgctgcttttcttgttcactttacacactaagtaaacacttattgtcaggtgcctagtcttgagtgaattgttagatgtgcactgaactcgggatgttggggattggagagagagaattgccaaagtaacagcaaaaatatctcttactttgctttgtttataaataaattagtagattggaaaaactagtgttagggaaagaaatcacatgttcagagcctaattcagtaggaagggcttttctctaccctgaaatgaaggtaatccaaaggcatccattttctaggcttaaaagatatatttttgatatatttaattatattctctacactccagcattaatatgtctgtttaaaaattactaattctcaaatggctcaagaacattagaatttaagtaccttttagagtaattattttaagcaaatagcctggacgtaagagattctcatgccagcatgctttcatttgtcagttgttgtgactgagagataatgaatgacacctgaaatgcatatggtatttttgggagagttaaggtataatttgaaggttggcagaccagttgcgctgattactcttagagaagaagaaatggaaaaatgaaagaaggcaggaaggaaagaaaggatataggaagagagggaagcagaaggcaggcatttttctattttccccacaaattatttcaaaaaaaatctgtattttctgggatatgtcattggcaagaggaagaactggtgttttgaaagcagtatggattctttaaatgcctctcactcttacaagatagtaggctttgagataataaacttacccgtgtcaattaacatttaaactggcatatagaaaaaaaggaggatttttctgcattgtaaaataatcagtatggtttatatgttgaatttgacatttgtgtgtaatttcatggtggcctagtgttgtggtgcttctggtaatggtaatagaagctcaactatttttttgtggatttcagtttttatcatcagaagtcctagacagtgacatttcttaatggtgggagtccagctcatgcatttctgattatacaaaacagtttgcagtaggttatttgtcatttcagttttttactgaaatttgagctaaacatttttacatgtaaatacttgtatttaccaaagatttaaatcagttgattaattaattaactcaaatactgtgaactatctctaaaacactagaaaaaagaaatgttagtatctcaattacaccaactgtgcaaatgaactttgataaaatagaaataatctacattggcctttgtgaaatctggggaagagctttaggattctagtagatggatactgaatactcaggcccacttaaattattaatgtatacattgtgtttttgtctttatgctatgtacagagaaatgtgataattttttataataaatattttttatgatgataaaagac

SEQ ID NO: 6874 - protein, 375 aa, Homo sapiens
MKQLLDFGSENACERTSFAFLRQELPVRLANILKEIDILPTQLVNTSSVQLVKSWYIQSLMDLVEFHEKSPDDQKALSDFVDTLIKVRNRHHNVVPTMAQGIIEYKDACTVDPVTNQNLQYFLDRFYMNRISTRMLMNQHILIFSDSQTGNPSHIGSIDPNCDVVAVVQDAFECSRMLCDQYYLSSPELKLTQVNGKFPDQPIHIVYVPSHLHHMLFELFKNAMRATVEHQENQPSLTPIEVIVVLGKEDLTIKISDRGGGVPLRIIDRLFSYTYSTAPTPVMDNSRNAPLAGFGYGLPISRLYAKYFQGDLNLYSLSGYGTDAIIYLKALSSESIEKLPVFNKSAFKHYQMSSEADDWCIPSREPKNLAKEVAM

SEQ ID NO: 6875 - DNA, 1057 bp, Homo sapiens
aattttagcatatttaacatataagatttaatgtttgggtgatacaaaaaacaagaaaaatcaggtgtgttattttactaaatattaaaaatatgaaaattatagttagcattaatttcaatattatgctataagcacagttttctcccttctgtcttaaaatacataaaattttgactctgaaattgtgcagtacaaaaatgttgaaaatagaaataatccacaaaatctaatttatagcactgttcttccacacttacccaacttcacacatttgtggagaaatacaaaaattaatcatatggagcaaggtggttcatgcctatcatcccagcagtttgggaggctaaggctggaggatcgcttgaggccaggagtttaagactagcctggacaacatagtaagaccctatctctacaaaaaaaaaacaattaacaaaagagcattatgtagcaactacaacaacattttgaatataagccagtaatatttactgtttaagtggtaagtttctagggcaggatttggggatggggaaggtagagaatatgccaaccctcttgaagtctaaaatgttaatcacatgaatgtggtggtttattttagtgaagtatttgtttacaaattcttaatgaattttatttttctaggaaaatttccagaccaaccaattcacatcgtgtatgttccttctcacctccatcatatgctctttgaactatttaagaatgcaatgcgggcaacagttgaacaccaggaaaatcagccttcccttacaccaatagaggttattgttgtcttgggaaaagaagaccttaccattaaggtaaccattctctgttttccttttgggtgtctcttgagagaattaaatagggtcaatagtaataaagctgtctgctttttgcaatagataacagtcatatatgccaggtgatttttaaatgaaggaaagccatttttatttagacaaatgcacattgtttttaatgtgtggctttgatgacttgtttgtttgttttagatttcagacagaggaggtggtgttcccctgag

SEQ ID NO: 6876 - protein, 109 aa, Homo sapiens
MNVVVYFSEVFVYKFLMNFIFLGKFPDQPIHIVYVPSHLHHMLFELFKNAMRATVEHQENQPSLTPIEVIVVLGKEDLTIKVTILCFPFGCLLRELNRVNSNKAVCFLQ

SEQ ID NO: 6877 - DNA, 1758 bp, Homo sapiens
gactcggggggagagtgcggggagacaaataaaacctcgggcggcggcggctggtgggaagacttgaacttgaatctcgaaccactgcatctccgactctgcccagactcttcactccgcggcaccctcaaaccccagcccaggccggggcgcacaagccagccagcgcacctgcagtcctcgcccggacgcgccgcgccccctcggaaccaggctctgctccgagcagccttcgcccctcaagccagccacagtccccgccaggccgggtgggcgtcaagatgaaggcggcccgcttcgtgctgcgcagcgctggctcgctcaacggcgccggcctggtgccccgagaggtggagcatttctcgcgctacagcccgtccccgctgtccatgaagcagctactggactttggttcagaaaatgcatgtgaaagaacttcttttgcatttttgcgacaagaattgcctgtgagactcgccaacattctgaaggaaattgatatcctcccgacccaattagtaaatacctcttcagtgcaattggttaaaagctggtaagtggtgaaccatattgaagtctctagttttgaaacagttacccgggtatgaattcttatactatgttaacatcataattggaaaacaggtgatctgaatggtaactacttttgaaagatgtaagaattttaaaattaatttagggtaagttatcattagagaagttataaaactataaacagacatttttaccctgaaaaagtagattactttataataaaattttgagttctaggaaaaatttgaaaaaaattggcatgcaattttaattttcaattatagaagagcactttcaataataaaagagtttgatattgcaaaagaaatcctatgcctagaaaccaattcacatgactgctatttagggaaggcctaatctttgtaacttacaaagtgattgacagagtgggctctgggttcaaatcctgcctctgtcacttctagttgtggaatccttggcaagtgtcttaaactctttatgccattgagttattattcccatctgttattaaagagattaaagtatatgcctcagagggatgtttgagtgtaatgaaatgagataatccataaaaaagaaaaaaaaaaccacttaggacagcacttggcacacagccagcagtcagtaagtgtcagttgttgtcatctcattttataaatgaagatactgatgcttagagaaggtaggtaacccaaaacagcaaatttttgggtcacagaagcaggatatgcacaggtagcagacatgcatgagacccttatcttaatccactgactgcacagccttttgttcattgattcaagaaatacatgtattatatacctataagacaattacaatctaaaacatatattcaatctgtagtatttactattgcagtcaagacttacactcttctatgaatgaatgtagtagaaaaaaaataaaaagctttaaaaaaagttgtttctaagtattattgctagaagaaatgaaaatatttgccaaacaaaacagtcaggaaactgaatactgacctgaaatagttaaagaaacattttgcgttaaattttaagtttgaaagtcaaggattaaaagttatagcattttaaatttatattattttccaaatgttctggaggaaagttttaagtttgaacataatgcttactttctcttttcaaattatttgaaaaagctattctattttcagccatttgt

SEQ ID NO: 6878 - protein, 91 aa, Homo sapiens
MKAARFVLRSAGSLNGAGLVPREVEHFSRYSPSPLSMKQLLDFGSENACERTSFAFLRQELPVRLANILKEIDILPTQLVNTSSVQLVKSW

SEQ ID NO: 6879 - DNA, 406 bp, Homo sapiens
accaattgcactgaagaggtatttactaattgggtcgggaggatatcaatttccttcagaatgttggcgagtctctcaccaaagtccagtagctgcttcatggacagcggggacgggctgtagcgcgagaaatgctccacctctcggggcaccaggccggcgccgttgagcgagccagcgctgcgcagcacgaagcgggccgccttcatcttgacgcccacccggcctggcggggactgtggctggcttgaggggcgaaggctgctcggagcagagcctggttccgagggggcgcggcgcgtccgggcgaggactgcaggtgcgctggctggcttgtgcgccccggcctgggctggggtttgagggtgccgcggagtgaagagtctgggcagagtcggagatgcag

SEQ ID NO: 6880 - protein, 39 aa, Homo sapiens
MLHLSGHQAGAVERASAAQHEAGRLHLDAHPAWRGLWLA

SEQ ID NO: 6881 - DNA, 801 bp, Homo sapiens
atgggctccgcccctccagccgcggtcatcacagaatggcctggcacggtgaccacggagtgccctggcaccggtgcccgcggctgtgacggaaaaagggtgggaagaacagggaagaggaagcagaaacaggcactccttgatgaaataagtaagaaagcttgtcaagagccatcactcttgctcatgggacaagagaaggcactgacctgtgcccaccagcaccccatcactgagccaacaccaccttcaggaagacagtctccagcagggcttcccccaattcccctagctgctttgcctctgctactccggtaagcacctgcagggaggcaggcaccccagcacccactagcattctgcaacagctgttgcaccttggctcccccagtacagtggattccaaacctcaaggagtcaaagaacagatggggcccaatacaaattccccagaattacaacatgccgtccaggagttgagagctgagtgttgaccttctaaaatctcccagaaacaaagccaggtggctgaatccaccttatattatagtcaaaccctcaaggtcatcaaatcatcaaataggataaaagaaaaaaaaatccaaaggtcagcaacatccaagattgaagacagataagctcacaaagatgagaaagagtcagcacaggaaaactgaaaactcgaaaaaccagagtgccctctttcctacgaacagccacatcacctctccagcaaaggttctgaactgagctgagatggccaaaatgacagaaatagaattcagaatatggataagaatg

SEQ ID NO: 6882 - protein, 105 aa, Homo sapiens
MGSAPPAAVITEWPGTVTTECPGTGARGCDGKRVGRTGKRKQKQALLDEISKKACQEPSLLLMGQEKALTCAHQHPITEPTPPSGRQSPAGLPPIPLAALPLLLR

SEQ ID NO: 6883 - DNA, 317 bp, Homo sapiens
acagaatggcctggcacggtgaccacggagtgccctggcaccggtgcccgcggctgtgacggaaaaagggtgggaagaacagggaagaggaagcagaaacaggttatctgttcactctgatggtagagaagaccttaaatgacctgatggagctgaaaaccatggcgagaacttcctgccttcgatttctcacaagctcgggcataccacgaggcttggagactcaaaacctgaagagcctgcaatcagatttctcccttactattcctgctcattgtcttctgtggactaatactgaacatgaaactttgcttaca

SEQ ID NO: 6884 - protein, 65 aa, Homo sapiens
MVEKTLNDLMELKTMARTSCLRFLTSSGIPRGLETQNLKSLQSDFSLTIPAHCLLWTNTEHETLL

SEQ ID NO: 6885 - DNA, 672 bp, Homo sapiens
aatggcctggcacggtgaccacggagtgccctggcaccggtgcccgcggctgtgacggaaaaagggtgggaagaacagggaagaggaagcagaaacagagaaaggtgtctaatggtctagtctaccaacttcactatgctgatttatgaaagaattgctgaaacccagtgaataatagcatttgcccttctttctcaaaaaagcagcatttgctttcttctggcaaggaataattaagctaatttctccatgaaccttggaaaaagtggcaacgaataatggatttgtccctcaaagaacatttcaagcaaacatcttatcagctacaaattcatttgaggcagttccaggtcagccacaggcaatttttctcattaaaatactgtttaaactgttgtatccagatgacacaggagacatatcagacaaacaacacctgcaagaagaattggtgaagtattgacttttcatcaatcaaaaagtttactaagcagatgaaaataatttgccttcacagtgacattttcctgacgtcttgctagtacttaaaggcattgttttttctttaacacccaaactttaattaccagaaaaggttagcatcaaaacaaaggacatgttggtaatttagaggccatatcagaaaaataaattcattttggtttgaatgaa

SEQ ID NO: 6886 - protein, 58 aa, Homo sapiens
MDLSLKEHFKQTSYQLQIHLRQFQVSHRQFFSLKYCLNCCIQMTQETYQTNNTCKKNW

SEQ ID NO: 6887 - DNA, 2963 bp, Homo sapiens
ggcgagccccgcagactgagtgctccggggagctgtcagtgtcaggctctgggagagaggaagtgatcgctcccggaggagcgcgagccgagcggccggcgcagcgtgagacagcacatcctgcccgcgccggccccgccaccttcgggagccgcctgcaccaacgctgccgccgcccaggagccgccgccggctcggggagcccagttccgccgctgccgagcgcgtccaggaaaccaacatgtctgacaaaagtgacttaaaagctgagctagagcgcaaaaagcagcgcttagcacagataagagaagagaagaaacggaaggaagaggagaggaaaaagaaagaggctgatatgcagcagaagaaagaacccgttcaggacgactctgatctggatcgcaaacgacgagagacagaggctttgctgcaaagcattggtatctcaccggagccgcctctagtcccaacccctatgtctccctcctcgaaatcagtgagcactcccagtgaagctggaagccaagactcaggcgatctggggccattaacaaggaccctgcagtgggacacagacccctcagtgctccagctgcagtcagactcagaacttggaagaagactgcataaactgggcgtgtcaaaggtcacccaagtggatttcctgccaagggaagtagtgtcctactcaaaggagacccagactcctcttgccacgcatcagtctgaagaggatgaggaagatgaggaaatggtggaatctaaagttggccaggactcagaactggaaaatcaggacaaaaaacaggaagtgaaggaagcccctccaagagagttgacagaggaagaaaaacagcagatccttcattcagaggaatttctcatcttttttgaccggacaatacgggtaattgaaagagccctggctgaagattccgacatcttttttgactacagcggccgagagttagaggaaaaagatggggatgttcaggctggagccaatctttctttcaatcgtcagttctatgatgaacattggtccaagcatcgagtggtcacttgtatggactggtccctccagtaccctgagctgatggtggcttcttacaacaacaatgaagatgctccccatgaaccagatggagtggccttggtttggaacatgaagtttaagaaaaccacaccagaatacgtcttccactgtcagtcctctgtgatgtcggtctgcttcgcccgtttccatcctaacttggtggttggtgggacttactcgggccagattgtcctctgggacaatcgcagtcatcgaaggactccagtgcagcggacacccttatcagctgctgcacacacgcatcccgtgtactgtgtaaatgttgttgggacccagaatgctcataacctcatcactgtctccactgatggcaaaatgtgttcctggagcctggacatgctctcaactccacaggagagcatggagctggtgtacaataagtccaagcctgtcgctgttaccggaatggctttcccaacgggagacgtcaataacttcgtggttggcagtgaggaaggtacagtctacacggcttgtcgtcatggaagcaaagcaggtattggtgaggtctttgaaggtcaccaagggccagtgacaggaattaactgccacatggcagtgggcccaatcgacttttctcacctgtttgtcacatcatcatttgactggactgtcaaactgtggaccaccaagcacaacaagccgctctactcctttgaagacaatgcagactatgtgtacgatgtcatgtggtcccccgtgcatcctgcgctttttgcctgcgtggacgggatggggcgcttggacctctggaacctcaacaatgacaccgaggttccaacagcaagtgtggccattgagggggcatccgccctaaaccgtgttcgttgggcccaagctggcaaagaagttgctgttggggactcggaaggccgtatttgggtctatgacgttggagagcttgcagttccccacaatgatgaatggacccgatttgccaggacccttgtggaaattcgtgctaacagagctgatagcgaggaggaaggcactgttgagttatctgcctagtggaaatgagccacccccactgcagcccccacctttgtgtcctagagctcagcgtctgcagtcaagtctcttgtattcggtgtccattcagtatcagtattgctgtgatattttgggtgccatattgtgccagctttgctccaagtattctaaatgtgtcccatcatgctttccactgacccaaaattcaccacagcatttctatctttatatttctgtctcaaaaatgaagagaagggggttatgggttaagttgctgccttttaactactttgtagctgtatttaatagctggaaacctctggttaaatttgtgcttacatgcactcctggcatagtcctattaaatccatatgaagccagatatgattgggtgcagatgtggtgttcctcatattatggtacagggccaaagacttgagacgtggtgttttacatggtgactcacattatgaatggatttactagaagaacattgctgctccttatttattgtagtgtgctgcatggaacgtatttatttgaaagcattaaaataaatgatcctagagcatgtgcataatgagaggactgtattctctctgctgctgttgaggttatattaagttccacatagcaattacagtatgccagttccactgaagacatgaaatctttagaggtttcttgcagtgaacgaaatgaattttaatgcctattatttctgggtactttaacaatatttcaaatatcattgaccactaatacttctcactgaagctaacacagtctgacaaaagtctatggttcctaaatatgacatcagtgttgccaataaaatgtttcaaaccaggtc

SEQ ID NO: 6888 - protein, 628 aa, Homo sapiens
MSDKSDLKAELERKKQRLAQIREEKKRKEEERKKKEADMQQKKEPVQDDSDLDRKRRETEALLQSIGISPEPPLVPTPMSPSSKSVSTPSEAGSQDSGDLGPLTRTLQWDTDPSVLQLQSDSELGRRLHKLGVSKVTQVDFLPREVVSYSKETQTPLATHQSEEDEEDEEMVESKVGQDSELENQDKKQEVKEAPPRELTEEEKQQILHSEEFLIFFDRTIRVIERALAEDSDIFFDYSGRELEEKDGDVQAGANLSFNRQFYDEHWSKHRVVTCMDWSLQYPELMVASYNNNEDAPHEPDGVALVWNMKFKKTTPEYVFHCQSSVMSVCFARFHPNLVVGGTYSGQIVLWDNRSHRRTPVQRTPLSAAAHTHPVYCVNVVGTQNAHNLITVSTDGKMCSWSLDMLSTPQESMELVYNKSKPVAVTGMAFPTGDVNNFVVGSEEGTVYTACRHGSKAGIGEVFEGHQGPVTGINCHMAVGPIDFSHLFVTSSFDWTVKLWTTKHNKPLYSFEDNADYVYDVMWSPVHPALFACVDGMGRLDLWNLNNDTEVPTASVAIEGASALNRVRWAQAGKEVAVGDSEGRIWVYDVGELAVPHNDEWTRFARTLVEIRANRADSEEEGTVELSA

SEQ ID NO: 6889 - DNA, 2903 bp, Homo sapiens
ggcgagccccgcagactgagtgctccggggagctgtcagtgtcaggctctgggagagaggaagtgatcgctcccggaggagcgcgagccgagcggccggcgcagcgtgagacagcacatcctgcccgcgccggccccgccaccttcgggagccgcctgcaccaacgctgccgccgcccaggagccgccgccggctcggggagcccagttccgccgctgccgagcgcgtccaggaaaccaacatgtctgacaaaagtgacttaaaagctgagctagagcgcaaaaagcagcgcttagcacagataagagaagagaagaaacggaaggaagaggagaggaaaaagaaagaggctgatatgcagcagaagaaagaacccgttcaggacgactctgatctggatcgcaaacgacgagagacagaggctttgctgcaaagcattggtatctcaccggagccgcctctagtcccaacccctatgtctccctcctcgaaatcagtgagcactcccagtgaagctggaagccaagactcaggcgatctggggccattaacaagaagaagactgcataaactgggcgtgtcaaaggtcacccaagtggatttcctgccaagggaagtagtgtcctactcaaaggagacccagactcctcttgccacgcatcagtctgaagaggatgaggaagatgaggaaatggtggaatctaaagttggccaggactcagaactggaaaatcaggacaaaaaacaggaagtgaaggaagcccctccaagagagttgacagaggaagaaaaacagcagatccttcattcagaggaatttctcatcttttttgaccggacaatacgggtaattgaaagagccctggctgaagattccgacatcttttttgactacagcggccgagagttagaggaaaaagatggggatgttcaggctggagccaatctttctttcaatcgtcagttctatgatgaacattggtccaagcatcgagtggtcacttgtatggactggtccctccagtaccctgagctgatggtggcttcttacaacaacaatgaagatgctccccatgaaccagatggagtggccttggtttggaacatgaagtttaagaaaaccacaccagaatacgtcttccactgtcagtcctctgtgatgtcggtctgcttcgcccgtttccatcctaacttggtggttggtgggacttactcgggccagattgtcctctgggacaatcgcagtcatcgaaggactccagtgcagcggacacccttatcagctgctgcacacacgcatcccgtgtactgtgtaaatgttgttgggacccagaatgctcataacctcatcactgtctccactgatggcaaaatgtgttcctggagcctggacatgctctcaactccacaggagagcatggagctggtgtacaataagtccaagcctgtcgctgttaccggaatggctttcccaacgggagacgtcaataacttcgtggttggcagtgaggaaggtacagtctacacggcttgtcgtcatggaagcaaagcaggtattggtgaggtctttgaaggtcaccaagggccagtgacaggaattaactgccacatggcagtgggcccaatcgacttttctcacctgtttgtcacatcatcatttgactggactgtcaaactgtggaccaccaagcacaacaagccgctctactcctttgaagacaatgcagactatgtgtacgatgtcatgtggtcccccgtgcatcctgcgctttttgcctgcgtggacgggatggggcgcttggacctctggaacctcaacaatgacaccgaggttccaacagcaagtgtggccattgagggggcatccgccctaaaccgtgttcgttgggcccaagctggcaaagaagttgctgttggggactcggaaggccgtatttgggtctatgacgttggagagcttgcagttccccacaatgatgaatggacccgatttgccaggacccttgtggaaattcgtgctaacagagctgatagcgaggaggaaggcactgttgagttatctgcctagtggaaatgagccacccccactgcagcccccacctttgtgtcctagagctcagcgtctgcagtcaagtctcttgtattcggtgtccattcagtatcagtattgctgtgatattttgggtgccatattgtgccagctttgctccaagtattctaaatgtgtcccatcatgctttccactgacccaaaattcaccacagcatttctatctttatatttctgtctcaaaaatgaagagaagggggttatgggttaagttgctgccttttaactactttgtagctgtatttaatagctggaaacctctggttaaatttgtgcttacatgcactcctggcatagtcctattaaatccatatgaagccagatatgattgggtgcagatgtggtgttcctcatattatggtacagggccaaagacttgagacgtggtgttttacatggtgactcacattatgaatggatttactagaagaacattgctgctccttatttattgtagtgtgctgcatggaacgtatttatttgaaagcattaaaataaatgatcctagagcatgtgcataatgagaggactgtattctctctgctgctgttgaggttatattaagttccacatagcaattacagtatgccagttccactgaagacatgaaatctttagaggtttcttgcagtgaacgaaatgaattttaatgcctattatttctgggtactttaacaatatttcaaatatcattgaccactaatacttctcactgaagctaacacagtctgacaaaagtctatggttcctaaatatgacatcagtgttgccaataaaatgtttcaaaccaggtc

SEQ ID NO: 6890 - protein, 608 aa, Homo sapiens
MSDKSDLKAELERKKQRLAQIREEKKRKEEERKKKEADMQQKKEPVQDDSDLDRKRRETEALLQSIGISPEPPLVPTPMSPSSKSVSTPSEAGSQDSGDLGPLTRRRLHKLGVSKVTQVDFLPREVVSYSKETQTPLATHQSEEDEEDEEMVESKVGQDSELENQDKKQEVKEAPPRELTEEEKQQILHSEEFLIFFDRTIRVIERALAEDSDIFFDYSGRELEEKDGDVQAGANLSFNRQFYDEHWSKHRVVTCMDWSLQYPELMVASYNNNEDAPHEPDGVALVWNMKFKKTTPEYVFHCQSSVMSVCFARFHPNLVVGGTYSGQIVLWDNRSHRRTPVQRTPLSAAAHTHPVYCVNVVGTQNAHNLITVSTDGKMCSWSLDMLSTPQESMELVYNKSKPVAVTGMAFPTGDVNNFVVGSEEGTVYTACRHGSKAGIGEVFEGHQGPVTGINCHMAVGPIDFSHLFVTSSFDWTVKLWTTKHNKPLYSFEDNADYVYDVMWSPVHPALFACVDGMGRLDLWNLNNDTEVPTASVAIEGASALNRVRWAQAGKEVAVGDSEGRIWVYDVGELAVPHNDEWTRFARTLVEIRANRADSEEEGTVELSA

SEQ ID NO: 6891 - DNA, 2966 bp, Homo sapiens
ctgggagagaggaagtgatcgctcccggaggagcgcgagccgagcggccggcgcagcgtgagacagcacatcctgcccgcgccggccccgccaccttcgggagccgcctgcaccaacgctgccgccgcccaggagccgccgccggctcggggagcccagttccgccgctgccgagcgcgtccaggaaaccaacatgtctgacaaaagtgacttaaaagctgagctagagcgcaaaaagcagcgcttagcacagataagagaagagaagaaacggaaggaagaggagaggaaaaagaaagaggctgatatgcagcagaagaaagaacccgttcaggacgactctgatctggatcgcaaacgacgagagacagaggctttgctgcaaagcattggtatctcaccggagccgcctctagtgcagccgctgcattttttaacatgggatacctgttattttcattatttagtcccaacccctatgtctccctcctcgaaatcagtgagcactcccagtgaagctggaagccaagactcaggcgatctggggccattaacaaggaccctgcagtgggacacagacccctcagtgctccagctgcagtcagactcagaacttggaagaagactgcataaactgggcgtgtcaaaggtcacccaagtggatttcctgccaagggaagtagtgtcctactcaaaggagacccagactcctcttgccacgcatcagtctgaagaggatgaggaagatgaggaaatggtggaatctaaagttggccaggactcagaactggaaaatcaggacaaaaaacaggaagtgaaggaagcccctccaagagagttgacagaggaagaaaaacagcagatccttcattcagaggaatttctcatcttttttgaccggacaatacgggtaattgaaagagccctggctgaagattccgacatcttttttgactacagcggccgagagttagaggaaaaagatggggatgttcaggctggagccaatctttctttcaatcgtcagttctatgatgaacattggtccaagcatcgagtggtcacttgtatggactggtccctccagtaccctgagctgatggtggcttcttacaacaacaatgaagatgctccccatgaaccagatggagtggccttggtttggaacatgaagtttaagaaaaccacaccagaatacgtcttccactgtcagtcctctgtgatgtcggtctgcttcgcccgtttccatcctaacttggtggttggtgggacttactcgggccagattgtcctctgggacaatcgcagtcatcgaaggactccagtgcagcggacacccttatcagctgctgcacacacgcatcccgtgtactgtgtaaatgttgttgggacccagaatgctcataacctcatcactgtctccactgatggcaaaatgtgttcctggagcctggacatgctctcaactccacaggagagcatggagctggtgtacaataagtccaagcctgtcgctgttaccggaatggctttcccaacgggagacgtcaataacttcgtggttggcagtgaggaaggtacagtctacacggcttgtcgtcatggaagcaaagcaggtattggtgaggtctttgaaggtcaccaagggccagtgacaggaattaactgccacatggcagtgggcccaatcgacttttctcacctgtttgtcacatcatcatttgactggactgtcaaactgtggaccaccaagcacaacaagccgctctactcctttgaagacaatgcagactatgtgtacgatgtcatgtggtcccccgtgcatcctgcgctttttgcctgcgtggacgggatggggcgcttggacctctggaacctcaacaatgacaccgaggttccaacagcaagtgtggccattgagggggcatccgccctaaaccgtgttcgttgggcccaagctggcaaagaagttgctgttggggactcggaaggccgtatttgggtctatgacgttggagagcttgcagttccccacaatgatgaatggacccgatttgccaggacccttgtggaaattcgtgctaacagagctgatagcgaggaggaaggcactgttgagttatctgcctagtggaaatgagccacccccactgcagcccccacctttgtgtcctagagctcagcgtctgcagtcaagtctcttgtattcggtgtccattcagtatcagtattgctgtgatattttgggtgccatattgtgccagctttgctccaagtattctaaatgtgtcccatcatgctttccactgacccaaaattcaccacagcatttctatctttatatttctgtctcaaaaatgaagagaagggggttatgggttaagttgctgccttttaactactttgtagctgtatttaatagctggaaacctctggttaaatttgtgcttacatgcactcctggcatagtcctattaaatccatatgaagccagatatgattgggtgcagatgtggtgttcctcatattatggtacagggccaaagacttgagacgtggtgttttacatggtgactcacattatgaatggatttactagaagaacattgctgctccttatttattgtagtgtgctgcatggaacgtatttatttgaaagcattaaaataaatgatcctagagcatgtgcataatgagaggactgtattctctctgctgctgttgaggttatattaagttccacatagcaattacagtatgccagttccactgaagacatgaaatctttagaggtttcttgcagtgaacgaaatgaattttaatgcctattatttctgggtactttaacaatatttcaaatatcattgaccactaatacttctcactgaagctaacacagtctgacaaaagtctatggttcctaaatatgacatcagtgttgccaataaaatgtttcaaaccaggtc

SEQ ID NO: 6892 - protein, 645 aa, Homo sapiens; identical to SEQ ID NO: 909

SEQ ID NO: 6893 - DNA, 2905 bp, Homo sapiens
tgggagagaggaagtgatcgctcccggaggagcgcgagccgagcggccggcgcagcgtgagacagcacatcctgcccgcgccggccccgccaccttcgggagccgcctgcaccaacgctgccgccgcccaggagccgccgccggctcggggagcccagttccgccgctgccgagcgcgtccaggaaaccaacatgtctgacaaaagtgacttaaaagctgagctagagcgcaaaaagcagcgcttagcacagataagagaagagaagaaacggaaggaagaggagaggaaaaagaaagaggctgatatgcagcagaagaaagaacccgttcaggacgactctgatctggatcgcaaacgacgagagacagaggctttgctgcaaagcattggtatctcaccggagccgcctctagtgcagccgctgcattttttaacatgggatacctgttattttcattatttagtcccaacccctatgtctccctcctcgaaatcagtgagcactcccagtgaagctggaagccaagactcaggcgatctggggccattaacaagaagaagactgcataaactgggcgtgtcaaaggtcacccaagtggatttcctgccaagggaagtagtgtcctactcaaaggagacccagactcctcttgccacgcatcagtctgaagaggatgaggaagatgaggaaatggtggaatctaaagttggccaggactcagaactggaaaatcaggacaaaaaacaggaagtgaaggaagcccctccaagagagttgacagaggaagaaaaacagcagatccttcattcagaggaatttctcatcttttttgaccggacaatacgggtaattgaaagagccctggctgaagattccgacatcttttttgactacagcggccgagagttagaggaaaaagatggggatgttcaggctggagccaatctttctttcaatcgtcagttctatgatgaacattggtccaagcatcgagtggtcacttgtatggactggtccctccagtaccctgagctgatggtggcttcttacaacaacaatgaagatgctccccatgaaccagatggagtggccttggtttggaacatgaagtttaagaaaaccacaccagaatacgtcttccactgtcagtcctctgtgatgtcggtctgcttcgcccgtttccatcctaacttggtggttggtgggacttactcgggccagattgtcctctgggacaatcgcagtcatcgaaggactccagtgcagcggacacccttatcagctgctgcacacacgcatcccgtgtactgtgtaaatgttgttgggacccagaatgctcataacctcatcactgtctccactgatggcaaaatgtgttcctggagcctggacatgctctcaactccacaggagagcatggagctggtgtacaataagtccaagcctgtcgctgttaccggaatggctttcccaacgggagacgtcaataacttcgtggttggcagtgaggaaggtacagtctacacggcttgtcgtcatggaagcaaagcaggtattggtgaggtctttgaaggtcaccaagggccagtgacaggaattaactgccacatggcagtgggcccaatcgacttttctcacctgtttgtcacatcatcatttgactggactgtcaaactgtggaccaccaagcacaacaagccgctctactcctttgaagacaatgcagactatgtgtacgatgtcatgtggtcccccgtgcatcctgcgctttttgcctgcgtggacgggatggggcgcttggacctctggaacctcaacaatgacaccgaggttccaacagcaagtgtggccattgagggggcatccgccctaaaccgtgttcgttgggcccaagctggcaaagaagttgctgttggggactcggaaggccgtatttgggtctatgacgttggagagcttgcagttccccacaatgatgaatggacccgatttgccaggacccttgtggaaattcgtgctaacagagctgatagcgaggaggaaggcactgttgagttatctgcctagtggaaatgagccacccccactgcagcccccacctttgtgtcctagagctcagcgtctgcagtcaagtctcttgtattcggtgtccattcagtatcagtattgctgtgatattttgggtgccatattgtgccagctttgctccaagtattctaaatgtgtcccatcatgctttccactgacccaaaattcaccacagcatttctatctttatatttctgtctcaaaaatgaagagaagggggttatgggttaagttgctgccttttaactactttgtagctgtatttaatagctggaaacctctggttaaatttgtgcttacatgcactcctggcatagtcctattaaatccatatgaagccagatatgattgggtgcagatgtggtgttcctcatattatggtacagggccaaagacttgagacgtggtgttttacatggtgactcacattatgaatggatttactagaagaacattgctgctccttatttattgtagtgtgctgcatggaacgtatttatttgaaagcattaaaataaatgatcctagagcatgtgcataatgagaggactgtattctctctgctgctgttgaggttatattaagttccacatagcaattacagtatgccagttccactgaagacatgaaatctttagaggtttcttgcagtgaacgaaatgaattttaatgcctattatttctgggtactttaacaatatttcaaatatcattgaccactaatacttctcactgaagctaacacagtctgacaaaagtctatggttcctaaatatgacatcagtgttgccaataaaatgtttcaaaccaggtc

SEQ ID NO: 6894 - protein, 625 aa, Homo sapiens
MSDKSDLKAELERKKQRLAQIREEKKRKEEERKKKEADMQQKKEPVQDDSDLDRKRRETEALLQSIGISPEPPLVQPLHFLTWDTCYFHYLVPTPMSPSSKSVSTPSEAGSQDSGDLGPLTRRRLHKLGVSKVTQVDFLPREVVSYSKETQTPLATHQSEEDEEDEEMVESKVGQDSELENQDKKQEVKEAPPRELTEEEKQQILHSEEFLIFFDRTIRVIERALAEDSDIFFDYSGRELEEKDGDVQAGANLSFNRQFYDEHWSKHRVVTCMDWSLQYPELMVASYNNNEDAPHEPDGVALVWNMKFKKTTPEYVFHCQSSVMSVCFARFHPNLVVGGTYSGQIVLWDNRSHRRTPVQRTPLSAAAHTHPVYCVNVVGTQNAHNLITVSTDGKMCSWSLDMLSTPQESMELVYNKSKPVAVTGMAFPTGDVNNFVVGSEEGTVYTACRHGSKAGIGEVFEGHQGPVTGINCHMAVGPIDFSHLFVTSSFDWTVKLWTTKHNKPLYSFEDNADYVYDVMWSPVHPALFACVDGMGRLDLWNLNNDTEVPTASVAIEGASALNRVRWAQAGKEVAVGDSEGRIWVYDVGELAVPHNDEWTRFARTLVEIRANRADSEEEGTVELSA

SEQ ID NO: 6895 - DNA, 1235 bp, Homo sapiens
ccagatgttatgggcatcgacgagttaccgtctcggaaactctcaatcacgcaagcgaaaggagaggaggcggctaattaaatattgagcagaaagtcgcgtggggagaatgtcacgtgggtctggaggctcaaggaggctgggataaataccgcaaggcactgagcaggcgaaagagcgcgctcggacctccttcccggcggcagctaccgagagtgcggagcgaccagcgtgcgctcggaggaaccagagaaactcagcaccccgcgggactgtccgtcgcaaaatccaacatgaaaatcctcgtggccttggcagtcttttttcttgtctccactcagctgtttgcagaagaaataggagccaatgatgatctgaattactggtccgactggtacgacagcgaccagatcaaggaggaactgccggagccctttgagcatcttctgcagagaatcgcccggagacccaagcctcagcagttctttggattaatgggcaaacgggatgctgattcctcaattgaaaaacaagtggccctgttaaaggctctttatggacatggccagatctctcacaaaagacataaaacagattcctttgttggactaatgggcaaaagagctttaaattctgtggcttatgaaaggagtgcaatgcagaattatgaaagaagacgttaataaactacctaacattatttattcagcttcatttgtgtcaatgggcaatgacaggtaaattaagacatgcactatgaggaataattatttatttaataacaattgtttggggttgaaaattcaaaaagtgtttatttttcatattgtgccaatatgtattgtaaacatgtgttttaattccaatatgatgactcccttaaaatagaaataagtggttatttctcaacaaagcacagtgttaaatgaaattgtaaaacctgtcaatgatacagtccctaaagaaaaaaaatcattgctttgaagcagttgtgtcagctactgcggaaaaggaaggaaactcctgacagtcttgtgcttttcctatttgttttcatggtgaaaatgtactgagattttggtattacactgtatttgtatctctgaagcatgtttcatgttttgtgactatatagagatgtttttaaaagtttcaatgtgattctaatgtcttcatttcattgtatgatgtgttgtgatagctaacattttaaataaaagaaaaaatatcttgaa

SEQ ID NO: 6896 - protein, 129 aa, Homo sapiens; identical to SEQ ID NO: 911

SEQ ID NO: 6897 - DNA, 1030 bp, Homo sapiens
ccgcaaggcactgagcaggcgaaagagcgcgctcggacctccttcccggcggcagctaccgagagtgcggagcgaccagcgtgcgctcggaggaaccagagaaactcagcaccccgcgggactgtccgtcgcaaaatccaacatgaaaatcctcgtggccttggcagtcttttttcttgtctccactcagctgtttgcagaagaaataggagccaatgatgatctgaattactggtccgactggtacgacagcgaccagatcaaggaggaactgccggagccctttgagcatcttctgcagagaatcgcccggagacccaagcctcagcagttctttggattaatgggcaaacgggatgctgattcctcaattgaaaaacaagtggccctgttaaaggctctttatggacatggccagatctctcacaaaatggcttatgaaaggagtgcaatgcagaattatgaaagaagacgttaataaactacctaacattatttattcagcttcatttgtgtcaatgggcaatgacaggtaaattaagacatgcactatgaggaataattatttatttaataacaattgtttggggttgaaaattcaaaaagtgtttatttttcatattgtgccaatatgtattgtaaacatgtgttttaattccaatatgatgactcccttaaaatagaaataagtggttatttctcaacaaagcacagtgttaaatgaaattgtaaaacctgtcaatgatacagtccctaaagaaaaaaaatcattgctttgaagcagttgtgtcagctactgcggaaaaggaaggaaactcctgacagtcttgtgcttttcctatttgttttcatggtgaaaatgtactgagattttggtattacactgtatttgtatctctgaagcatgtttcatgttttgtgactatatagagatgtttttaaaagtttcaatgtgattctaatgtcttcatttcattgtatgatgtgttgtgatagctaacattttaaataaaagaaaaaatatcttgaa

SEQ ID NO: 6898 - protein, 111 aa, Homo sapiens; identical to SEQ ID NO: 913

SEQ ID NO: 6899 - DNA, 985 bp, Homo sapiens
ccgcaaggcactgagcaggcgaaagagcgcgctcggacctccttcccggcggcagctaccgagagtgcggagcgaccagcgtgcgctcggaggaaccagagaaactcagcaccccgcgggactgtccgtcgcaaaatccaacatgaaaatcctcgtggccttggcagtcttttttcttgtctccactcagctgtttgcagaagaaataggagccaatgatgatctgaattactggtccgactggtacgacagcgaccagatcaaggaggaactgccggagccctttgagcatcttctgcagagaatcgcccggagacccaagcctcagcagttctttggattaatgggcaaacgggatgctggacatggccagatctctcacaaaatggcttatgaaaggagtgcaatgcagaattatgaaagaagacgttaataaactacctaacattatttattcagcttcatttgtgtcaatgggcaatgacaggtaaattaagacatgcactatgaggaataattatttatttaataacaattgtttggggttgaaaattcaaaaagtgtttatttttcatattgtgccaatatgtattgtaaacatgtgttttaattccaatatgatgactcccttaaaatagaaataagtggttatttctcaacaaagcacagtgttaaatgaaattgtaaaacctgtcaatgatacagtccctaaagaaaaaaaatcattgctttgaagcagttgtgtcagctactgcggaaaaggaaggaaactcctgacagtcttgtgcttttcctatttgttttcatggtgaaaatgtactgagattttggtattacactgtatttgtatctctgaagcatgtttcatgttttgtgactatatagagatgtttttaaaagtttcaatgtgattctaatgtcttcatttcattgtatgatgtgttgtgatagctaacattttaaataaaagaaaaaatatcttgaa

SEQ ID NO: 6900 - protein, 96 aa, Homo sapiens; identical to SEQ ID NO: 917

SEQ ID NO: 6901 - DNA, 1039 bp, Homo sapiens
ccgcaaggcactgagcaggcgaaagagcgcgctcggacctccttcccggcggcagctaccgagagtgcggagcgaccagcgtgcgctcggaggaaccagagaaactcagcaccccgcgggactgtccgtcgcaaaatccaacatgaaaatcctcgtggccttggcagtcttttttcttgtctccactcagctgtttgcagaagaaataggagccaatgatgatctgaattactggtccgactggtacgacagcgaccagatcaaggaggaactgccggagccctttgagcatcttctgcagagaatcgcccggagacccaagcctcagcagttctttggattaatgggcaaacgggatgctggacatggccagatctctcacaaaagacataaaacagattcctttgttggactaatgggcaaaagagctttaaattctgtggcttatgaaaggagtgcaatgcagaattatgaaagaagacgttaataaactacctaacattatttattcagcttcatttgtgtcaatgggcaatgacaggtaaattaagacatgcactatgaggaataattatttatttaataacaattgtttggggttgaaaattcaaaaagtgtttatttttcatattgtgccaatatgtattgtaaacatgtgttttaattccaatatgatgactcccttaaaatagaaataagtggttatttctcaacaaagcacagtgttaaatgaaattgtaaaacctgtcaatgatacagtccctaaagaaaaaaaatcattgctttgaagcagttgtgtcagctactgcggaaaaggaaggaaactcctgacagtcttgtgcttttcctatttgttttcatggtgaaaatgtactgagattttggtattacactgtatttgtatctctgaagcatgtttcatgttttgtgactatatagagatgtttttaaaagtttcaatgtgattctaatgtcttcatttcattgtatgatgtgttgtgatagctaacattttaaataaaagaaaaaatatcttgaa

SEQ ID NO: 6902 - protein, 114 aa, Homo sapiens; identical to SEQ ID NO: 915

SEQ ID NO: 6903 - DNA, 522 bp, Homo sapiens
gagaaactcagcaccccgcgggactgtccgtcgcaaaatccaacatgaaaatcctcgtggccttggcagtcttttttcttgtctccactcagctgtttgcagaagaaataggagccaatgatgatctgaattactggtccgactggtacgacagcgaccagatcaaggtgaggccccttcccaggacggcccgcacccttcttcctgggctcgggagctgtcaccttcccacgcaacagcaccctagttaacgtggcacgcaccgccaccacggaaagaggcagcggttgcgtgcgagaggatggaaaggggcactatttcccgggttccccacgggattttgtgcccacgattcaagtttcttcccgagggctgcaccgtccggcccaggaactccctgcagtagggatgccctcccggatgagcccgagatcctcacaaggcgggaaatctcgtaagatttcatcccccaggacctgggatttcgggggctccggtccagctgcactgccctagcgtctg

SEQ ID NO: 6904 - protein, 68 aa, Homo sapiens [sequence omitted]

SEQ ID NO: 6905 - DNA, 1016 bp, Homo sapiens
attggcccacaccgcactaaggcacgcacgggcccgcggggggagggaaagatctggttcgcatgcctcactgtattcgagtgaagcgctcccttgactaaagatccaaactgacaaagggaaggcacgggcctccaggggtagtactgcggatgatccaagtgcatgtggaagaggattttatagcattccctgaggtgagagtacatttgtcttgggatagaaatatcgtttccttgaattcatcgcacggtcagtggaacatgtagttaatgacaattcgtctcttgtcagattcctcaattgaaaaacaagtggccctgttaaaggctctttatggacatggccagatctctcacaaaagacataaaacagattcctttgttggactaatgggcaaaagagctttaaattctgtggcttatgaaaggagtgcaatgcagaattatgaaagaagacgttaataaactacctaacattatttattcagcttcatttgtgtcaatgggcaatgacaggtaaattaagacatgcactatgaggaataattatttatttaataacaattgtttggggttgaaaattcaaaaagtgtttatttttcatattgtgccaatatgtattgtaaacatgtgttttaattccaatatgatgactcccttaaaatagaaataagtggttatttctcaacaaagcacagtgttaaatgaaattgtaaaacctgtcaatgatacagtccctaaagaaaaaaaatcattgctttgaagcagttgtgtcagctactgcggaaaaggaaggaaactcctgacagtcttgtgcttttcctatttgttttcatggtgaaaatgtactgagattttggtattacactgtatttgtatctctgaagcatgtttcatgttttgtgactatatagagatgtttttaaaagtttcaatgtgattctaatgtcttcatttcattgtatgatgtgttgtgatagctaacattttaaataaaagaaaaaatatcttgaa

SEQ ID NO: 6906 - protein, 63 aa, Homo sapiens
MTIRLLSDSSIEKQVALLKALYGHGQISHKRHKTDSFVGLMGKRALNSVAYERSAMQNYERRR

SEQ ID NO: 6907 - DNA, 885 bp, Homo sapiens
tattctaatattagcagtttggtaggaaggaaggcatgttttgtgaagcattgcttacctctgttcagttatttactcccttccctaaatttgtttaactttttgtcttatccacctttaggattggagagggagaaagaaaaactgctttgtgtgccaaaagcaaaactcttggtgtttttgtttgtgaaataggctccttctcctgaaaaagccgaggaggagagtgagaggcttctgagggaactctatttgtttgatgttctccgcgcagatcgaactactgctgcccatggtcttgaactgagagtcccatttctagatcatcgattttcttcctattacttgtctctgccaccagaaatgagaattccaaagaatgggatagaaaaacatctcctgagagagacgtttgaggattccaatctgatacccaaagagattctctggcgaccaaaagaagccttcagtgatggaataacttcagttaagaattcctggtttaagattttacaggaatacgttgaacatcaggttgatgatgcaatgatggcaaatgcagcccagaaatttcccttcaatactcctaaaaccaaagaaggatattactaccgtcaagtctttgaacgccattacccaggccgggctgactggctgagccattactggatgcccaagtggatcaatgccactgacccttctgcccgcacgctgacccactacaagtcagctgtcaaagcttaggtggtctttatgctgtaatgtgaaagcaaatatttcttcgtgttggatggggactgtgggtagataggggaacaatgagagtcaactcaggctaacttgggtgtgaaaaaaataaaagtcctaaatctaaaccattgctgt

SEQ ID NO: 6908 - protein, 126 aa, Homo sapiens [sequence omitted]

SEQ ID NO: 6909 - DNA, 2301 bp, Homo sapiens
cctttctgtcctggttccctgaagcatcgagagggaaccgcggccggcaggccggaccgctccggagaggaggcagcggcagtttgagcccctgtaaatgttatatgtgtacttttttttactatgtggcgtcgaagcctgtggacattttcgcggtccgggtccctgcggcggacgggtcggatcgtgctcgtggccagggcgcagtcaggtgtcgcgtggtcctgatctaggaagagactgcggccttatcaccgtctcggtgtctgctttcaccttcaactgcccccctcctcacctggaccgctcaccctcctcctcccctctcaccccgccatccccaccagtccccacctgtctctgtagactgcaagactcatcaagtgacttgctgagcaaaccctgccgagaagagattttcttcaatcacatctgaataaatcacttgaagaaagcttatagcttcattgcaccatgtgtggcatttgggcgctgtttggcagtgatgattgcctttctgttcagtgtctgagtgctatgaagattgcacacagaggtccagatgcattccgttttgagaatgtcaatggatacaccaactgctgctttggatttcaccggttggcggtagttgacccgctgtttggaatgcagccaattcgagtgaagaaatatccgtatttgtggctctgttacaatggtgaaatctacaaccataagaagatgcaacagcattttgaatttgaataccagaccaaagtggatggtgagataatccttcatctttatgacaaaggaggaattgagcaaacaatttgtatgttggatggtgtgtttgcatttgttttactggatactgccaataagaaagtgttcctgggtagagatacatatggagtcagacctttgtttaaagcaatgacagaagatggatttttggctgtatgttcagaagctaaaggtcttgttacattgaagcactccgcgactccctttttaaaagtggagccttttcttcctggacactatgaagttttggatttaaagccaaatggcaaagttgcatccgtggaaatggttaaatatcatcactgtcgggatgtacccctgcacgccctctatgacaatgtggagaaactctttccaggttttgagatagaaactgtgaagaacaacctcaggatcctttttaataatgctgtaaagaaacgtttgatgacagacagaaggattggctgccttttatcagggggcttggactccagcttggttgctgccactctgttgaagcagctgaaagaagcccaagtacagtatcctctccagacatttgcaattggcatggaagacagccccgatttactggctgctagaaaggtggcagatcatattggaagtgaacattatgaagtcctttttaactctgaggaaggcattcaggctctggatgaagtcatattttccttggaaacttatgacattacaacagttcgtgcttcagtaggtatgtatttaatttccaagtatattcggaagaacacagatagcgtggtgatcttctctggagaaggatcagatgaacttacgcagggttacatatattttcacaaggctccttctcctgaaaaagccgaggaggagagtgagaggcttctgagggaactctatttgtttgatgttctccgcgcagatcgaactactgctgcccatggtcttgaactgagagtcccatttctagatcatcgattttcttcctattacttgtctctgccaccagaaatgagaattccaaagaatgggatagaaaaacatctcctgagagagacgtttgaggattccaatctgatacccaaagagattctctggcgaccaaaagaagccttcagtgatggaataacttcagttaagaattcctggtttaagattttacaggaatacgttgaacatcaggttgatgatgcaatgatggcaaatgcagcccagaaatttcccttcaatactcctaaaaccaaagaaggatattactaccgtcaagtctttgaacgccattacccaggccgggctgactggctgagccattactggatgcccaagtggatcaatgccactgacccttctgcccgcacgctgacccactacaagtcagctgtcaaagcttaggtggtctttatgctgtaatgtgaaagcaaatatttcttcgtgttggatggggactgtgggtagataggggaacaatgagagtcaactcaggctaacttgggtgtgaaaaaaataaaagtcctaaatctaaaccattgctgt

SEQ ID NO: 6910 - protein, 561 aa, Homo sapiens
MCGIWALFGSDDCLSVQCLSAMKIAHRGPDAFRFENVNGYTNCCFGFHRLAVVDPLFGMQPIRVKKYPYLWLCYNGEIYNHKKMQQHFEFEYQTKVDGEIILHLYDKGGIEQTICMLDGVFAFVLLDTANKKVFLGRDTYGVRPLFKAMTEDGFLAVCSEAKGLVTLKHSATPFLKVEPFLPGHYEVLDLKPNGKVASVEMVKYHHCRDVPLHALYDNVEKLFPGFEIETVKNNLRILFNNAVKKRLMTDRRIGCLLSGGLDSSLVAATLLKQLKEAQVQYPLQTFAIGMEDSPDLLAARKVADHIGSEHYEVLFNSEEGIQALDEVIFSLETYDITTVRASVGMYLISKYIRKNTDSVVIFSGEGSDELTQGYIYFHKAPSPEKAEEESERLLRELYLFDVLRADRTTAAHGLELRVPFLDHRFSSYYLSLPPEMRIPKNGIEKHLLRETFEDSNLIPKEILWRPKEAFSDGITSVKNSWFKILQEYVEHQVDDAMMANAAQKFPFNTPKTKEGYYYRQVFERHYPGRADWLSHYWMPKWINATDPSARTLTHYKSAVKA

SEQ ID NO: 6911 - DNA, 2298 bp, Homo sapiens
cgcaggcatgatgaaacttcccgcacgcgttacaggagccaggtcggtataagcgccagcggcctcgccgcccgtcaagctgtccacatccctggcctcagcccgccacatcaccctgacctgcttacgcccagcctgtggacattttcgcggtccgggtccctgcggcggacgggtcggatcgtgctcgtggccagggcgcagtcaggtgtcgcgtggtcctgatctaggaagagactgcggccttatcaccgtctcggtgtctgctttcaccttcaactgcccccctcctcacctggaccgctcaccctcctcctcccctctcaccccgccatccccaccagtccccacctgtctctgtagactgcaagactcatcaagtgacttgctgagcaaaccctgccgagaagagattttcttcaatcacatctgaataaatcacttgaagaaagcttatagcttcattgcaccatgtgtggcatttgggcgctgtttggcagtgatgattgcctttctgttcagtgtctgagtgctatgaagattgcacacagaggtccagatgcattccgttttgagaatgtcaatggatacaccaactgctgctttggatttcaccggttggcggtagttgacccgctgtttggaatgcagccaattcgagtgaagaaatatccgtatttgtggctctgttacaatggtgaaatctacaaccataagaagatgcaacagcattttgaatttgaataccagaccaaagtggatggtgagataatccttcatctttatgacaaaggaggaattgagcaaacaatttgtatgttggatggtgtgtttgcatttgttttactggatactgccaataagaaagtgttcctgggtagagatacatatggagtcagacctttgtttaaagcaatgacagaagatggatttttggctgtatgttcagaagctaaaggtcttgttacattgaagcactccgcgactccctttttaaaagtggagccttttcttcctggacactatgaagttttggatttaaagccaaatggcaaagttgcatccgtggaaatggttaaatatcatcactgtcgggatgtacccctgcacgccctctatgacaatgtggagaaactctttccaggttttgagatagaaactgtgaagaacaacctcaggatcctttttaataatgctgtaaagaaacgtttgatgacagacagaaggattggctgccttttatcagggggcttggactccagcttggttgctgccactctgttgaagcagctgaaagaagcccaagtacagtatcctctccagacatttgcaattggcatggaagacagccccgatttactggctgctagaaaggtggcagatcatattggaagtgaacattatgaagtcctttttaactctgaggaaggcattcaggctctggatgaagtcatattttccttggaaacttatgacattacaacagttcgtgcttcagtaggtatgtatttaatttccaagtatattcggaagaacacagatagcgtggtgatcttctctggagaaggatcagatgaacttacgcagggttacatatattttcacaaggctccttctcctgaaaaagccgaggaggagagtgagaggcttctgagggaactctatttgtttgatgttctccgcgcagatcgaactactgctgcccatggtcttgaactgagagtcccatttctagatcatcgattttcttcctattacttgtctctgccaccagaaatgagaattccaaagaatgggatagaaaaacatctcctgagagagacgtttgaggattccaatctgatacccaaagagattctctggcgaccaaaagaagccttcagtgatggaataacttcagttaagaattcctggtttaagattttacaggaatacgttgaacatcaggttgatgatgcaatgatggcaaatgcagcccagaaatttcccttcaatactcctaaaaccaaagaaggatattactaccgtcaagtctttgaacgccattacccaggccgggctgactggctgagccattactggatgcccaagtggatcaatgccactgacccttctgcccgcacgctgacccactacaagtcagctgtcaaagcttaggtggtctttatgctgtaatgtgaaagcaaatatttcttcgtgttggatggggactgtgggtagataggggaacaatgagagtcaactcaggctaacttgggtgtgaaaaaaataaaagtcctaaatctaaaccattgctgt

SEQ ID NO: 6912 - protein, 561 aa, Homo sapiens; identical to SEQ ID NO: 6910

SEQ ID NO: 6913 - DNA, 2043 bp, Homo sapiens
ccctgtgcgcgctggttggtcctcgcaggcatgatgaaacttcccgcacgcgttacaggagccaggtcggtataagcgccagcggcctcgccgcccgtcaagctgtccacatccctggcctcagcccgccacatcaccctgacctgcttacgcccagattttcttcaatcacatctgaataaatcacttgaagaaagcttatagcttcattgcaccatgtgtggcatttgggcgctgtttggcagtgatgattgcctttctgttcagtgtctgagtgctatgaagattgcacacagaggtccagatgcattccgttttgagaatgtcaatggatacaccaactgctgctttggatttcaccggttggcggtagttgacccgctgtttggaatgcagccaattcgagtgaagaaatatccgtatttgtggctctgttacaatggtgaaatctacaaccataagaagatgcaacagcattttgaatttgaataccagaccaaagtggatggtgagataatccttcatctttatgacaaaggaggaattgagcaaacaatttgtatgttggatggtgtgtttgcatttgttttactggatactgccaataagaaagtgttcctgggtagagatacatatggagtcagacctttgtttaaagcaatgacagaagatggatttttggctgtatgttcagaagctaaaggtcttgttacattgaagcactccgcgactccctttttaaaagtggagccttttcttcctggacactatgaagttttggatttaaagccaaatggcaaagttgcatccgtggaaatggttaaatatcatcactgtcgggatgtacccctgcacgccctctatgacaatgtggagaaactctttccaggttttgagatagaaactgtgaagaacaacctcaggatcctttttaataatgctgtaaagaaacgtttgatgacagacagaaggattggctgccttttatcagggggcttggactccagcttggttgctgccactctgttgaagcagctgaaagaagcccaagtacagtatcctctccagacatttgcaattggcatggaagacagccccgatttactggctgctagaaaggtggcagatcatattggaagtgaacattatgaagtcctttttaactctgaggaaggcattcaggctctggatgaagtcatattttccttggaaacttatgacattacaacagttcgtgcttcagtaggtatgtatttaatttccaagtatattcggaagaacacagatagcgtggtgatcttctctggagaaggatcagatgaacttacgcagggttacatatattttcacaaggctccttctcctgaaaaagccgaggaggagagtgagaggcttctgagggaactctatttgtttgatgttctccgcgcagatcgaactactgctgcccatggtcttgaactgagagtcccatttctagatcatcgattttcttcctattacttgtctctgccaccagaaatgagaattccaaagaatgggatagaaaaacatctcctgagagagacgtttgaggattccaatctgatacccaaagagattctctggcgaccaaaagaagccttcagtgatggaataacttcagttaagaattcctggtttaagattttacaggaatacgttgaacatcaggttgatgatgcaatgatggcaaatgcagcccagaaatttcccttcaatactcctaaaaccaaagaaggatattactaccgtcaagtctttgaacgccattacccaggccgggctgactggctgagccattactggatgcccaagtggatcaatgccactgacccttctgcccgcacgctgacccactacaagtcagctgtcaaagcttaggtggtctttatgctgtaatgtgaaagcaaatatttcttcgtgttggatggggactgtgggtagataggggaacaatgagagtcaactcaggctaacttgggtgtgaaaaaaataaaagtcctaaatctaaaccattgctgt

SEQ ID NO: 6914 - protein, 561 aa, Homo sapiens; identical to SEQ ID NO: 6910

SEQ ID NO: 6915 - DNA, 3516 bp, Homo sapiens
ggcgagggaggcggaagtgcggtgttctagcaggtggctgctttctctgggctggctgtgggaggctcccgaggtggggacccggccgggatggctgcagcggcggccggggctgggagcgggccctcggcggcccaggagaagcagttcctgccggcgctgctgagtttcttcatctacaacccgcgcttctggccgcgggaaggagagacctcccagtgccaagtgtataagcgtgtccagaattggtgggtctcactgacttcaagaatgaagccgcggaccctcctggcggaattctccacgagttttgagcagcctcggttttcccaccacctccaaatcatgcaagacacagggtaagagcaaagacaaggtggctgtggccgatgtccaccctctcggggcgtcccttctcttctctcctccttgagcagggagaccatcggggtgcaacctggttggggcggggaggaggtgcagggcctggccagagcgggcctggccacgggcaagggacagcgacccccgggccaggacaggtgagagcggcgcaggcccgggcccggcgtggcggaggtgcgcgtgagcggccagcagagggcgccagagagccaggagcggcccgcagaggagcccgcgccggccccggtgcccacctccgcgccgcgcggaccctccgagcccgcgctcagacgccccagctccgccgagaggccgcttgcgccgggtccttcttccccaaatgcaggcagagcccccggagccatggccagcccttccggcagctccaaagccactggcaagccccgaggcagggatggccggcccaggagggaggaggacgacgtccctcccgaagagaagaggctgcggctcttgctggaggggggaagcgcacagccccaggactgcgaggacggggaggacgcgccgcggccgggcagggaggagaccggcacccagacaggtggcgacggcagaggacctctgcctcagtctcctcttctggaaagtgggattggaaaccacatctgcttctctcccaggactgctaggcagacaagattagatggcagcaaggcgcatgggtcgactgagctgggagagtccacagtgtcagcctcccccacgcttccctccctccttattccttgtgtgctgtactttgtcttgatttcctgtactctgcaccaagccaggagatggtctgttcttcccctggattgtaaactccttgatgtctgggtcatctcagctcatgagctgagctttcagtgggtgctcagtggaacagatgctgaatggagtcaggctgtagggaggccagtgtgtgttggaaggaaaatacatgtacagccaacttccttgagggttcgttcttttgcatcagggtgtctcaaactgctgcccttaaaacacctgtaagagaatcatccaggcggcttgctcactctgcatgcaggccctttagaatgagagtcagaatccctggggctggagccacaaaatgaaatgacatttcaacgagtttgtcatcatgtgagagagaatagattttcttcaatcacatctgaataaatcacttgaagaaagcttatagcttcattgcaccatgtgtggcatttgggcgctgtttggcagtgatgattgcctttctgttcagtgtctgagtgctatgaagattgcacacagaggtccagatgcattccgttttgagaatgtcaatggatacaccaactgctgctttggatttcaccggttggcggtagttgacccgctgtttggaatgcagccaattcgagtgaagaaatatccgtatttgtggctctgttacaatggtgaaatctacaaccataagaagatgcaacagcattttgaatttgaataccagaccaaagtggatggtgagataatccttcatctttatgacaaaggaggaattgagcaaacaatttgtatgttggatggtgtgtttgcatttgttttactggatactgccaataagaaagtgttcctgggtagagatacatatggagtcagacctttgtttaaagcaatgacagaagatggatttttggctgtatgttcagaagctaaaggtcttgttacattgaagcactccgcgactccctttttaaaagtggagccttttcttcctggacactatgaagttttggatttaaagccaaatggcaaagttgcatccgtggaaatggttaaatatcatcactgtcgggatgtacccctgcacgccctctatgacaatgtggagaaactctttccaggttttgagatagaaactgtgaagaacaacctcaggatcctttttaataatgctgtaaagaaacgtttgatgacagacagaaggattggctgccttttatcagggggcttggactccagcttggttgctgccactctgttgaagcagctgaaagaagcccaagtacagtatcctctccagacatttgcaattggcatggaagacagccccgatttactggctgctagaaaggtggcagatcatattggaagtgaacattatgaagtcctttttaactctgaggaaggcattcaggctctggatgaagtcatattttccttggaaacttatgacattacaacagttcgtgcttcagtaggtatgtatttaatttccaagtatattcggaagaacacagatagcgtggtgatcttctctggagaaggatcagatgaacttacgcagggttacatatattttcacaaggattggagagggagaaagaaaaactgctttgtgtgccaaaagcaaaactcttggtgtttttgtttgtgaaataggctccttctcctgaaaaagccgaggaggagagtgagaggcttctgagggaactctatttgtttgatgttctccgcgcagatcgaactactgctgcccatggtcttgaactgagagtcccatttctagatcatcgattttcttcctattacttgtctctgccaccagaaatgagaattccaaagaatgggatagaaaaacatctcctgagagagacgtttgaggattccaatctgatacccaaagagattctctggcgaccaaaagaagccttcagtgatggaataacttcagttaagaattcctggtttaagattttacaggaatacgttgaacatcaggttgatgatgcaatgatggcaaatgcagcccagaaatttcccttcaatactcctaaaaccaaagaaggatattactaccgtcaagtctttgaacgccattacccaggccgggctgactggctgagccattactggatgcccaagtggatcaatgccactgacccttctgcccgcacgctgacccactacaagtcagctgtcaaagcttaggtggtctttatgctgtaatgtgaaagcaaatatttcttcgtgttggatggggactgtgggtagataggggaacaatgagagtcaactcaggctaacttgggtgtgaaaaaaataaaagtcctaaatctaaaccattgctgt

SEQ ID NO: 6916 - protein, 401 aa, Homo sapiens
MCGIWALFGSDDCLSVQCLSAMKIAHRGPDAFRFENVNGYTNCCFGFHRLAVVDPLFGMQPIRVKKYPYLWLCYNGEIYNHKKMQQHFEFEYQTKVDGEIILHLYDKGGIEQTICMLDGVFAFVLLDTANKKVFLGRDTYGVRPLFKAMTEDGFLAVCSEAKGLVTLKHSATPFLKVEPFLPGHYEVLDLKPNGKVASVEMVKYHHCRDVPLHALYDNVEKLFPGFEIETVKNNLRILFNNAVKKRLMTDRRIGCLLSGGLDSSLVAATLLKQLKEAQVQYPLQTFAIGMEDSPDLLAARKVADHIGSEHYEVLFNSEEGIQALDEVIFSLETYDITTVRASVGMYLISKYIRKNTDSVVIFSGEGSDELTQGYIYFHKDWRGRKKNCFVCQKQNSWCFCL

SEQ ID NO: 6917 - DNA, 531 bp, Homo sapiens
ttacctgatgctcctttttttgtcacgtcagaatgggatagaaaaacatctcctgagagagacgtttgaggattccaatctgatacccaaagagattctctggcgaccaaaagaagccttcagtgatggaataacttcagttaagaattcctggtttaagattttacaggaatacgttgaacatcaggttgatgatgcaatgatggcaaatgcagcccagaaatttcccttcaatactcctaaaaccaaagaaggatattactaccgtcaagtctttgaacgccattacccaggccgggctgactggctgagccattactggatgcccaagtggatcaatgccactgacccttctgcccgcacgctgacccactacaagtcagctgtcaaagcttaggtggtctttatgctgtaatgtgaaagcaaatatttcttcgtgttggatggggactgtgggtagataggggaacaatgagagtcaactcaggctaacttgggtgtgaaaaaaataaaagtcctaaatctaaacca

SEQ ID NO: 6918 - protein, 129 aa, Homo sapiens [sequence omitted]

SEQ ID NO: 6919 - DNA, 2165 bp, Homo sapiens
ctccacaccacgaaagatccatcccggaagtgcttactggtcgtctccatgcgccggttcctgggcgtcttagagccaaggcgcgaggctcggagtgagaggtagagctggaggggaccctaagcgccctccgcccgggacgtgagccgctgcgcccaccgggctagacccggcgccatcatgctgcttctgccaagcgccgcggacggccggggcaccgccatcacccacgctctgacctctgcctctacactctgtcaagttgaacctgtgggaagatggtttgaagcttttgttaagaggagaaacagaaatgcttctgcctcttttcaggaactggaggataagaaagagttatccgaggaatcagaagatgaagaattgcagttggaagagtttcccatgctgaaaacacttgatcccaaagactggaagaaccaagatcattatgcagttcttggacttggccatgtgagatacaaggctacacagagacagatcaaagcagctcataaagcaatggttttaaaacatcacccagacaaacggaaagcagctggtgaaccaataaaagaaggagataatgactacttcacttgcataactaaagcttatgaaatgttatctgatccagtgaaaagacgagcatttaacagtgtagatcctacttttgataactcagttccttctaaaagtgaagcaaaggataatttcttcgaagtgtttaccccagtgtttgaaaggaattccagatggtcaaataaaaaaaatgttcctaaacttggtgatatgaattcatcatttgaagatgtagatatattttattctttctggtataattttgattcttggagagaattttcttatttagatgaagaagaaaaagaaaaagcagaatgtcgtgatgagaggagatggattgaaaagcagaacagagcaacaagagcacaaagaaaaaaagaagaaatgaacagaataagaacattagttgacaatgcatacagctgtgatccaaggataaaaaagttcaaggaagaagaaaaagccaagaaagaagcagaaaagaaagcaaaagcagaagctaaacggaaggagcaagaagctaaagaaaaacaaagacaagctgaattagaagctgctcggttagctaaggagaaagaagaggaggaagtcagacagcaagcattgctggcaaagaaggaaaaagatatccagaaaaaagccattaagaaggaaaggcaaaaacttcgaaactcatgcaagatagaagaaataaatgagcaaatcagaaaagagaaagaggaagctgaggctcgtatgcgacaagcatctaagaacacagagaaatcaactggtggaggtggaaatggaagtaaaaattggtcagaagatgatctacaattactaattaaagctgtgaatctgttccctgctggaacaaattcaagatgggaagttattgctaattacatgaacatacattcttcctctggagtcaaaagaactgccaaagatgttattggcaaagcaaagagtctccaaaaacttgaccctcatcaaaaagatgacataaataaaaaggcatttgataagttcaaaaaagaacatggagtggtacctcaagcagacaacgcaacgccttcagaacgatttgaaggtccatatacagacttcaccccttggacaacagaagaacagaagcttttggaacaagctttgaaaacatacccagtaaatacacctgaaagatgggaaaaaatagcagaagcggtgcctggcaggacaaagaaggactgcatgaaacgatacaaggaacttgtcgagatggtaaaagcaaagaaagctgctcaagaacaagtgctgaatgcaagtagagccaagaaatgacaatctttgttgtgtgtgcatttttataataaaactgaaaatactgtaaacattttcattcttaaaattatactcatggtaataatttgaaagtatgctgcttccaacataatttctcagagaacaaagactgaccattaatacaaaacaaccttcagaggggtagtctttttatcctttgaaagtatgatacagtatttaattcaaatttccaaatgtatatacatgttcatttttatttttctctagctctgttttataaatacatgtgttcaaac

SEQ ID NO: 6920 - protein, 568 aa, Homo sapiens
MLLLPSAADGRGTAITHALTSASTLCQVEPVGRWFEAFVKRRNRNASASFQELEDKKELSEESEDEELQLEEFPMLKTLDPKDWKNQDHYAVLGLGHVRYKATQRQIKAAHKAMVLKHHPDKRKAAGEPIKEGDNDYFTCITKAYEMLSDPVKRRAFNSVDPTFDNSVPSKSEAKDNFFEVFTPVFERNSRWSNKKNVPKLGDMNSSFEDVDIFYSFWYNFDSWREFSYLDEEEKEKAECRDERRWIEKQNRATRAQRKKEEMNRIRTLVDNAYSCDPRIKKFKEEEKAKKEAEKKAKAEAKRKEQEAKEKQRQAELEAARLAKEKEEEEVRQQALLAKKEKDIQKKAIKKERQKLRNSCKIEEINEQIRKEKEEAEARMRQASKNTEKSTGGGGNGSKNWSEDDLQLLIKAVNLFPAGTNSRWEVIANYMNIHSSSGVKRTAKDVIGKAKSLQKLDPHQKDDINKKAFDKFKKEHGVVPQADNATPSERFEGPYTDFTPWTTEEQKLLEQALKTYPVNTPERWEKIAEAVPGRTKKDCMKRYKELVEMVKAKKAAQEQVLNASRAKK

SEQ ID NO: 6921 - DNA, 1981 bp, Homo sapiens
ctccacaccacgaaagatccatcccggaagtgcttactggtcgtctccatgcgccggttcctgggcgtcttagagccaaggcgcgaggctcggagtgagaggtagagctggaggggaccctaagcgccctccgcccgggacgtgagccgctgcgcccaccgggctagacccggcgccatcatgctgcttctgccaagcgccgcggacggccggggcaccgccatcacccacgctctgacctctgcctctacactctgtcaagttgaacctgtgggaagatggtttgaagcttttgttaagaggagaaacagaaatgcttctgcctcttttcaggaactggaggataagaaagagttatccgaggaatcagaagatgaagaattgcagttggaagagtttcccatgctgaaaacacttgatcccaaagactggaagaaccaagatcattatgcagttcttggacttggccatgtgagatacaaggctacacagagacagatcaaagcagctcataaagcaatggttttaaaacatcacccagacaaacggaaagcagctggtgaaccaataaaagaaggagataatgactacttcacttgcataactaaagcttatgaaatgttatctgatccagtgaaaagacgagcatttaacagtgtagatcctacttttgataactcagttccttctaaaagtgaagcaaaggataatttcttcgaagtgtttaccccagtgtttgaaaggaattccagatggtcaaataaaaaaaatgttcctaaacttggtgatatgaattcatcatttgaagatgtagatatattttattctttctggtataattttgattcttggagagaattttcttatttagatgaagaagaaaaagaaaaagcagaatgtcgtgatgagaggagatggattgaaaagcagaacagagcaacaagagcacaaagaaaaaaagaagaaatgaacagaataagaacattagttgacaatgcatacagctgtgatccaaggataaaaaagttcaaggaagaagaaaaagccaagaaagaagcagaaaagaaagcaaaagcagaagctaaacggaaggagcaagaagctaaagaaaaacaaagacaagctgaattagaagctgctcggttagctaaggagaaagaagaggaggaagtcagacagcaagcattgctggcaaagaaggaaaaagatatccagaaaaaagccattaagaaggaaaggcaaaaacttcgaaactcatgcaagatagaagaaataaatgagcaaatcagaaaagagaaagaggaagctgaggctcgtatgcgacaagcatctaagaacacagagaaatcaactggtggaggtggaaatggaagtaaaaattggtcagaagatgatctacaattactaattaaagctgtgaatctgttccctgctggaacaaattcaagatgggaagttattgctaattacatgaacatacattcttcctctggagtcaaaagaactgccaaagatgttattggcaaagcaaagagtctccaaaaacttgaccctcatcaaaaagatgacataaataaaaaggcatttgataagttcaaaaaagaacatggagtggtacctcaagcagacaacgcaacgccttcagaacgatttgaaggtccatatacagacttcaccccttggacaacagaagaacagaagcttttggaacaagctttgaaaacatacccagtaaatacacctgaaagatgggaaaaaatagcagaagcggtgcctggcaggacaaagaaggactgcatgaaacgatacaaggaacttgtcgagatggtaaaagcaaagaaagctgctcaagaacaagtgctgaatgcaagtagagccaagaaatgacaatctttgttgtgtgtgcatttttataataaaactgaaaatactgtaaacattttcattcttaaaattatactcatggtaataatttgaaagt

SEQ ID NO: 6922 - protein, 568 aa, Homo sapiens; identical to SEQ ID NO: 6920

SEQ ID NO: 6923 - DNA, 3030 bp, Homo sapiens
gggggtgggagggtgtgagactggcctccacaccacgaaagatccatcccggaagtgcttactggtcgtctccatgcgccggttcctgggcgtcttagagccaaggcgcgaggctcggagtgagaggtagagctggaggggaccctaagcgccctccgcccgggacgtgagccgctgcgcccaccgggctagacccggcgccatcatgctgcttctgccaagcgccgcggacggccggggcaccgccatcacccacgctctgacctctgcctctacactctgtcaagttgaacctgtgggaagatggtttgaagcttttgttaagaggagaaacagaaatgcttctgcctcttttcaggaactggaggataagaaagagttatccgaggaatcagaagatgaagaattgcagttggaagagtttcccatgctgaaaacacttgatcccaaagactggaagaaccaagatcattatgcagttcttggacttggccatgtgagatacaaggctacacagagacagatcaaagcagctcgtaagtacttagttattttgaaataatcaaatatcttgtataggaacaggctggctatgctttttaaaagatatacagtatcatagtctgcagccataactacatttaacagcatgtgttatattgtcataacaagcaaaaaaccacggtctcccctgccttcagaatcagaagaaagcaatccattttacatatagactttcccattagggataagaaattaggatgggtgtgtgtgtgtggatacaaaatactcctccaatggcaagcttttaaaaaataatacttcacctctctttagaagtatagcagctgcacttagtggatactgcctttttattgttttttggtttttggttttttttttacgttattttgtaatcttaggtcacacctttgtagatatcaccctgtcttctgtccaagaaaagttgtctgatgttttattgttgttttcattgacaaggttataatttggcatgggagagggtaatgttgggaccccagtcttcatatgccttataaaacaccatcccttaatgctcctaaatgtcctatgctttgcaatcctgtggacataatttcttatacacgtgatcagttcaactgattaataaagtttagtgaaagaggtaagaggtgaaggtgatcagttttctatcttaggagaatgttctgccctccactctagagaatggatattgaggtcagagagggtaagattgtggccacatggaaaaggagcagggagtcagggcctgtcaagaagaggaagtattatatgtggaggaagatgactgaataagaatgcctgtggtaaaaattattagtcaatacttagcatagtagatgaactcaaaatcgtccccattactgcttacatttaggaaaatcacaggaaatattttttaacaaagtgaaggaatttatcagattattttaaactggatttgtttaaaggctggcatgagtctagacaaagcatatggtaatgcatgtgaatagttattccagtataaataaatgccagaaaagtccatttgccacgtacaagtgtttgcaaagttttactatacgaaagaatagcattggccgggcgtggtggctcacgcctataatcccaacactttgggaggccgagacgggttgatcacctgaggtgaggaatatgagaccagcctggccaacgtggagaaacaccgtctctactaaaaatacaaaaaaattagctgggtgtggtggtgggcacctgtattcccagctacttgggaggctgaggcaggagaattgcttgaacccaggaggcagaggttgcagtgagccgaggtcgcaccattgcgctccagcctgggcaacaagagcgacactctgtttccgaaaaaatagaatagcatacaaataccaaatatgtcttagtacagataaatttgttaattagaattgataatagaactgtgagaatagtttgtgttttaaggtgaaagaattctttctcagaagattaaaaatgtgcaataaattgtaaaagaagcattcatatgcttctgttaaatccactgtctttttttgagacagaatttcgtacttgttgcgcaggctggagtgcaatggcaccatcttggctcaccacaacctccgcctcccaggttcaagcgattctcctgcctcagcctcttgagtagctgggattagaggcatgtgccaccacgcccggctaattttgtatttttcatagagacgggatttcaccatgttggtcaggctggtctcgaactcccgacctcaggtgatccacccacatcggcctcccagaatgctgggattacaggcgtgagccaccgcacccagcctaaatccactctttttattggccttgtagaaattgatttttagccaggcacagtgggtcacacctgtaatcccaacactttggaagaccaaggcaggcagattacttgaggctggagttcaatactagcccggccaatgtggtgaaaccccatctctactaaaaatacaaaaattagccaggtgcggtggcgcatgcctgtaagcccaactacttgggaggctgaggcatgagaatcgcttgaacctgggaggcggaagttgcagtgagcgaagattgtaccactgcagtccaacctgagcaacagagtgagagagtgagactctgtctcattaaaaaaaaaaaaaagaaagaaagaaagaaaagaaattcagcttttgaatatgtattctctagccaaaaattttgcagcaccagtgtagagattgttaacaataagggtaattctaacttactctctaccacccttgtggaatattccgtcagtctttatttagaaagaaactgtcattctctcacctctgtcactgtaaaacacagttgctactcattgctttctgaaaatctatctaaaagttaaaatgcaaagttactgtttgcaaatctataattattagcacaaacctaataaaaatgtaaatctgg

SEQ ID NO: 6924 - protein, 118 aa, Homo sapiens
MLLLPSAADGRGTAITHALTSASTLCQVEPVGRWFEAFVKRRNRNASASFQELEDKKELSEESEDEELQLEEFPMLKTLDPKDWKNQDHYAVLGLGHVRYKATQRQIKAARKYLVILK

SEQ ID NO: 6925 - DNA, 768 bp, Homo sapiens
aaaaacaataaaaaggcagtatccactaagtgcagctgctatacttctaaagagaggtgaagtattattttttaaaagcttgccattggaggagtattttgtatccacacacacacacccatcctaatttcttatccctaatgggaaagtctatatgtaaaatggattgctttcttctgattctgaaggcaggggagaccgtggttttttgcttgttatgacaatataacacatgctgttaaatgtagttatggctgcagactatgatactgtatatcttttaaaaagcatagccagcctgttcctatacaagatatttgattatttcaaaataactaagtacttacgagctgctttgatctgtctctgtgtagccttgtatctcacatggccaagtccaagaactgcataatgatcttggttctggaaaaaaaacacaaaagggagtcaaatttgaaatgaagccaatatattccatcccttgtgttctggtaccttaataagcatttcccaaagtgacatttcatcaggagtccagtaagaggttctgtataaaccagggtctatggtcaggtaaggttgagaaatgtggattaggctgggtgccatggttcatgcctgtaatcctagcactttgggaggcccaggtggaggattgcttgagcccaggaatatgaggccagcctgggcaacagagtgagactccgtctcaaaataaaataaaataaaaaataaatttaaaaaagaggtaaatgtggactattatac

SEQ ID NO: 6926 - protein, 37 aa, Homo sapiens [sequence omitted]

SEQ ID NO: 6927 - DNA, 1730 bp, Homo sapiens
ctggggtgctggggggttccgtcccgaaatgctcagcccaatccatgagtcagcagcggcgagaggaggaagcaacggtaatcagtccaaaaaccagcgtgccaaagcgtttccccagggctctgtccggactctgaagcactgcataaaggggtctgtctgagcccaatttacttccggtggggaagggaaagggaagacaccaccggaagcaaggaaggtgctgtgtaatcattaaggagcggaggcttttggagctgctaaaatgccggattacctcggtgccgatcagcggaagaccaaagaggatgagaaggacgacaagcccatccgagctctggatgagggggatattgccttgttgaaaacttatggtcagagcacttactctaggcagatcaagcaagttgaagatgacattcagcaacttctcaagaaaattaatgagctcactggtattaaagaatctgacactggcctggccccaccagcactctgggatttggctgcagataagcagacactccagagtgaacagcctttacaggttgccaggtgtacaaagataatcaatgctgattcggaggacccaaaatacattatcaacgtaaagcagtttgccaagtttgtggtggaccttagtgatcaggtggcacctactgacattgaagaagggatgagagtgggcgtggatagaaataaatatcaaattcacattccattgcctcctaagattgacccaacagttaccatgatgcaggtggaagagaaacctgatgtcacatacagtgatgttggtggctgtaaggaacagattgagaaactgcgagaagtagttgaaaccccattacttcatccagagaggtttgtgaaccttggcattgagcctcccaagggcgtgctgctctttggtccacccggtacaggcaagacactctgtgcgcgggcagttgctaatcggactgatgcgtgcttcattcgagttattggatctgagcttgtacagaaatacgtcggtgagggggctcgaatggttcgtgaactctttgaaatggccagaacaaaaaaagcctgccttatcttctttgatgaaattgatgctattggaggggctcgttttgatgatggtgctggaggtgacaatgaagtgcagagaacaatgttggaactgatcaatcagcttgatggttttgatcctagaggcaatattaaagtgctgatggccactaacagacctgatactttggatccagcactgatgaggccagggagattggatagaaaaattgaatttagcttgcccgatctagagggtcggacccacatatttaagattcacgctcgttcaatgagtgttgaaagagatatcagatttgaactgttagcacgactgtgtccaaatagcactggtgctgagattagaagcgtctgcacagaggctggtatgtttgccatcagagcacggcgaaaaattgctaccgagaaggatttcttggaagctgtaaataaggtcattaagtcttatgccaaattcagtgctactcctcgttacatgacatacaactgaaccctgaaggctttcaagtgaaaactttaaattggaatcctaaccttatatagacttgttaataaccaattcataaacaaataaatggcttcaaaattgtatgcttttttccatatctcttcttgtaatataataaaaggtgatttctaatgttattaggcag

SEQ ID NO: 6928 - protein, 433 aa, Homo sapiens; identical to SEQ ID NO: 927

SEQ ID NO: 6929 - DNA, 1947 bp, Homo sapiens
aggcagcggctgtggagcgcggcggggcggctccgcccagggcagcccgggctgggccaaggagcgagctctcccttctcctgctctcagcctcagtgatcaaggcttcagtgaactgcactggagctcccagcgggggatcttgtcccctgtcccgacttttgtgctgcacattggatctggtgacactcaggaaatgcttgtctccggctgttaaggaataatttcagagtactatggatcatgctgaagaaaatgaaatccttgcagcaacccagaggtactatgtggaaaggcctatctttagtcatccggtcctccaggaaagactacacacaaaggacaaggttcctgattccattgcggataagctgaaacaggcattcacatgtactcctaaaaaaataagaaatatcatttatatgttcctacccataactaaatggctgccagcatacaaattcaaggaatatgtgttgggtgacttggtctcaggcataagcacaggggtgcttcagcttcctcaaggcttagcctttgcaatgctggcagctgtgcctccaatatttggcctgtactcttcattttaccctgttatcatgtattgttttcttggaacctccagacacatatccataggtccttttgctgttattagcctgatgattggtggtgtagctgttcgattagtaccagatgatatagtcattccaggaggagtaaatgcaaccaatggcacagaggccagagatgccttgagagtgaaagtcgccatgtctgtgaccttactttcaggaatcattcagttttgcctaggtgtctgtaggtttggatttgtggccatatatctcacagagcctctggtccgtgggtttaccaccgcagcagctgtgcatgtcttcacctccatgttaaaatatctgtttggagttaaaacaaagcggtacagtggaatcttttccgtggtgtatagtacagttgctgtgttgcagaatgttaaaaacctcaacgtgtgttccctaggcgtcgggctgatggtttttggtttgctgttgggtggcaaggagtttaatgagagatttaaagagaaattgccggcgcctattcctttagagttctttgcggtcgtaatgggaactggcatttcagctgggtttaacttgaaagaatcatacaatgtggatgtcgttggaacacttcctctagggctgctacctccagccaatccggacaccagcctcttccaccttgtgtacgtagatgccattgccatagccatcgttggattttcagtgaccatctccatggccaagaccttagcaaataaacatggctaccaggttgacggcaatcaggagctcattgccctgggactgtgcaattccattggctcactcttccagaccttttcaatttcatgctccttgtctcgaagccttgttcaggagggaaccggtgggaagacacagcttgcaggttgtttggcctcattaatgattctgctggtcatattagcaactggattcctctttgaatcattgccccaggctgtgctgtcggccattgtgattgtcaacctgaagggaatgtttatgcagttctcagatctcccctttttctggagaaccagcaaaatagagctgaccatctggcttaccacttttgtgtcctccttgttcctgggattggactatggtttgatcactgctgtgatcattgctctgctgactgtgatttacagaacacagagctttcatacagagatgaccagaagatggagaccgtaggggaaatgccgtgtaatccaagcagttcaggctttggggccaggtggacagggtttgaatgccagctctggaatctgttagtggggtgacctcagccaagtcacttaacacttctgaactttgttttctcttttgtgaaataaagaaaaaatgaatctac

SEQ ID NO: 6930 - protein, 516 aa, Homo sapiens; identical to SEQ ID NO: 933

SEQ ID NO: 6931 - DNA, 2474 bp, Homo sapiens
aggcagcggctgtggagcgcggcggggcggctccgcccagggcagcccgggctgggccaaggagcgagctctcccttctcctgctctcagcctcagtgatcaaggcttcagtgaactgcactggagctcccagcgggggatcttgtcccctgtcccgacttttgtgctgcacattggatctggtgacactcaggaaatgcttgtctccggctgttaaggaataatttcagagtactatggatcatgctgaagaaaatgaaatccttgcagcaacccagaggtactatgtggaaaggcctatctttagtcatccggtcctccaggaaagactacacacaaaggacaaggttcctgattccattgcggataagctgaaacaggcattcacatgtactcctaaaaaaataagaaatatcatttatatgttcctacccataactaaatggctgccagcatacaaattcaaggaatatgtgttgggtgacttggtctcaggcataagcacaggggtgcttcagcttcctcaaggcttagcctttgcaatgctggcagctgtgcctccaatatttggcctgtactcttcattttaccctgttatcatgtattgttttcttggaacctccagacacatatccataggtccttttgctgttattagcctgatgattggtggtgtagctgttcgattagtaccagatgatatagtcattccaggaggagtaaatgcaaccaatggcacagaggccagagatgccttgagagtgaaagtcgccatgtctgtgaccttactttcaggaatcattcagttttgcctaggtgtctgtaggtttggatttgtggccatatatctcacagagcctctggtccgtgggtttaccaccgcagcagctgtgcatgtcttcacctccatgttaaaatatctgtttggagttaaaacaaagcggtacagtggaatcttttccgtggtgtatagtacagttgctgtgttgcagaatgttaaaaacctcaacgtgtgttccctaggcgtcgggctgatggtttttggtttgctgttgggtggcaaggagtttaatgagagatttaaagagaaattgccggcgcctattcctttagagttctttgcggtcgtaatgggaactggcatttcagctgggtttaacttgaaagaatcatacaatgtggatgtcgttggaacacttcctctagggctgctacctccagccaatccggacaccagcctcttccaccttgtgtacgtagatgccattgccatagccatcgttggattttcagtgaccatctccatggccaagaccttagcaaataaacatggctaccaggttgacggcaatcaggagctcattgccctgggactgtgcaattccattggctcactcttccagaccttttcaatttcatgctccttgtctcgaagccttgttcaggagggaaccggtgggaagacacagcttgcaggttgtttggcctcattaatgattctgctggtcatattagcaactggattcctctttgaatcattgccccaggctgtgctgtcggccattgtgattgtcaacctgaagggaatgtttatgcagttctcagatctcccctttttctggagaaccagcaaaatagagctgaccatctggcttaccacttttgtgtcctccttgttcctgggattggactatggtttgatcactgctgtgatcattgctctgctgactgtgatttacagaacacagagtccaagctacaaagtccttggaaagcttcctgaaactgatgtgtatattgatatagacgcatatgaggaggtgaaagaaattcctggaataaaaatatttcaaataaatgcaccaatttactatgcaaatagcgacttgtatagcaatgcattaaaacgaaagactggagtgaacccagcagtcatcatgggagcaaggagaaaggccatgcggaagtacgctaaggaagtcggaaatgcaaatatggccaacgcaactgttgtcaaagcagatgcagaagtagatggagaggatgctaccaagcctgaagaagaggatggtgaagtaaaatatcccccaatagtgatcaaaagcacatttcctgaggaaatgcaaagatttatgcccccaggggataacgtccacactgtcattttggatttcactcaagtcaattttattgattctgttggagtgaaaactctggcagggattgtaaaagaatatggagacgtcggtatatatgtatacttagcaggatgcagtgctttcatacagagatgaccagaagatggagaccgtaggggaaatgccgtgtaatccaagcagttcaggctttggggccaggtggacagggtttgaatgccagctctggaatctgttagtggggtgacctcagccaagtcacttaacacttctgaactttgttttctcttttgtgaaataaagaaaaaatgaatctac

SEQ ID NO: 6932 - protein, 685 aa, Homo sapiens; identical to SEQ ID NO: 931

SEQ ID NO: 6933 - DNA, 1404 bp, Homo sapiens
aggcagcggctgtggagcgcggcggggcggctccgcccagggcagcccgggctgggccaaggagcgagctctcccttctcctgctctcagcctcagtgatcaaggcttcagtgaactgcactggagctcccagcgggggatcttgtcccctgtcccgacttttgtgctgcacattggatctggtgacactcaggaaatgcttgtctccggctgttaaggaataatttcagagtactatggatcatgctgaagaaaatgaaatccttgcagcaacccagaggtactatgtggaaaggcctatctttagtcatccggtcctccaggaaagactacacacaaaggacaaggttcctgattccattgcggataagctgaaacaggcattcacatgtactcctaaaaaaataagaaatatcatttatatgttcctacccataactaaatggctgccagcatacaaattcaaggaatatgtgttgggtgacttggtctcaggcataagcacaggggtgcttcagcttcctcaaggcttagcctttgcaatgctggcagctgtgcctccaatatttggcctgtactcttcattttaccctgttatcatgtattgttttcttggaacctccagacacatatccataggtccttttgctgttattagcctgatgattggtggtgtagctgttcgattagtaccagatgatatagtcattccaggaggagtaaatgcaaccaatggcacagaggccagagatgccttgagagtgaaagtcgccatgtctgtgaccttactttcaggaatcattcagttttgcctaggtgtctgtaggtttggatttgtggccatatatctcacagagcctctggtccgtgggtttaccaccgcagcagctgtgcatgtcttcacctccatgttaaaatatctgtttggagttaaaacaaagcggtacagtggaatcttttccgtggtgtatagtacagttgctgtgttgcagaatgttaaaaacctcaacgtgtgttccctaggcgtcgggctgatggtttttggtttgctgttgggtggcaaggagtttaatgagagatttaaagagaaattgccggcgcctattcctttagagttctttgcggtcgtaatgggaactggcatttcagctgggtttaacttgaaagaatcatacaatgtggatgtcgttggaacacttcctctaggctttcatacagagatgaccagaagatggagaccgtaggggaaatgccgtgtaatccaagcagttcaggctttggggccaggtggacagggtttgaatgccagctctggaatctgttagtggggtgacctcagccaagtcacttaacacttctgaactttgttttctcttttgtgaaataaagaaaaaatgaatctac

SEQ ID NO: 6934 - protein, 335 aa, Homo sapiens; identical to SEQ ID NO: 935

SEQ ID NO: 6935 - DNA, 840 bp, Homo sapiens
atttaaaaaagaaagaagaaactggttagccagagaggtttgtgaaccttggcattgagcctcccaagggcgtgctgctctttggtccacccggtacaggcaagacactctgtgcgcgggcagttgctaatcggactgatgcgtgcttcattcgagttattggatctgagcttgtacagaaatacgtcggtgagggggctcgaatggttcgtgaactctttgaaatggccagaacaaaaaaagcctgccttatcttctttgatgaaattgatgctattggaggggctcgttttgatgatggtgctggaggtgacaatgaagtgcagagaacaatgttggaactgatcaatcagcttgatggttttgatcctagaggcaatattaaagtgctgatggccactaacagacctgatactttggatccagcactgatgaggccagggagattggatagaaaaattgaatttagcttgcccgatctagagggtcggacccacatatttaagattcacgctcgttcaatgagtgttgaaagagatatcagatttgaactgttagcacgactgtgtccaaatagcactggtgctgagattagaagcgtctgcacagaggctggtatgtttgccatcagagcacggcgaaaaattgctaccgagaaggatttcttggaagctgtaaataaggtcattaagtcttatgccaaattcagtgctactcctcgttacatgacatacaactgaaccctgaaggctttcaagtgaaaactttaaattggaatcctaaccttatatagacttgttaataaccaattcataaacaaataaatggcttcaaaattgt

SEQ ID NO: 6936 - protein, 178 aa, Homo sapiens
MVRELFEMARTKKACLIFFDEIDAIGGARFDDGAGGDNEVQRTMLELINQLDGFDPRGNIKVLMATNRPDTLDPALMRPGRLDRKIEFSLPDLEGRTHIFKIHARSMSVERDIRFELLARLCPNSTGAEIRSVCTEAGMFAIRARRKIATEKDFLEAVNKVIKSYAKFSATPRYMTYN

SEQ ID NO: 6937 - DNA, 903 bp, Homo sapiens
atttaaaaaagaaagaagaaactggttagccagagaggtttgtgaaccttggcattgagcctcccaagggcgtgctgctctttggtccacccggtacaggcaagacactctgtgcgcgggcagttgctaatcggactgatgcgtgcttcattcgagttattggatctgagcttgtacagaaatacgtcggtgagggggctcgaatggttcgtgaactctttgaaatggccagaacaaaaaaagcctgccttatcttctttgatgaaattgatgctattggaggggctcgttttgatgatggtgctggaggtgacaatgaagtgcagagaacaatgttggaactgatcaatcagcttgatggttttgatcctagaggcaatattaaagtgctgatggccactaacagacctgatactttggatccagcactgatgaggccagggagattggatagaaaaattgaatttagcttgcccgatctagagggtcggacccacatatttaagattcacgctcgttcaatgagtgttgaaagagatatcagatttgaactgttagcacgactgtgtccaaatagcactggtgctgagattagaagcgtctgcacagaggctggtatgtttgccatcagagcacggcgaaaaattgctaccgagaaggatttcttggaagctgtaaataaggtcattaagtcttatgccaaattcagtgctactcctcgttacatgacatacaactgaaccctgaaggctttcaagtgaaaactttaaattggaatcctaaccttatatagacttgttaataaccaattcataaacaaataaatggcttcaaaattgtatgcttttttccatatctcttcttgtaatataataaaaggtgatttctaatgttattaggcag

SEQ ID NO: 6938 - protein, 178 aa, Homo sapiens; identical to SEQ ID NO: 6936

SEQ ID NO: 6939 - DNA, 2080 bp, Homo sapiens
atttaaaaaagaaagaagaaactggttagccagagaggtttgtgaaccttggcattgagcctcccaagggcgtgctgctctttggtccacccggtacaggcaagacactctgtgcgcgggcagttgctaatcggactgatgcgtgcttcattcgagttattggatctgagcttgtacagaaatacgtcggtgagggggctcgaatggttcgtgaactctttgaaatggccagaacaaaaaaagcctgccttatcttctttgatgaaattgatgctattggaggggctcgttttgatgatggtgctggaggtgacaatgaagtgcagagaacaatgttggaactgatcaatcagcttgatggttttgatcctagaggcaatattaaagtgctgatggccactaacagacctgatactttggatccagcactgatgaggccagggagattggatagaaaaattgaatttagcttgcccgatctagagggtcggacccacatatttaagattcacgctcgttcaatgagtgttgaaagagatatcagatttgaactgttagcacgactgtgtccaaatagcactggtgctgagattagaagcgtctgcacagaggctggtatgtttgccatcagagcacggcgaaaaattgctaccgagaaggatttcttggaagctgtaaataaggtcattaagtcttatgccaaattcagtgctactcctcgttacatgacatacaactgaaccctgaaggctttcaagtgaaaactttaaattggaatcctaaccttatatagacttgttaataaccaattcataaacaaataaatggcttcaaaattgtatgcttttttccatatctcttcttgtaatataataaaaggtgatttctaatgttattaggcagaaaagcttgttagaatatattttgactatttttttgacccacacccgtttaaggatttcacatcatacaaagcgcttgcttagatggcttctatcctaggcatatgctggccgggtgctctacatataaattctcattgtatcctcccatctgtccactgaggaagattatcaaatggatcttcatccaatggatgcataaactttcctacttacttgtagtggcaaagctggctttcaagtacaagtttgttggctccattacctatgctcctattatccgcttctgtcccgcaacaaagtagctcacttaggcgtatgaccacatgcattatgatagtttcccaccaccatattgaataataaaagctttggccaaagcttttttaaagtaggagaaacattggatgtatatgttttgcattgccatttgatttcaaattaatcaggaagaattagtgattttaatgagcagtaaagtggtgcaataaagcagaaagaaaaatgttcagccagaagtgaaagactagtaaaaaaagaaaaaaaaatatttgtacatatgatctaatttagaaagtccagaattggcttcatacagaaaagtgattactttcattttacaaattactttaaaattttggtaaagtttctgttaggcttctggtctacagtgaggtattttaaaaataaaggttatattagaatcctcaacatctctttaaaattacctcctgtgtaaccaccaccaaatcctatcttctaccacaattaccccttcccccaatgccaagaccaaagcacaataatgaatatttttattgaagttcgatattcataaataagttgcaaaataagagttggatatatttttaattcacaatagaaaaagttgacaacatagaaaatgctgctttgcactgaaatacttaaaattatgaaagttttcaagtaaagaaattaaagccttttataaaatccaaccaacattcttgatttttcatttttatgaacttgatcagaaaaattcatcttttttaaccctgccctaatttttcttgaggaattaaatagagcaaactattttcaggttatgcttacaataaaatatacttaagaaaatgactgaagatgtatgtttttgaatgttttgattaaataaatgtacacatttagaacac

SEQ ID NO: 6940 - protein, 178 aa, Homo sapiens; identical to SEQ ID NO: 6936

SEQ ID NO: 6941 - DNA, 2660 bp, Homo sapiens
aggcagcggctgtggagcgcggcggggcggctccgcccagggcagcccgggctgggccaaggagcgagctctcccttctcctgctctcagcctcagtgatcaaggcttcagtgaactgcactggagctcccagcgggggatcttgtcccctgtcccgacttttgtgctgcacattggatctggtgacactcaggaaatgcttgtctccggctgttaaggaataatttcagagtactatggatcatgctgaagaaaatgaaatccttgcagcaacccagaggtactatgtggaaaggcctatctttagtcatccggtcctccaggaaagactacacacaaaggacaaggttcctgattccattgcggataagctgaaacaggcattcacatgtactcctaaaaaaataagaaatatcatttatatgttcctacccataactaaatggctgccagcatacaaattcaaggaatatgtgttgggtgacttggtctcaggcataagcacaggggtgcttcagcttcctcaaggcttagcctttgcaatgctggcagctgtgcctccaatatttggcctgtactcttcattttaccctgttatcatgtattgttttcttggaacctccagacacatatccataggtccttttgctgttattagcctgatgattggtggtgtagctgttcgattagtaccagatgatatagtcattccaggaggagtaaatgcaaccaatggcacagaggccagagatgccttgagagtgaaagtcgccatgtctgtgaccttactttcaggaatcattcagttttgcctaggtgtctgtaggtttggatttgtggccatatatctcacagagcctctggtccgtgggtttaccaccgcagcagctgtgcatgtcttcacctccatgttaaaatatctgtttggagttaaaacaaagcggtacagtggaatcttttccgtggtgtatagtacagttgctgtgttgcagaatgttaaaaacctcaacgtgtgttccctaggcgtcgggctgatggtttttggtttgctgttgggtggcaaggagtttaatgagagatttaaagagaaattgccggcgcctattcctttagagttctttgcggtcgtaatgggaactggcatttcagctgggtttaacttgaaagaatcatacaatgtggatgtcgttggaacacttcctctagggctgctacctccagccaatccggacaccagcctcttccaccttgtgtacgtagatgccattgccatagccatcgttggattttcagtgaccatctccatggccaagaccttagcaaataaacatggctaccaggttgacggcaatcaggagctcattgccctgggactgtgcaattccattggctcactcttccagaccttttcaatttcatgctccttgtctcgaagccttgttcaggagggaaccggtgggaagacacagcttgcaggttgtttggcctcattaatgattctgctggtcatattagcaactggattcctctttgaatcattgccccaggctgtgctgtcggccattgtgattgtcaacctgaagggaatgtttatgcagttctcagatctcccctttttctggagaaccagcaaaatagagctgaccatctggcttaccacttttgtgtcctccttgttcctgggattggactatggtttgatcactgctgtgatcattgctctgctgactgtgatttacagaacacagagtccaagctacaaagtccttggaaagcttcctgaaactgatgtgtatattgatatagacgcatatgaggaggtgaaagaaattcctggaataaaaatatttcaaataaatgcaccaatttactatgcaaatagcgacttgtatagcaatgcattaaaacgaaagactggagtgaacccagcagtcatcatgggagcaaggagaaaggccatgcggaagtacgctaaggaagtcggaaatgcaaatatggccaacgcaactgttgtcaaagcagatgcagaagtagatggagaggatgctaccaagcctgaagaagaggatggtgaagtaaaatatcccccaatagtgatcaaaagcacatttcctgaggaaatgcaaagatttatgcccccaggggataacgtccacactgtcattttggatttcactcaagtcaattttattgattctgttggagtgaaaactctggcagggattgtaaaagaatatggagacgtcggtatatatgtatacttagcaggatgcagtgcacaagttgtgaatgacctcactcggaatagattttttgaaaatcctgccctatgggagctgctgttccacagcattcatgatgcagttttaggcagccaacttagagaggcacttgctgaacaggaagcctcggctcccccttcccaggaggacttggagcccaatgccactcctgccactcctgaggcatagatgaggacctcaccctaggatggggttataagcctctcatgaagttcataatttacacgttttaaatactagacgctagatttttttttctaagggtgaatactagtagtccaggcttgatttggagggtgaatgacgcctagcaagatgtattgtacttgtgtttttttaattgaatacttcaaagat

SEQ ID NO: 6942 - protein, 744 aa, Homo sapiens; identical to SEQ ID NO: 929

SEQ ID NO: 6943 - DNA, 2173 bp, Homo sapiens
agagtactatggatcatgctgaagaaaatgaaatccttgcagcaacccagaggtactatgtggaaaggcctatctttagtcatccggtcctccaggaaagactacacacaaaggacaaggttcctgattccattgcggataagctgaaacaggcattcacatgtactcctaaaaaaataagaaatatcatttatatgttcctacccataactaaatggctgccagcatacaaattcaaggaatatgtgttgggtgacttggtctcaggcataagcacaggggtgcttcagcttcctcaaggcttagcctttgcaatgctggcagctgtgcctccaatatttggcctgtactcttcattttaccctgttatcatgtattgttttcttggaacctccagacacatatccataggtccttttgctgttattagcctgatgattggtggtgtagctgttcgattagtaccagatgatatagtcattccaggaggagtaaatgcaaccaatggcacagaggccagagatgccttgagagtgaaagtcgccatgtctgtgaccttactttcaggaatcattcagttttgcctaggtgtctgtaggtttggatttgtggccatatatctcacagagcctctggtccgtgggtttaccaccgcagcagctgtgcatgtcttcacctccatgttaaaatatctgtttggagttaaaacaaagcggtacagtggaatcttttccgtggtgtatagtacagttgctgtgttgcagaatgttaaaaacctcaacgtgtgttccctaggcgtcgggctgatggtttttggtttgctgttgggtggcaaggagtttaatgagagatttaaagagaaattgccggcgcctattcctttagagttctttgcggtcgtaatgggaactggcatttcagctgggtttaacttgaaagaatcatacaatgtggatgtcgttggaacacttcctctagggctgctacctccagccaatccggacaccagcctcttccaccttgtgtacgtagatgccattgccatagccatcgttggattttcagtgaccatctccatggccaagaccttagcaaataaacatggctaccaggttgacggcaatcaggagctcattgccctgggactgtgcaattccattggctcactcttccagaccttttcaatttcatgctccttgtctcgaagccttgttcaggagggaaccggtgggaagacacagcttgcaggttgtttggcctcattaatgattctgctggtcatattagcaactggattcctctttgaatcattgccccagaccatctggcttaccacttttgtgtcctccttgttcctgggattggactatggtttgatcactgctgtgatcattgctctgctgactgtgatttacagaacacagagtccaagctacaaagtccttggaaagcttcctgaaactgatgtgtatattgatatagacgcatatgaggaggtgaaagaaattcctggaataaaaatatttcaaataaatgcaccaatttactatgcaaatagcgacttgtatagcaatgcattaaaacgaaagactggagtgaacccagcagtcatcatgggagcaaggagaaaggccatgcggaagtacgctaaggaagtcggaaatgcaaatatggccaacgcaactgttgtcaaagcagatgcagaagtagatggagaggatgctaccaagcctgaagaagaggatggtgaagtaaaatatcccccaatagtgatcaaaagcacatttcctgaggaaatgcaaagatttatgcccccaggggataacgtccacactgtcattttggatttcactcaagtcaattttattgattctgttggagtgaaaactctggcagggattgtaaaagaatatggagacgtcggtatatatgtatacttagcaggatgcagtgcacaagttgtgaatgacctcactcggaatagattttttgaaaatcctgccctatgggagctgctgttccacagcattcatgatgcagttttaggcagccaacttagagaggcacttgctgaacaggaagcctcggctcccccttcccaggaggacttggagcccaatgccactcctgccactcctgaggcatagatgaggacctcaccctaggatggggt

SEQ ID NO: 6944 - protein, 712 aa, Homo sapiens
MDHAEENEILAATQRYYVERPIFSHPVLQERLHTKDKVPDSIADKLKQAFTCTPKKIRNIIYMFLPITKWLPAYKFKEYVLGDLVSGISTGVLQLPQGLAFAMLAAVPPIFGLYSSFYPVIMYCFLGTSRHISIGPFAVISLMIGGVAVRLVPDDIVIPGGVNATNGTEARDALRVKVAMSVTLLSGIIQFCLGVCRFGFVAIYLTEPLVRGFTTAAAVHVFTSMLKYLFGVKTKRYSGIFSVVYSTVAVLQNVKNLNVCSLGVGLMVFGLLLGGKEFNERFKEKLPAPIPLEFFAVVMGTGISAGFNLKESYNVDVVGTLPLGLLPPANPDTSLFHLVYVDAIAIAIVGFSVTISMAKTLANKHGYQVDGNQELIALGLCNSIGSLFQTFSISCSLSRSLVQEGTGGKTQLAGCLASLMILLVILATGFLFESLPQTIWLTTFVSSLFLGLDYGLITAVIIALLTVIYRTQSPSYKVLGKLPETDVYIDIDAYEEVKEIPGIKIFQINAPIYYANSDLYSNALKRKTGVNPAVIMGARRKAMRKYAKEVGNANMANATVVKADAEVDGEDATKPEEEDGEVKYPPIVIKSTFPEEMQRFMPPGDNVHTVILDFTQVNFIDSVGVKTLAGIVKEYGDVGIYVYLAGCSAQVVNDLTRNRFFENPALWELLFHSIHDAVLGSQLREALAEQEASAPPSQEDLEPNATPATPEA

SEQ ID NO: 6945 - DNA, 2098 bp, Homo sapiens
acctggaggcagcgcgcgcgtcgaagaggcagcggctgtggagcgcggcggggcggctccgcccagggcagcccgggctgggccaaggagcgagctctcccttctcctgctctcagcctcagtgatcaaggcttcagtgaactgcactggagctcccagcgggggatcttgtcccctgtcccgacttttgtgctgcacattggatctggtgacactcaggaaatgcttgtctccggctgttaaggaataatttcagagtactatggatcatgctgaagaaaatgaaatccttgcagcaacccagaggtactatgtggaaaggcctatctttagtcatccggtcctccaggaaagactacacacaaaggacaaggttcctgattccattgcggataagctgaaacaggcattcacatgtactcctaaaaaaataagaaatatcatttatatgttcctacccataactaaatggctgccagcatacaaattcaaggaatatgtgttgggtgacttggtctcaggcataagcacaggggtgcttcagcttcctcaaggtccttttgctgttattagcctgatgattggtggtgtagctgttcgattagtaccagatgatatagtcattccaggaggagtaaatgcaaccaatggcacagaggccagagatgccttgagagtgaaagtcgccatgtctgtgaccttactttcaggaatcattcagttttgcctaggtgtctgtaggtttggatttgtggccatatatctcacagagcctctggtccgtgggtttaccaccgcagcagctgtgcatgtcttcacctccatgttaaaatatctgtttggagttaaaacaaagcggtacagtggaatcttttccgtggtgtatgcgtcgggctgatggtttttggtttgctgttgggtggcaaggagtttaatgagagatttaaagagaaattgccggcgcctattcctttagagttctttgcggtcgtaatgggaactggcatttcagctgggtttaacttgaaagaatcatacaatgtggatgtcgttggaacacttcctctagggctgctacctccagccaatccggacaccagcctcttccaccttgtgtacgtagatgccattgccatagccatcgttggattttcagtgaccatctccatggccaagaccttagcaaataaacatggctaccaggttgacggcaatcaggagctcattgccctgggactgtgcaattccattggctcactcttccagaccttttcaatttcatgctccttgtctcgaagccttgttcaggagggaaccggtgggaagacacagcttgcaggttgtttggcctcattaatgattctgctggtcatattagcaactggattcctctttgaatcattgccccaggctgtgctgtcggccattgtgattgtcaacctgaagggaatgtttatgcagttctcagatctcccctttttctggagaaccagcaaaatagagctgaccatctggcttaccacttttgtgtcctccttgttcctgggattggactatggtttgatcactgctgtgatcattgctctgctgactgtgatttacagaacacagaggtgagtgcccagattggaatgggtgtgaatgtcccggcagagatgacaatgttgactttaggtgtagaccaaagtttaagttggtagaagtggagccctttgatgatttctagttagcgtgagagggagctataacactcatgtagcctgttgactagatgaacaaaatgccaatttaaaaattccatataattttgccaaatgctcttctatgtcacaatttatgctcccatcaatggttatgttaaaagagcctaatttccatcattgtttctgccattcctggtctagtgctatgctggtttatttatcctcttgtgatttgttttggcaccaagtactgacatgagtttcaatgacatgaagcaaactctgacaccaagttatcgtatgcattccttccactgtcatttcctccaccctgaaccactttcccttgttatctcttctccctagtaggaagctgagcccactagggaaagtat

SEQ ID NO: 6946 - protein, 239 aa, Homo sapiens [sequence omitted]

SEQ ID NO: 6947 - DNA, 700 bp, Homo sapiens
gagcactcttagcatgattagagttgttgtttccacacaacaaaagcgtgatgttattcagaaagagcaatcagaaaataaaaaagatgttgaacatttttttaaataactaaaataaaaataatttactagaaggctaataatggaaattcttcctggtccaagtccagtggtgtttacaactaattgatcacaaccagttactgatttctttgttccttcatttccactgcttcacttgactagcctaaaaaaatgatgatgctgatgatgatggcacttctagcaacacagagggcgaagctgactcattcagatctccctccaggacaaacacacaaaaatgaaggataaaacataacaaatgttcaaataaccttgaaataaagactgtcagaagaatgcagagaaaaatgtttaaaaaagaacaataataataagaaatcctacatgcagcccaagccataggaatttttctgtggaatatagaccctagagtgttgaatgatgaagttgtatcattcaaacctggaaagaaaatttggcttcaggcccacaggagaccaggaccatggaattgaaacactggataagcctggagctctaaagacctgtctagtccattaatagagtattaggcaaactctaaccactacttagggaaacaaggaagtcttgtaggccttgagtgaaagttaaa

SEQ ID NO: 6948 - protein, 40 aa, Homo sapiens
MMKLYHSNLERKFGFRPTGDQDHGIETLDKPGALKTCLVH

SEQ ID NO: 6949 - DNA, 2725 bp, Homo sapiens
gaggctttcttcacagctagctgatcggatccttgcagctgtttcttctgtaggtctcggagctcactgagaacgtccagcacgccttcccggcggggcccggcccaggtgcgcactagatgaggcagtcaaccaagtcaattggttcccgatcaactaaatctctcctaaaaataaacactgccgcgagcttcgagagttcagcgtgtcagagcctctatgatggcagagcacctgccgcgatgcctgattggtagggagaaggatttcccgggagggggccaataccaaattttagggctgttaggctctgagcagtcccttcgtgaccggataagtcagagacccggggtttgagccttgcccggcgctgagcggagggcccagtttcgggaccacagccttgctccctgggagctccgggcggccaatgccgggcaagcccagcccggcacaggaggaggcagggcccgtctccggaaagagggccagaggcagaactgagggcctggttttgtgtaattcgatttggatacaaacaggccagacccaaactggaaacggcgaagggctggattagcaccgaagggattcgaggaggcaaacgggaagtaaaaatgctgtgtggagctgcagagggcaaggggacaggggttgcaaaggaaagagcttcgtgagactttctccttcccggcgtagggaccagcagagtgcgggcaggtcagccctgtcaccggttcgtttagggaaaaagcgcgacatggggcctgggagacaggggcagaggcggtgacagcgagggcccctgctcgggtgggcccgcgggcctcagctcagtcccctcccgagggaccgcgacccccggccccgcggccgcccgcgcgcactcaccagcccgggctgccctgggcggagccgccccgccgcgctccacagccgctgcctcttcgacgcgcgcgctgcctccaggtgcggctctaggaggaggcgccgcgggcagtgccggccgcgccccgcgactcccggtaacccgagcccgccccgccccgctagggccaggccccgccgccaccctccgcgctgggacgccggggcgcgggcatccctgccgcctacggatctcttcccaagcacctagaactttccaaagcgtgcttggaatttaacaccttggtcgtcgatccccgcaaatatactctgatgagaccggctttcttcccataccgcccaggagtttctccaggtggcattcctgtcgccttgaggtggaacatcagtagaggctcgaggctgaagcaagcacaatacacaagagactccgattcgtacaggaacatttcgaaaacaggaaatcctgaggacaattatttcatcctgagcaggaacacatttactcttataaaagtttcagcttgagagacagctggcaagatggctgaataggaacagctccagtctgcagctcccagcaagatcaatgcagaaggtccaattcttttctaaaagtcttctggctagtcccagcatttccagggaagctgaacaggtgcagccggaggcttggagccactatggaagcagcacagttgatgcctcagaggatccagagaaaagaccagataactataattcagccttcacccatattgtgtctttttgattttgtctgagtatatatgccgcacaacaagcagcttatctctgagattcaaatagttactgcaattccattatctgtttttttactgtgagggatttggagccacatttagtcctacatcacagatacaggactcaagagtcaaagtgcacagaaatttgaattccgataagaatactctgagccagtttattctggggtacatacttcattttatgctagaactctgcaatcctgatgaaagagggcttgcattgctcaactaactaactcacccgtctctcctgcagtattagaaactacttctgtatgtacacgttacagtttctaggaactccatttttgcaagacagataggagccagaaaatttgttccttcaactgtatatcgctaattaaacataaaatcaaatcagcattttaggtacttgaataactagtctgtgcttacttttattcatatggaagcagtgtttaaattattctctgattgtaaactcacttatgtaaaccattatacaggaaaaaaatgagtaatgaagcaaagttctgaagcagatctatgtaagcaaatttcaataaccttcttaagagaatatgacacttagtagtggtgagggacattttaagctttttctatttacaagttttttttaaacgagggtgtttcaaagtaaatatttgctgttacgttatgccacatgatatactaataaatgaattaatgaaattaacctaaatatccagtattattattgaatatatagctactaaaattttatattcaaatatatccaaggacatgaggaaataaggatttaattctaaacaaaaaaagaagctatgaaatatatataatttaagactataattttgttaaaaatatgtttatgtaaatgcgctaaaaaaagttctttaagaatatatgccaaaatattgacaatggttatcccctgagtgatttttattttcatccttaggattttctgtattttctgtttcacattttgaacatgtatacttttacaagaaaatatgaactaaaattaaaaatttttaaactcc

SEQ ID NO: 6950 - protein, 71 aa, Homo sapiens
MRPAFFPYRPGVSPGGIPVALRWNISRGSRLKQAQYTRDSDSYRNISKTGNPEDNYFILSRNTFTLIKVSA

SEQ ID NO: 6951 - DNA, 1275 bp, Homo sapiens
ctttgctccatgagatggattaccagaaatacatttctgttagacacgactacatacttcttcctgaagatgccctcaccaacacaactcgacttcgctggtggcagccttttgtgatcagcaatggaattgtggtctctggggtggagcgtgctcagtgggcactggacaacattttgattggtggagcagaaatcaatcccagccaattggtggacacttttgatgatgaaggcacttcccatgaagaatcaaaaagtttattttttttcttccaacatgtgatgtgttgctctccattcttttaaatctcgcactacatctgatatcaggaaatatctgtgaaggacttggtgattacctgaaagcccttctcaagaccgagtgtacaccactttcccacactgtgaactaatgacaagtgacttatttgctcataagtaaatgtcttcatgttgatgtgtccgtgaaagttgtgatctgttgtaatatcagttacagtggcagtattgacaataagaaacagtttaacagaaaaatgaaatttaagcacaaaaaatttaagagattttatgtttaaaatggcatttagcacagtatttaacattcttggtcacaaagctatttaagtggactgtatttcggctatgtctcatgttttatatgattaaattatcattgtttgtcctttatgtattctcttctacaatacaacacattgaaactgtatttacttgttatgttgtaatattttgctgctgaatttggggctacttatattctgcagaaaattaattgaaatacctattcaagaagatagttgtaaagatattgtatctcctttaatatactccttaaaaatgtatgttggtttagcgttgttttgtggataagaaaaatgcttgaccctgaaatattttctactttaaattgtggatgaagaccctatctcccacaaataagttcccatttccttgtctaaagatctttttttaagtgttctgtggctgatttactaacagtaactgccattttttgtctgtgataacagagtgatttgtaaaacagtggttgttttttcattgtgttttcttcgtggattgttttttctgcgggtcatattcataccttctgatgaagttgtacaacaccagcaacattataatggccctgtagctctgaatgctatttgtgtaactgaaaggttgcactctagggtgaaccaagctataaaagcccatgcttaaataaaaattatgtccaaaagccattgaa

SEQ ID NO: 6952 - protein, 97 aa, Homo sapiens
MDYQKYISVRHDYILLPEDALTNTTRLRWWQPFVISNGIVVSGVERAQWALDNILIGGAEINPSQLVDTFDDEGTSHEESKSLFFFFQHVMCCSPFF

SEQ ID NO: 6953 - DNA, 11565 bp, Homo sapiens
ctcggcgggggcccgctcccaggcccgctcccgagcccgttccgctcccgtccgccttcttctcgccttctctccgcgtggctcctccgtcccggcgtctccaaaactgaatgagcgagcggcgcgtagggcgcgcggcggcggcggcggcggcggcggcatggagcgcagtggctgggcccggcagactttcctcctagcgctgttgctgggggcgacgctgagggcgcgcgcggcggctggctattacccccgcttttcgcccttctttttcctgtgcacccaccacggggagctggaaggggatggggagcagggcgaggtgctcatttccctgcatattgcgggcaaccccacctactacgttccgggacaagaataccatgtgacaatttcaacaagcaccttttttgacggcttgctggtgacaggactatacacatctacaagtgttcaggcatcacagagcattggaggttccagtgctttcggatttgggatcatgtctgaccaccagtttggtaaccagtttatgtgcagtgtggtagcctctcacgtgagtcacctgcccacaaccaacctcagtttcatctggattgctccacctgcgggcacaggctgtgtgaatttcatggctacagcaacacaccggggccaggttattttcaaagatgctttagcccagcagttgtgtgaacaaggagctccaacagatgtcactgtgcacccacatctagctgaaatacatagtgacagcattatcctgagagatgactttgactcctaccaccaactgcaattaaatccaaatatatgggttgaatgtaacaactgtgagactggagaacagtgtggcgcgattatgcatggcaatgccgtcaccttctgtgaaccatatggcccacgagaactgattaccacaggccttaatacaacaacagcttctgtcctccaattttccattgggtcaggttcatgtcgctttagttattcagaccccagcatcatcgtgttatatgccaagaataactctgcggactggattcagctagagaaaattagagccccttccaatgtcagcacaatcatccatatcctctaccttcctgaggacgccaaaggggagaatgtccaatttcagtggaagcaggaaaatcttcgtgtaggtgaagtgtatgaagcctgctgggccttagataacatcttgatcatcaattcagctcacagacaagtcgttttagaagatagtctcgacccagtggacacaggcaactggcttttcttcccaggagctacagttaagcatagctgtcagtcagatgggaactccatttatttccatggaaatgaaggcagcgagttcaattttgccaccaccagggatgtagatctttccacagaagatattcaagagcaatggtcagaagaatttgagagccagcctacaggatgggatgtcttgggagctgtcattggtacagaatgtggaacgatagaatcaggcttatcaatggtcttcctcaaagatggagagaggaaattatgcactccatccatggacactaccggttatgggaacctgaggttttactttgtgatgggaggaatttgtgaccctggaaattctcatgaaaatgacataatcctgtatgcaaaaattgaaggaagaaaagagcatataacactggataccctttcctattcctcatataaggttccgtctttggtttctgtggtcatcaatcctgaacttcagactcctgctaccaaattttgtctcaggcaaaagaaccatcaaggacataataggaatgtctgggctgtagactttttccatgtcttgcctgttctcccttctacaatgtctcacatgatacagttttccatcaatctgggatgtggaacgcatcagcctggtaacagtgtcagcttggaattttctaccaaccatgggcgctcctggtccctccttcacactgaatgcttacctgagatctgtgctggaccccacctcccccacagcactgtctactcctctgaaaactacagtgggtggaaccgaataacaattccccttcctaacgcagcactaacccggaacaccaggattcgctggagacaaacaggaccaatccttggaaacatgtgggcaattgataatgtttatattggcccgtcatgtctcaaattctgttctggcagaggacagtgcactagacatggttgcaagtgtgaccctggattttctggcccagcttgtgagatggcatcccagacattcccaatgtttatttctgaaagctttggcagttccaggctctcctcttaccataacttttactctatccgtggtgctgaagtcagctttggttgtggtgtcttggccagtggtaaggccctggttttcaacaaagatgggcggcgtcagctaattacatctttccttgacagctcacaatccaggtttctccagttcacactgagactggggagcaaatctgttctgagcacgtgcagagcccctgatcagcctggtgaaggagttttgttgcattattcttatgataatgggataacttggaaactcctggagcattattcatatctcagctatcatgagcccagaataatctccgtagaactaccaggtgatgcaaagcagtttggaattcagttcagatggtggcaaccgtatcattcttcccagagagaagatgtatgggctattgatgagattatcatgacatctgtgcttttcaacagcattagtcttgactttaccaatcttgtggaggtcactcagtctctgggattctaccttggaaatgttcagccatactgtggccacgactggaccctttgttttacaggagattctaaacttgcctcaagtatgcgctatgtggaaacacaatcaatgcagataggagcatcctatatgattcagttcagtttggtgatgggatgtggccagaaatacaccccacacatggacaaccaggtgaagctggagtactcaaccaaccacggccttacctggcacctcgtccaagaagaatgccttccaagtatgccaagttgtcaggaatttacatcagcaagtatttaccatgccagtgagtttacacagtggaggagagtcatagtgcttcttccccagaaaacttggtccagtgctacccgtttccgctggagccagagctattacacagctcaagacgagtgggctttggacagcatttacattgggcagcagtgccccaacatgtgcagtgggcatggctcatgcgatcatggcatatgcaggtgtgaccaggggtaccaaggcactgaatgccacccagaagctgcccttccgtccacaattatgtcagattttgagaaccagaatggctgggagtctgactggcaagaagttattgggggagaaattgtaaaaccagaacaagggtgtggtgtcatctcttctggatcatctctgtacttcagcaaggctgggaaaagacagctggtgagttgggacctggatacttcttgggtggactttgtccagttctacatccagataggcggagagagtgcttcatgcaacaagcctgacagcagagaggagggcgtcctccttcagtacagcaacaatgggggcatccagtggcacctgctagcagagatgtacttttcagacttcagcaaacccagatttgtctatctggagcttccagctgctgccaagaccccttgcaccaggttccgctggtggcagcccgtgttctcaggggaggactatgaccagtgggcagtcgatgacatcatcattctgtccgagaagcagaagcagatcatcccagttatcaatccaactttacctcagaacttttatgagaagccagcttttgattaccctatgaatcagatgagtgtgtggttgatgttggctaatgaaggaatggttaaaaatgaaaccttctgtgctgccacaccatcagcaatgatatttggaaaatcagatggagatcgatttgcagtaactcgagatttgaccctgaaacctggatatgtgctacagttcaagctaaacataggttgtgccaatcaattcagcagtactgctccagttcttcttcagtactctcatgatgctggtatgtcctggtttctggtgaaagaaggctgttacccggcttctgcaggcaaaggatgcgaaggaaactccagagaactaagtgagcccaccatgtatcacacaggggactttgaagaatggacaagaatcaccattgttattccaaggtctcttgcatccagcaagaccagattccgatggatccaggagagcagctcacagaaaaacgtgcctccatttggtttagatggagtgtacatatccgagccttgtcccagttactgcagtggccatggggactgcatttcaggagtgtgtttctgtgacctgggatatactgctgcacaaggaacctgtgtgtcaaatgtccccaatcacaatgagatgttcgataggtttgaggggaagctcagccctctgtggtacaagataacaggtgcccaggttggaactggctgtggaacacttaacgatggcaaatctctctacttcaatggccctgggaaaagggaagcccggacggtccctctggacaccaggaatatcagacttgttcaattttatatacaaattggaagcaaaacttcaggcattacctgcatcaaaccaagaactagaaatgaagggcttattgttcagtattcaaatgacaatgggatactctggcatttgcttcgagagttggacttcatgtccttcctggaaccacagatcatttccattgacctgccacaggacgcgaagacacctgcaacggcatttcgatggtggcaaccgcaacatgggaagcattcagcccagtgggctttggatgatgttcttataggaatgaatgacagctctcaaactggatttcaagacaaatttgatggctctatagatttgcaagccaactggtatcgaatccaaggaggtcaagttgatattgactgtctctctatggatactgctctgatattcactgaaaacataggaaaacctcgttatgctgagacctgggattttcatgtgtcagcatctacctttttgcagtttgaaatgagcatgggctgtagcaagcccttcagcaactcccacagtgtacagctccagtattctctgaacaatggcaaggactggcatcttgtcaccgaagagtgtgttcctccaaccattggctgtctgcattacacggaaagttcaatttacacctcggaaagattccagaattggaagcggatcactgtctaccttccactctccaccatttctcccaggacccggttcagatggattcaggccaactacactgtgggggctgattcctgggcgattgataatgttgtactggcctcagggtgcccttggatgtgctcaggacgagggatttgtgatgctggacgctgtgtgtgtgaccggggctttggtggaccctattgtgttcctgttgttcctctgccctcgattcttaaagacgatttcaatgggaatttacatcctgacctttggcctgaagtgtatggtgcagagagggggaatctgaatggtgaaaccatcaaatctggaacatctctaatttttaaaggggaaggactaaggatgcttatttcaagagatctagattgtacaaatacaatgtatgtccagttttcacttagatttatagcaaaaagtaccccagagagatctcactctattctgttacaattctccatcagtggaggaatcacttggcacctgatggatgaattttactttcctcaaacaacgaatatacttttcatcaatgttcccttgccatacactgcccaaaccaatgctacaagattcagactctggcaaccttataataacggtaagaaagaagaaatctggattgttgatgacttcattatcgatggaaataatgtaaacaaccctgtgatgctcttggatacatttgattttgggcccagagaagacaattggtttttctatcctggtggtaacatcggtctttattgtccatattcttcaaagggggcacctgaagaagattcagctatggtgtttgtttcaaatgaagttggtgagcattccattaccacccgtgacctaaatgtgaatgagaacaccatcatacaatttgagatcaacgttggctgttcgactgatagctcatccgcggatccagtgagactggaattttcaagggacttcggggcgacctggcaccttctgctgcccctctgctaccacagcagcagccacgtcagctctttatgctccaccgagcaccaccccagcagcacctactacgcaggaaccatgcagggctggaggagggaggtcgtgcactttgggaagctgcacctttgtggatctgtccgtttcagatggtaccagggattttaccctgccggctctcagccagtgacatgggccattgataatgtctacatcggtccccagtgtgaggagatgtgtaatggacaggggagctgtatcaatggaaccaaatgtatatgtgaccctggctactcaggtccaacctgtaaaataagcaccaaaaatcctgattttctcaaagatgatttcgaaggtcagctagaatctgatagattcttattaatgagtggtgggaaaccatctcgaaagtgtggaatcctttctagtggaaacaacctctttttcaatgaagatggcttgcgcatgttgatgacacgagacctggatttatcacatgctagatttgtgcagttcttcatgagactgggatgtggtaaaggcgttcctgaccccaggagtcaacccgtgctcctacagtattctctcaacggtggcctctcgtggagtcttcttcaggagttccttttcagcaattccagcaatgtgggcaggtacattgccctggagatacccttgaaagcccgttctggttctactcgccttcgctggtggcaaccgtctgagaatgggcacttctacagcccctgggttatcgatcagattcttattggaggaaatatttctggtaatacggtcttggaagatgatttcacaacccttgatagtaggaaatggctgcttcacccaggaggcaccaagatgcccgtgtgtggctctactggtgatgccctggtcttcattgaaaaggccagcacccgttacgtggtcagcacagacgttgccgtgaatgaggattccttcctacagatagacttcgctgcctcctgctcagtcacagactcttgttatgcgattgaattggaatactcagtagatcttggattgtcatggcacccattggtaagggactgtctgcctaccaatgtggaatgcagtcgctatcatctgcaacggatcctggtgtcagacactttcaacaagtggactagaatcactctgcctctccctccttataccaggtcccaagccactcgtttccgttggcatcaaccagctccttttgacaagcagcagacatgggcaatagataatgtctatatcggggatggctgcatagacatgtgcagtggccatgggagatgcatccagggaaactgcgtctgtgatgaacagtggggtggcctgtactgtgatgaccccgagacctctcttccaacccaactcaaagacaacttcaatcgagctccatccagtcagaactggctgactgtgaacggagggaaattgagtacagtgtgtggagccgtggcgtcgggaatggctctccatttcagtgggggttgtagtcgattattagtcactgtggatctaaacctcactaatgctgagttcatccaattttacttcatgtatgggtgcctgattacaccaaacaaccgtaaccaaggtgttctcttggaatattctgtcaatggaggcattacctggaacctgctcatggagattttctatgaccagtacagtaagcccggatttgtgaatatccttctccctcctgatgctaaagagattgccactcgcttccgctggtggcagccaagacatgacggcctggatcagaacgactgggccattgacaatgtcctcatctcaggctctgctgaccaaaggaccgttatgctggacaccttcagcagcgccccagtaccccagcatgagcgctcccctgcagatgccggccctgtcgggaggatcgcctttgacatgtttatggaagacaaaacttcagtgaatgagcactggctattccatgatgattgtacagtagaaagattctgtgactcccctgatggtgtgatgctctgtggcagtcatgatggacgggaggtgtatgcagtgacccatgacctgactcccactgaaggctggattatgcaattcaagatctcagttggatgtaaggtgtctgaaaaaattgcccagaatcaaattcatgtgcagtattctactgacttcggtgtgagttggaattatctggtccctcagtgcttgcctgctgacccaaaatgctctggaagtgtttctcagccatctgtattctttccaactaaagggtggaaaaggatcacctacccacttcctgaaagcttagtgggaaatccggtaaggtttaggttctatcagaagtactcagacatgcagtgggcaatcgataatttctacctgggccctggatgcttggacaactgcaggggccatggagattgcttaagggaacagtgcatctgtgatccgggatactcagggccaaactgctacttgacccacactctgaagactttcctgaaggaacgctttgacagtgaagaaatcaaacctgacttatggatgtccttagaaggtggaagtacttgcactgagtgtggaattcttgccgaggacactgcactctattttgggggatccactgtgagacaagcggttacacaagatttggatcttcgaggtgcaaagttcctgcaatactgggggcgcatcggtagtgagaacaacatgacctcttgccatcgtcccatctgccggaaggaaggcgtgctgttggactactctaccgatggaggaattacctggactttgctccatgagatggattaccagaaatacatttctgttagacacgactacatacttcttcctgaagatgccctcaccaacacaactcgacttcgctggtggcagccttttgtgatcagcaatggaattgtggtctctggggtggagcgtgctcagtgggcactggacaacattttgattggtggagcagaaatcaatcccagccaattggtggacacttttgatgatgaaggcacttcccatgaagaaaactggagtttttaccctaatgctgtaaggacagcaggattttgtggcaatccatcctttcacctctattggccaaataaaaagaaggacaagactcacaatgctctctcctcccgagaactcattatacagccaggatacatgatgcagtttaaaattgtggtgggttgtgaagccacttcttgtggtgaccttcattccgtaatgctggaatacactaaggatgcaagatcggattcctggcagctcgtacagacccagtgccttccttcctcttctaacagcattggctgctcccctttccagttccatgaagccaccatctacaactctgtcaacagctcaagctggaaaagaatcaccatccagctgcctgaccatgtctcctctagtgcaacacagttccgctggatccagaagggagaagaaactgagaagcaaagctgggcaattgaccacgtgtacattggagaggcttgccccaagctctgcagcgggcacggatactgcacgaccggtgccatctgcatctgcgacgagagcttccaaggtgatgactgctctgttttcagtcacgaccttcccagttatattaaagataattttgagtccgcaagagtcaccgaggcaaactgggagaccattcaaggtggagtcataggaagtggctgtgggcagctggccccctacgcccatggagactcactgtactttaatggctgtcagatcaggcaagcagctaccaagcctctggatctcactcgagcaagcaaaatcatgtttgttttgcaaattgggagcatgtcgcagacggacagctgcaacagtgacctgagtggcccccacgctgtggacaaggcagtgctgctgcaatacagcgtcaacaacgggatcacctggcatgtcatcgcccagcaccagccaaaggacttcacacaagctcagagagtgtcttacaatgtccccctggaggcacggatgaaaggagtcttactgcgctggtggcaaccacgccacaatggaacaggtcatgatcaatgggctttggaccatgtggaggtcgtcctcactcgcaaacaaaattacatgatgaatttttcacgacaacatgggctcagacatttctacaacagaagacgaaggtcacttaggcgatacccatgaagaatcaaaaagtttattttttttcttccaacatgtgatgtgttgctctccattcttttaaatctcgcactacatctgatatcaggaaatatctgtgaaggacttggtgattacctgaaagcccttctcaagaccgagtgtacaccactttcccacactgtgaactaatgacaagtgacttatttgctcataagtaaatgtcttcatgttgatgtgtccgtgaaagttgtgatctgttgtaatatcagttacagtggcagtattgacaataagaaacagtttaacagaaaaatgaaatttaagcacaaaaaatttaagagattttatgtttaaaatggcatttagcacagtatttaacattcttggtcacaaagctatttaagtggactgtatttcggctatgtctcatgttttatatgattaaattatcattgtttgtcctttatgtattctcttctacaatacaacacattgaaactgtatttacttgttatgttgtaatattttgctgctgaatttggggctacttatattctgcagaaaattaattgaaatacctattcaagaagatagttgtaaagatattgtatctcctttaatatactccttaaaaatgtatgttggtttagcgttgttttgtggataagaaaaatgcttgaccctgaaatattttctactttaaattgtggatgaagaccctatctcccacaaataagttcccatttccttgtctaaagatctttttttaagtgttctgtggctgatttactaacagtaactgccattttttgtctgtgataacagagtgatttgtaaaacagtggttgttttttcattgtgttttcttcgtggattgttttttctgcgggtcatattcataccttctgatgaagttgtacaacaccagcaacattataatggccctgtagctctgaatgctatttgtgtaactgaaaggttgcactctagggtgaaccaagctataaaagcccatgcttaaataaaaattatgtccaaaagccattgaa

SEQ ID NO: 6954 - protein, 3458 aa, Homo sapiens; identical to SEQ ID NO: 939

SEQ ID NO: 6955 - DNA, 598 bp, Homo sapiens
ctcagtgggcactggacaacattttgattggtggagcagaaatcaatcccagccaattggtggacacttttgatgatgaaggcacttcccatgaagaaaactggagtttttaccctaatgctgtaaggacagcaggattttgtggcaatccatcctttcacctctattggccaaataaaaagaaggacaagactcacaatgctctctcctcccgagaactcattatacagccaggatacatgatgcagtttaaaattgtggtgggttgtgaagccacttcttgtggtgaccttcattccgtaatgctggaatacactaaggatgcaagatcggattcctggcagctcgtacagacccagtgccttccttcctcttctaacagcattggctgctcccctttccagttccatgaagccaccatctacaactctgtcaacagctcaagctgttccgctggatccagaagggagaagaaactgagaagcaaagctgggcaattgaccacgtgtacattggagaggcttgccccaagctctgcagcgggcacggatactgcacgaccggtgccatctgcatctgcgacgagagcttccaaggt

SEQ ID NO: 6956 - protein, 118 aa, Homo sapiens
MMQFKIVVGCEATSCGDLHSVMLEYTKDARSDSWQLVQTQCLPSSSNSIGCSPFQFHEATIYNSVNSSSCSAGSRREKKLRSKAGQLTTCTLERLAPSSAAGTDTARPVPSASATRAS

SEQ ID NO: 6957 - DNA, 387 bp, Homo sapiens
ggtgatggaaattagagtcctgcttaaaaaatacagatgttctggaatatcaagcaacaatttcaagctttcacacttctggattgaaacacagtttaaagagggaataaaaacctgaagaaagagccacaggactggactgagctaaggcatgttaatagccatgttctagagaaacgatctatgaactcctctgctgaggtccccacacctgtccttgttctctttcttcccgaggctgagtgtctttcctgctgttctgtgatgcttttgcaacactaatgaataaatctctctccaggaattgttttctttttcatgaaacacctctctcctcccttatctcaccacaaaaaagtaaaaaaataaaagaatatttaatgttca

SEQ ID NO: 6958 - protein, 37 aa, Homo sapiens
MEIRVLLKKYRCSGISSNNFKLSHFWIETQFKEGIKT

SEQ ID NO: 6959 - DNA, 4902 bp, Homo sapiens
gggaggccgactgagcaggagtcgtccgcttatagtggaggctgctaggagccggtcagaggcatcgagagtaaacatgaggttacgatcctgggaggacttaatgaatttgtagtgaagttttatggaccacaaggaacaccatatgaaggcggagtatggaaagttagagtggacctacctgataaataccctttcaaatctccatctataggattcatgaataaaattttccatcccaacattgatgaagcgtcaggaactgtgtgtctagatgtaattaatcaaacttggacagctctctatgatcttaccaatatatttgagtccttcctgcctcagttattggcctatcctaaccccatagatcctctcaatggtgacgctgcagccatgtacctccaccgaccagaagaatacaagcagaaaattaaagagtacatccagaaatacgccacggaggaggcgctgaaagaacaggaagagggtaccggggacagctcatcggagagctctatgtctgacttttccgaagatgaggcccaggatatggagttgtagtagaaaaagcacctgcttttcagaaagactattatttcctaaccatgagaagcagactataatattcatatttaaacaaagcaattttttttattactaaacaaggtttttatgaataatagcattgatatatatatattatatatcaccctttagatcttgatttcttggtcatttctcaacctgaggtgcatagcatattcccacattccatttggtagcaatatgcggtctgaatgcatgcattcatgagtccatgtggccaagtcagcctgtgtgctactgaactgtcgaaggaaatagccgctctgataggtagatgtgagtaaaaagaacaggaaaaaattgcttcttttattggtttccaaagaaacaaaccaaaccaaccagctcttggatgtgaagataaaatagtgcttttttgaaatggagaggaaaaacttggggaggaagaggcctgctgtgggggcatcggagccagccatgtaagaatcagagctgctccttcctgtgaatcctaggtggccctatgtcttctgtggagttacagtataaagcagggagctaattaagagtattaaaacttaaaaccattttttgactctgattttaagtacatttttatatgtcagttgctgcccttcacactaccaggccctgcagccacagtgttctgttggagaaacttggggaagtgttttctgaaccagttctttttcttggggtagagcgtgaaatccagacctgtttttgaaaggacagcacaggaggagaaaagtgactgggacgatgcttcctctcatccaaaacacatgcagagtcacatcctcatcctagtgtttggcagtttgagaccgctaccctgaacttaagagctttaaatatgagggttgtgtttctgggggggttatttttttggtgtgtgtgtgtgtgtattgtgcttagaaaggttgcagatttcatcttcacctaccaagaggcggccgcctccttggacaagccgctcatggaccattagacttgagaagacgacccacgtggtgactgcaaagccctgggtacttgccttcatgttctggtttggttttccctttttctgctgctcttggcagcagcctggtcatcatctgcttgtgggagtgggaaatgggtattttagacccaacacaggttctaaatttaaaacaaataataattggaacaaataaaggttcttgtacccagagtgattctacatgggaaaaacaaaccagcttttttcagagagtgaccgaataggaagaagggattcagaaatatgatgtagtagaacatgccctgcaggaagaaaatgttttctctcctgcgtatgttaagaggaaatcagtttaaaatgcctgctaatcaaatgtcgactcagctaaccatatgtccaggttgctgcagagtttctttcaaatctgagtgttgcctgctgaactcggaggggagtttggagaaattttagacagcagctctgtgttctttttttgccgcagccaataagataatagcagaattagccaatcctaaaaccttctaaagacgatttttgagcatcccactgggattatttaatttttctttttgacgtgtgtttttagtttagaagtgctgtattccacaaggtttaagtcagtgaggttggaagataccctatcttttttattcaaaaagcacaatcaatcttttgtttgaaaatctatataaagtacaacttgcttttagcatgattattttcctaaataaaaagacaaagaatttacttactttatgttaattacgggcatgaagcaaaaggttttctttaaaaaaaaaaaaaagtgcagtgatgtagggctgtggttagttaaccgtactgagttatccatctagcatctgtggcttgctggaagggtagtattaactatttaacatgtaatggtgtacttcactcttacctagcacgctgtcttctcattgctttgggggagggagggtctctctgctggcactgtctaacttgcttacctgctgactttgcagtttgcttgtgctatgacatttattgtaggtgctatttagggtaggcttaaagtgctgggtggtgatttgagttcaaacaataaaaaattgtattttttcaatattgtataaacaatagtgttctaattaccttaaaaaaaaataatgaccagttaagaattgcttttgatcttgtcaaaaaactgaatagaccccagtttcgggaaggtgtgtgagcagtgccatgactctgccccttacctaatcccacatctctctaatgataagacattggctcgcctctgaccagagccccagcaccagagagcggaagatgcagaattgtcaaatgacctgctgggggaggttgtaggagtttagcagatttgagtgtggctgcagagagagagagtgtgtgtatgtgtgcacatgtgtgagagtgtgagcgagagtgtgtgtgtgtccatctaagtgtgtgtgatgaaggtgggataaggctcctctgttagtgctggaagctcctgtaattgccgcatggatcccactgtgccctcttgttctgtgcaagtctgtcctgtctgggcactaaccttggtcccatgcatgtttatgttctgggtggggctttgcctctccactgggaaactgacttttgctgggttgaacagagtcccttatgctttttgtcctctccctgcgcctgggagaggtgggagtaggagcccaaacacacaggtacagaaagatctggaagaaggcctggcagtgaatccaaggactctgggcccccaacaatagatggtagcgtaagtctggagcagcggtgtttcaccaccaaatgcctttccaggctgcccttccaacactcaggagagcatccagatccctgggcagaggctctacattcttggctttagaggtggtggcagcggcagcaggtcagagccacttctggcggtttccctcccctttttagtgcccatagtttttggatcctcccttgagttttaccagcacaagccattctttgcccctgttcacataactgagctcaagctcttgccaaacaccaacaagcaagatggttgcaacctggcaacattgaatccaccacccttgggctccctctggaagccccagcaccggggggcttttgggcacagggtcagtggtagccatcttagacactgacatttggctttgtcgtcaatttcatcaccctccttgaggttactgtgcagtttcaaccagcattttatcctagtgaggtcattatcaggagttgccatatcatctctccagtacctaacatttctcatccacttcaaaagctgttctgactgccagctggctgatctaagctcctgaggaatgtctcctctcaaaggaatttttccctccaaaggccccctgaagtcctagttggcattggcctggcacatgctttatgttaggcctcccgttgggatggctgagaatcatgaaagacagatcctccgctagcctctgtgggtcaagtttctggacaccaagtctctgggaactagtgtttgattttaaatggcatgtggcccttccttgtttcagtgacttagaaaagtaaaagccatttaaaaaagttagcaagattttttatcgacttcccaactgggcttccagccttgttgaatgaaatcatctatctctgattgggcgcaacgaactgcatttctttggacttctgaatccatgtttgtgctttctctggcccgtgaacacctcggcgattctgttagggatgggatgagtgggaggaagccctttgagaagggggagccggccctgtcatgcgcaggttttccactcatctgaggaagagccagggctctgaatttagcctaacactcatcttggctgtgggcttgggaagaaatggccattatttacagattgtatttggtacatattgtgtgatacttgaaaagataaaagggactgccagcccctaactgaaatctgaagctttttatcgcttatttttcctcgccctgtctcctcccttccacctttctccttgcattgtgatgatctagtaggcacgtctgtcaacaggacacatgcctcctctgactataacctcttaatagttgtgtataatgaaaactgtaaacttttttaaataaacgtgtatataccttggcaaatggctggaccttgatcaataagataatagccctcatgattactctcagctggttttctaaaataccctctctgttctggctcctttgagcagcagacgctggcttcttttggctgagcagctcttagaatgcagat

SEQ ID NO: 6960 - protein, 113 aa, Homo sapiens
MNKIFHPNIDEASGTVCLDVINQTWTALYDLTNIFESFLPQLLAYPNPIDPLNGDAAAMYLHRPEEYKQKIKEYIQKYATEEALKEQEEGTGDSSSESSMSDFSEDEAQDMEL

SEQ ID NO: 6961 - DNA, 5291 bp, Homo sapiens
ggctggggtagggaggccgactgagcaggagtcgtccgcttatagtggaggctgctaggagccggtcagagggtgagtggggagcaggcgagcgagccacagcaggcaggagggagcgtcgcgcggcgcagaggagcgccggggcagggccgcggcggaaccacagccggagaggggcagcccgagccgggcgccgcagggtccccacccccacccggccggacagtgcccggtgttcccccgtgcggggggcggcggcggcggctgacgggaccgccgggaccgcgggggtgttgccacctccaccgaggagccggcgcggccgcgggctcctcagagccggggccccgggcccgtgacagacgggccgaggaagggagagaggcggcggcgacaccatgtcatctcccagtccgggcaagaggcggatggacacggacgtggtcaagctcatcgagagtaaacatgaggttacgatcctgggaggacttaatgaatttgtagtgaagttttatggaccacaaggaacaccatatgaaggcggagtatggaaagttagagtggacctacctgataaataccctttcaaatctccatctataggattcatgaataaaattttccatcccaacattgatgaagcgtcaggaactgtgtgtctagatgtaattaatcaaacttggacagctctctatgatcttaccaatatatttgagtccttcctgcctcagttattggcctatcctaaccccatagatcctctcaatggtgacgctgcagccatgtacctccaccgaccagaagaatacaagcagaaaattaaagagtacatccagaaatacgccacggaggaggcgctgaaagaacaggaagagggtaccggggacagctcatcggagagctctatgtctgacttttccgaagatgaggcccaggatatggagttgtagtagaaaaagcacctgcttttcagaaagactattatttcctaaccatgagaagcagactataatattcatatttaaacaaagcaattttttttattactaaacaaggtttttatgaataatagcattgatatatatatattatatatcaccctttagatcttgatttcttggtcatttctcaacctgaggtgcatagcatattcccacattccatttggtagcaatatgcggtctgaatgcatgcattcatgagtccatgtggccaagtcagcctgtgtgctactgaactgtcgaaggaaatagccgctctgataggtagatgtgagtaaaaagaacaggaaaaaattgcttcttttattggtttccaaagaaacaaaccaaaccaaccagctcttggatgtgaagataaaatagtgcttttttgaaatggagaggaaaaacttggggaggaagaggcctgctgtgggggcatcggagccagccatgtaagaatcagagctgctccttcctgtgaatcctaggtggccctatgtcttctgtggagttacagtataaagcagggagctaattaagagtattaaaacttaaaaccattttttgactctgattttaagtacatttttatatgtcagttgctgcccttcacactaccaggccctgcagccacagtgttctgttggagaaacttggggaagtgttttctgaaccagttctttttcttggggtagagcgtgaaatccagacctgtttttgaaaggacagcacaggaggagaaaagtgactgggacgatgcttcctctcatccaaaacacatgcagagtcacatcctcatcctagtgtttggcagtttgagaccgctaccctgaacttaagagctttaaatatgagggttgtgtttctgggggggttatttttttggtgtgtgtgtgtgtgtattgtgcttagaaaggttgcagatttcatcttcacctaccaagaggcggccgcctccttggacaagccgctcatggaccattagacttgagaagacgacccacgtggtgactgcaaagccctgggtacttgccttcatgttctggtttggttttccctttttctgctgctcttggcagcagcctggtcatcatctgcttgtgggagtgggaaatgggtattttagacccaacacaggttctaaatttaaaacaaataataattggaacaaataaaggttcttgtacccagagtgattctacatgggaaaaacaaaccagcttttttcagagagtgaccgaataggaagaagggattcagaaatatgatgtagtagaacatgccctgcaggaagaaaatgttttctctcctgcgtatgttaagaggaaatcagtttaaaatgcctgctaatcaaatgtcgactcagctaaccatatgtccaggttgctgcagagtttctttcaaatctgagtgttgcctgctgaactcggaggggagtttggagaaattttagacagcagctctgtgttctttttttgccgcagccaataagataatagcagaattagccaatcctaaaaccttctaaagacgatttttgagcatcccactgggattatttaatttttctttttgacgtgtgtttttagtttagaagtgctgtattccacaaggtttaagtcagtgaggttggaagataccctatcttttttattcaaaaagcacaatcaatcttttgtttgaaaatctatataaagtacaacttgcttttagcatgattattttcctaaataaaaagacaaagaatttacttactttatgttaattacgggcatgaagcaaaaggttttctttaaaaaaaaaaaaaagtgcagtgatgtagggctgtggttagttaaccgtactgagttatccatctagcatctgtggcttgctggaagggtagtattaactatttaacatgtaatggtgtacttcactcttacctagcacgctgtcttctcattgctttgggggagggagggtctctctgctggcactgtctaacttgcttacctgctgactttgcagtttgcttgtgctatgacatttattgtaggtgctatttagggtaggcttaaagtgctgggtggtgatttgagttcaaacaataaaaaattgtattttttcaatattgtataaacaatagtgttctaattaccttaaaaaaaaataatgaccagttaagaattgcttttgatcttgtcaaaaaactgaatagaccccagtttcgggaaggtgtgtgagcagtgccatgactctgccccttacctaatcccacatctctctaatgataagacattggctcgcctctgaccagagccccagcaccagagagcggaagatgcagaattgtcaaatgacctgctgggggaggttgtaggagtttagcagatttgagtgtggctgcagagagagagagtgtgtgtatgtgtgcacatgtgtgagagtgtgagcgagagtgtgtgtgtgtccatctaagtgtgtgtgatgaaggtgggataaggctcctctgttagtgctggaagctcctgtaattgccgcatggatcccactgtgccctcttgttctgtgcaagtctgtcctgtctgggcactaaccttggtcccatgcatgtttatgttctgggtggggctttgcctctccactgggaaactgacttttgctgggttgaacagagtcccttatgctttttgtcctctccctgcgcctgggagaggtgggagtaggagcccaaacacacaggtacagaaagatctggaagaaggcctggcagtgaatccaaggactctgggcccccaacaatagatggtagcgtaagtctggagcagcggtgtttcaccaccaaatgcctttccaggctgcccttccaacactcaggagagcatccagatccctgggcagaggctctacattcttggctttagaggtggtggcagcggcagcaggtcagagccacttctggcggtttccctcccctttttagtgcccatagtttttggatcctcccttgagttttaccagcacaagccattctttgcccctgttcacataactgagctcaagctcttgccaaacaccaacaagcaagatggttgcaacctggcaacattgaatccaccacccttgggctccctctggaagccccagcaccggggggcttttgggcacagggtcagtggtagccatcttagacactgacatttggctttgtcgtcaatttcatcaccctccttgaggttactgtgcagtttcaaccagcattttatcctagtgaggtcattatcaggagttgccatatcatctctccagtacctaacatttctcatccacttcaaaagctgttctgactgccagctggctgatctaagctcctgaggaatgtctcctctcaaaggaatttttccctccaaaggccccctgaagtcctagttggcattggcctggcacatgctttatgttaggcctcccgttgggatggctgagaatcatgaaagacagatcctccgctagcctctgtgggtcaagtttctggacaccaagtctctgggaactagtgtttgattttaaatggcatgtggcccttccttgtttcagtgacttagaaaagtaaaagccatttaaaaaagttagcaagattttttatcgacttcccaactgggcttccagccttgttgaatgaaatcatctatctctgattgggcgcaacgaactgcatttctttggacttctgaatccatgtttgtgctttctctggcccgtgaacacctcggcgattctgttagggatgggatgagtgggaggaagccctttgagaagggggagccggccctgtcatgcgcaggttttccactcatctgaggaagagccagggctctgaatttagcctaacactcatcttggctgtgggcttgggaagaaatggccattatttacagattgtatttggtacatattgtgtgatacttgaaaagataaaagggactgccagcccctaactgaaatctgaagctttttatcgcttatttttcctcgccctgtctcctcccttccacctttctccttgcattgtgatgatctagtaggcacgtctgtcaacaggacacatgcctcctctgactataacctcttaatagttgtgtataatgaaaactgtaaacttttttaaataaacgtgtatataccttggcaaatggctggaccttgatcaataagataatagccctcatgattactctcagctggttttctaaaataccctctctgttctggctcctttgagcagcagacgctggcttcttttggctgagcagctcttagaatgcagat

SEQ ID NO: 6962 - protein, 183 aa, Homo sapiens; identical to SEQ ID NO: 941

SEQ ID NO: 6963 - DNA, 5198 bp, Homo sapiens
ggctggggtagggaggccgactgagcaggagtcgtccgcttatagtggaggctgctaggagccggtcagagggtgagtggggagcaggcgagcgagccacagcaggcaggagggagcgtcgcgcggcgcagaggagcgccggggcagggccgcggcggaaccacagccggagaggggcagcccgagccgggcgccgcagggtccccacccccacccggccggacagtgcccggtgttcccccgtgcggggggcggcggcggcggctgacgggaccgccgggaccgcgggggtgttgccacctccaccgaggagccggcgcggccgcgggctcctcagagccggggccccgggcccgtgacagacgggccgaggaagggagagaggcggcggcgacaccatgtcatctcccagtccgggcaagaggcggatggacacggacgtggtcaagctcatcgagagtaaacatgaggttacgatcctgggaggacttaatgaatttgtagtgaagttttatggaccacaaggaacaccatatgaaggcggagtatggaaagttagagtggacctacctgataaataccctttcaaatctccatctatagatcttaccaatatatttgagtccttcctgcctcagttattggcctatcctaaccccatagatcctctcaatggtgacgctgcagccatgtacctccaccgaccagaagaatacaagcagaaaattaaagagtacatccagaaatacgccacggaggaggcgctgaaagaacaggaagagggtaccggggacagctcatcggagagctctatgtctgacttttccgaagatgaggcccaggatatggagttgtagtagaaaaagcacctgcttttcagaaagactattatttcctaaccatgagaagcagactataatattcatatttaaacaaagcaattttttttattactaaacaaggtttttatgaataatagcattgatatatatatattatatatcaccctttagatcttgatttcttggtcatttctcaacctgaggtgcatagcatattcccacattccatttggtagcaatatgcggtctgaatgcatgcattcatgagtccatgtggccaagtcagcctgtgtgctactgaactgtcgaaggaaatagccgctctgataggtagatgtgagtaaaaagaacaggaaaaaattgcttcttttattggtttccaaagaaacaaaccaaaccaaccagctcttggatgtgaagataaaatagtgcttttttgaaatggagaggaaaaacttggggaggaagaggcctgctgtgggggcatcggagccagccatgtaagaatcagagctgctccttcctgtgaatcctaggtggccctatgtcttctgtggagttacagtataaagcagggagctaattaagagtattaaaacttaaaaccattttttgactctgattttaagtacatttttatatgtcagttgctgcccttcacactaccaggccctgcagccacagtgttctgttggagaaacttggggaagtgttttctgaaccagttctttttcttggggtagagcgtgaaatccagacctgtttttgaaaggacagcacaggaggagaaaagtgactgggacgatgcttcctctcatccaaaacacatgcagagtcacatcctcatcctagtgtttggcagtttgagaccgctaccctgaacttaagagctttaaatatgagggttgtgtttctgggggggttatttttttggtgtgtgtgtgtgtgtattgtgcttagaaaggttgcagatttcatcttcacctaccaagaggcggccgcctccttggacaagccgctcatggaccattagacttgagaagacgacccacgtggtgactgcaaagccctgggtacttgccttcatgttctggtttggttttccctttttctgctgctcttggcagcagcctggtcatcatctgcttgtgggagtgggaaatgggtattttagacccaacacaggttctaaatttaaaacaaataataattggaacaaataaaggttcttgtacccagagtgattctacatgggaaaaacaaaccagcttttttcagagagtgaccgaataggaagaagggattcagaaatatgatgtagtagaacatgccctgcaggaagaaaatgttttctctcctgcgtatgttaagaggaaatcagtttaaaatgcctgctaatcaaatgtcgactcagctaaccatatgtccaggttgctgcagagtttctttcaaatctgagtgttgcctgctgaactcggaggggagtttggagaaattttagacagcagctctgtgttctttttttgccgcagccaataagataatagcagaattagccaatcctaaaaccttctaaagacgatttttgagcatcccactgggattatttaatttttctttttgacgtgtgtttttagtttagaagtgctgtattccacaaggtttaagtcagtgaggttggaagataccctatcttttttattcaaaaagcacaatcaatcttttgtttgaaaatctatataaagtacaacttgcttttagcatgattattttcctaaataaaaagacaaagaatttacttactttatgttaattacgggcatgaagcaaaaggttttctttaaaaaaaaaaaaaagtgcagtgatgtagggctgtggttagttaaccgtactgagttatccatctagcatctgtggcttgctggaagggtagtattaactatttaacatgtaatggtgtacttcactcttacctagcacgctgtcttctcattgctttgggggagggagggtctctctgctggcactgtctaacttgcttacctgctgactttgcagtttgcttgtgctatgacatttattgtaggtgctatttagggtaggcttaaagtgctgggtggtgatttgagttcaaacaataaaaaattgtattttttcaatattgtataaacaatagtgttctaattaccttaaaaaaaaataatgaccagttaagaattgcttttgatcttgtcaaaaaactgaatagaccccagtttcgggaaggtgtgtgagcagtgccatgactctgccccttacctaatcccacatctctctaatgataagacattggctcgcctctgaccagagccccagcaccagagagcggaagatgcagaattgtcaaatgacctgctgggggaggttgtaggagtttagcagatttgagtgtggctgcagagagagagagtgtgtgtatgtgtgcacatgtgtgagagtgtgagcgagagtgtgtgtgtgtccatctaagtgtgtgtgatgaaggtgggataaggctcctctgttagtgctggaagctcctgtaattgccgcatggatcccactgtgccctcttgttctgtgcaagtctgtcctgtctgggcactaaccttggtcccatgcatgtttatgttctgggtggggctttgcctctccactgggaaactgacttttgctgggttgaacagagtcccttatgctttttgtcctctccctgcgcctgggagaggtgggagtaggagcccaaacacacaggtacagaaagatctggaagaaggcctggcagtgaatccaaggactctgggcccccaacaatagatggtagcgtaagtctggagcagcggtgtttcaccaccaaatgcctttccaggctgcccttccaacactcaggagagcatccagatccctgggcagaggctctacattcttggctttagaggtggtggcagcggcagcaggtcagagccacttctggcggtttccctcccctttttagtgcccatagtttttggatcctcccttgagttttaccagcacaagccattctttgcccctgttcacataactgagctcaagctcttgccaaacaccaacaagcaagatggttgcaacctggcaacattgaatccaccacccttgggctccctctggaagccccagcaccggggggcttttgggcacagggtcagtggtagccatcttagacactgacatttggctttgtcgtcaatttcatcaccctccttgaggttactgtgcagtttcaaccagcattttatcctagtgaggtcattatcaggagttgccatatcatctctccagtacctaacatttctcatccacttcaaaagctgttctgactgccagctggctgatctaagctcctgaggaatgtctcctctcaaaggaatttttccctccaaaggccccctgaagtcctagttggcattggcctggcacatgctttatgttaggcctcccgttgggatggctgagaatcatgaaagacagatcctccgctagcctctgtgggtcaagtttctggacaccaagtctctgggaactagtgtttgattttaaatggcatgtggcccttccttgtttcagtgacttagaaaagtaaaagccatttaaaaaagttagcaagattttttatcgacttcccaactgggcttccagccttgttgaatgaaatcatctatctctgattgggcgcaacgaactgcatttctttggacttctgaatccatgtttgtgctttctctggcccgtgaacacctcggcgattctgttagggatgggatgagtgggaggaagccctttgagaagggggagccggccctgtcatgcgcaggttttccactcatctgaggaagagccagggctctgaatttagcctaacactcatcttggctgtgggcttgggaagaaatggccattatttacagattgtatttggtacatattgtgtgatacttgaaaagataaaagggactgccagcccctaactgaaatctgaagctttttatcgcttatttttcctcgccctgtctcctcccttccacctttctccttgcattgtgatgatctagtaggcacgtctgtcaacaggacacatgcctcctctgactataacctcttaatagttgtgtataatgaaaactgtaaacttttttaaataaacgtgtatataccttggcaaatggctggaccttgatcaataagataatagccctcatgattactctcagctggttttctaaaataccctctctgttctggctcctttgagcagcagacgctggcttcttttggctgagcagctcttagaatgcagat

SEQ ID NO: 6964 - protein, 152 aa, Homo sapiens; identical to SEQ ID NO: 943

SEQ ID NO: 6965 - DNA, 5231 bp, Homo sapiens
ggctggggtagggaggccgactgagcaggagtcgtccgcttatagtggaggctgctaggagccggtcagagggtgagtggggagcaggcgagcgagccacagcaggcaggagggagcgtcgcgcggcgcagaggagcgccggggcagggccgcggcggaaccacagccggagaggggcagcccgagccgggcgccgcagggtccccacccccacccggccggacagtgcccggtgttcccccgtgcggggggcggcggcggcggctgacgggaccgccgggaccgcgggggtgttgccacctccaccgaggagccggcgcggccgcgggctcctcagagccggggccccgggcccgtgacagacgggccgaggaagggagagaggcggcggcgacaccatgtcatctcccagtccgggcaagaggcggatggacacggacgtggtcaagctcatcgagagtaaacatgaggttacgatcctgggaggacttaatgaatttgtagtgaagttttatggaccacaaggaacaccatatgaaggcggagtatggaaagttagagtggacctacctgataaataccctttcaaatctccatctataggattcatgaataaaattttccatcccaacattgatgaagcgtcaggaactgtgtgtctagatgtaattaatcaaacttggacagctctctatgatcctctcaatggtgacgctgcagccatgtacctccaccgaccagaagaatacaagcagaaaattaaagagtacatccagaaatacgccacggaggaggcgctgaaagaacaggaagagggtaccggggacagctcatcggagagctctatgtctgacttttccgaagatgaggcccaggatatggagttgtagtagaaaaagcacctgcttttcagaaagactattatttcctaaccatgagaagcagactataatattcatatttaaacaaagcaattttttttattactaaacaaggtttttatgaataatagcattgatatatatatattatatatcaccctttagatcttgatttcttggtcatttctcaacctgaggtgcatagcatattcccacattccatttggtagcaatatgcggtctgaatgcatgcattcatgagtccatgtggccaagtcagcctgtgtgctactgaactgtcgaaggaaatagccgctctgataggtagatgtgagtaaaaagaacaggaaaaaattgcttcttttattggtttccaaagaaacaaaccaaaccaaccagctcttggatgtgaagataaaatagtgcttttttgaaatggagaggaaaaacttggggaggaagaggcctgctgtgggggcatcggagccagccatgtaagaatcagagctgctccttcctgtgaatcctaggtggccctatgtcttctgtggagttacagtataaagcagggagctaattaagagtattaaaacttaaaaccattttttgactctgattttaagtacatttttatatgtcagttgctgcccttcacactaccaggccctgcagccacagtgttctgttggagaaacttggggaagtgttttctgaaccagttctttttcttggggtagagcgtgaaatccagacctgtttttgaaaggacagcacaggaggagaaaagtgactgggacgatgcttcctctcatccaaaacacatgcagagtcacatcctcatcctagtgtttggcagtttgagaccgctaccctgaacttaagagctttaaatatgagggttgtgtttctgggggggttatttttttggtgtgtgtgtgtgtgtattgtgcttagaaaggttgcagatttcatcttcacctaccaagaggcggccgcctccttggacaagccgctcatggaccattagacttgagaagacgacccacgtggtgactgcaaagccctgggtacttgccttcatgttctggtttggttttccctttttctgctgctcttggcagcagcctggtcatcatctgcttgtgggagtgggaaatgggtattttagacccaacacaggttctaaatttaaaacaaataataattggaacaaataaaggttcttgtacccagagtgattctacatgggaaaaacaaaccagcttttttcagagagtgaccgaataggaagaagggattcagaaatatgatgtagtagaacatgccctgcaggaagaaaatgttttctctcctgcgtatgttaagaggaaatcagtttaaaatgcctgctaatcaaatgtcgactcagctaaccatatgtccaggttgctgcagagtttctttcaaatctgagtgttgcctgctgaactcggaggggagtttggagaaattttagacagcagctctgtgttctttttttgccgcagccaataagataatagcagaattagccaatcctaaaaccttctaaagacgatttttgagcatcccactgggattatttaatttttctttttgacgtgtgtttttagtttagaagtgctgtattccacaaggtttaagtcagtgaggttggaagataccctatcttttttattcaaaaagcacaatcaatcttttgtttgaaaatctatataaagtacaacttgcttttagcatgattattttcctaaataaaaagacaaagaatttacttactttatgttaattacgggcatgaagcaaaaggttttctttaaaaaaaaaaaaaagtgcagtgatgtagggctgtggttagttaaccgtactgagttatccatctagcatctgtggcttgctggaagggtagtattaactatttaacatgtaatggtgtacttcactcttacctagcacgctgtcttctcattgctttgggggagggagggtctctctgctggcactgtctaacttgcttacctgctgactttgcagtttgcttgtgctatgacatttattgtaggtgctatttagggtaggcttaaagtgctgggtggtgatttgagttcaaacaataaaaaattgtattttttcaatattgtataaacaatagtgttctaattaccttaaaaaaaaataatgaccagttaagaattgcttttgatcttgtcaaaaaactgaatagaccccagtttcgggaaggtgtgtgagcagtgccatgactctgccccttacctaatcccacatctctctaatgataagacattggctcgcctctgaccagagccccagcaccagagagcggaagatgcagaattgtcaaatgacctgctgggggaggttgtaggagtttagcagatttgagtgtggctgcagagagagagagtgtgtgtatgtgtgcacatgtgtgagagtgtgagcgagagtgtgtgtgtgtccatctaagtgtgtgtgatgaaggtgggataaggctcctctgttagtgctggaagctcctgtaattgccgcatggatcccactgtgccctcttgttctgtgcaagtctgtcctgtctgggcactaaccttggtcccatgcatgtttatgttctgggtggggctttgcctctccactgggaaactgacttttgctgggttgaacagagtcccttatgctttttgtcctctccctgcgcctgggagaggtgggagtaggagcccaaacacacaggtacagaaagatctggaagaaggcctggcagtgaatccaaggactctgggcccccaacaatagatggtagcgtaagtctggagcagcggtgtttcaccaccaaatgcctttccaggctgcccttccaacactcaggagagcatccagatccctgggcagaggctctacattcttggctttagaggtggtggcagcggcagcaggtcagagccacttctggcggtttccctcccctttttagtgcccatagtttttggatcctcccttgagttttaccagcacaagccattctttgcccctgttcacataactgagctcaagctcttgccaaacaccaacaagcaagatggttgcaacctggcaacattgaatccaccacccttgggctccctctggaagccccagcaccggggggcttttgggcacagggtcagtggtagccatcttagacactgacatttggctttgtcgtcaatttcatcaccctccttgaggttactgtgcagtttcaaccagcattttatcctagtgaggtcattatcaggagttgccatatcatctctccagtacctaacatttctcatccacttcaaaagctgttctgactgccagctggctgatctaagctcctgaggaatgtctcctctcaaaggaatttttccctccaaaggccccctgaagtcctagttggcattggcctggcacatgctttatgttaggcctcccgttgggatggctgagaatcatgaaagacagatcctccgctagcctctgtgggtcaagtttctggacaccaagtctctgggaactagtgtttgattttaaatggcatgtggcccttccttgtttcagtgacttagaaaagtaaaagccatttaaaaaagttagcaagattttttatcgacttcccaactgggcttccagccttgttgaatgaaatcatctatctctgattgggcgcaacgaactgcatttctttggacttctgaatccatgtttgtgctttctctggcccgtgaacacctcggcgattctgttagggatgggatgagtgggaggaagccctttgagaagggggagccggccctgtcatgcgcaggttttccactcatctgaggaagagccagggctctgaatttagcctaacactcatcttggctgtgggcttgggaagaaatggccattatttacagattgtatttggtacatattgtgtgatacttgaaaagataaaagggactgccagcccctaactgaaatctgaagctttttatcgcttatttttcctcgccctgtctcctcccttccacctttctccttgcattgtgatgatctagtaggcacgtctgtcaacaggacacatgcctcctctgactataacctcttaatagttgtgtataatgaaaactgtaaacttttttaaataaacgtgtatataccttggcaaatggctggaccttgatcaataagataatagccctcatgattactctcagctggttttctaaaataccctctctgttctggctcctttgagcagcagacgctggcttcttttggctgagcagctcttagaatgcagat

SEQ ID NO: 6966 - protein, 163 aa, Homo sapiens
MSSPSPGKRRMDTDVVKLIESKHEVTILGGLNEFVVKFYGPQGTPYEGGVWKVRVDLPDKYPFKSPSIGFMNKIFHPNIDEASGTVCLDVINQTWTALYDPLNGDAAAMYLHRPEEYKQKIKEYIQKYATEEALKEQEEGTGDSSSESSMSDFSEDEAQDMEL

SEQ ID NO: 6967 - DNA, 4614 bp, Homo sapiens
agagcgaggctggggtagggaggccgactgagcaggagtcgtccgcttatagtggaggctgctaggagccggtcagagggtgagtggggagcaggcgagcgagccatgtacctccaccgaccagaagaatacaagcagaaaattaaagagtacatccagaaatacgccacggaggaggcgctgaaagaacaggaagagggtaccggggacagctcatcggagagctctatgtctgacttttccgaagatgaggcccaggatatggagttgtagtagaaaaagcacctgcttttcagaaagactattatttcctaaccatgagaagcagactataatattcatatttaaacaaagcaattttttttattactaaacaaggtttttatgaataatagcattgatatatatatattatatatcaccctttagatcttgatttcttggtcatttctcaacctgaggtgcatagcatattcccacattccatttggtagcaatatgcggtctgaatgcatgcattcatgagtccatgtggccaagtcagcctgtgtgctactgaactgtcgaaggaaatagccgctctgataggtagatgtgagtaaaaagaacaggaaaaaattgcttcttttattggtttccaaagaaacaaaccaaaccaaccagctcttggatgtgaagataaaatagtgcttttttgaaatggagaggaaaaacttggggaggaagaggcctgctgtgggggcatcggagccagccatgtaagaatcagagctgctccttcctgtgaatcctaggtggccctatgtcttctgtggagttacagtataaagcagggagctaattaagagtattaaaacttaaaaccattttttgactctgattttaagtacatttttatatgtcagttgctgcccttcacactaccaggccctgcagccacagtgttctgttggagaaacttggggaagtgttttctgaaccagttctttttcttggggtagagcgtgaaatccagacctgtttttgaaaggacagcacaggaggagaaaagtgactgggacgatgcttcctctcatccaaaacacatgcagagtcacatcctcatcctagtgtttggcagtttgagaccgctaccctgaacttaagagctttaaatatgagggttgtgtttctgggggggttatttttttggtgtgtgtgtgtgtgtattgtgcttagaaaggttgcagatttcatcttcacctaccaagaggcggccgcctccttggacaagccgctcatggaccattagacttgagaagacgacccacgtggtgactgcaaagccctgggtacttgccttcatgttctggtttggttttccctttttctgctgctcttggcagcagcctggtcatcatctgcttgtgggagtgggaaatgggtattttagacccaacacaggttctaaatttaaaacaaataataattggaacaaataaaggttcttgtacccagagtgattctacatgggaaaaacaaaccagcttttttcagagagtgaccgaataggaagaagggattcagaaatatgatgtagtagaacatgccctgcaggaagaaaatgttttctctcctgcgtatgttaagaggaaatcagtttaaaatgcctgctaatcaaatgtcgactcagctaaccatatgtccaggttgctgcagagtttctttcaaatctgagtgttgcctgctgaactcggaggggagtttggagaaattttagacagcagctctgtgttctttttttgccgcagccaataagataatagcagaattagccaatcctaaaaccttctaaagacgatttttgagcatcccactgggattatttaatttttctttttgacgtgtgtttttagtttagaagtgctgtattccacaaggtttaagtcagtgaggttggaagataccctatcttttttattcaaaaagcacaatcaatcttttgtttgaaaatctatataaagtacaacttgcttttagcatgattattttcctaaataaaaagacaaagaatttacttactttatgttaattacgggcatgaagcaaaaggttttctttaaaaaaaaaaaaaagtgcagtgatgtagggctgtggttagttaaccgtactgagttatccatctagcatctgtggcttgctggaagggtagtattaactatttaacatgtaatggtgtacttcactcttacctagcacgctgtcttctcattgctttgggggagggagggtctctctgctggcactgtctaacttgcttacctgctgactttgcagtttgcttgtgctatgacatttattgtaggtgctatttagggtaggcttaaagtgctgggtggtgatttgagttcaaacaataaaaaattgtattttttcaatattgtataaacaatagtgttctaattaccttaaaaaaaaataatgaccagttaagaattgcttttgatcttgtcaaaaaactgaatagaccccagtttcgggaaggtgtgtgagcagtgccatgactctgccccttacctaatcccacatctctctaatgataagacattggctcgcctctgaccagagccccagcaccagagagcggaagatgcagaattgtcaaatgacctgctgggggaggttgtaggagtttagcagatttgagtgtggctgcagagagagagagtgtgtgtatgtgtgcacatgtgtgagagtgtgagcgagagtgtgtgtgtgtccatctaagtgtgtgtgatgaaggtgggataaggctcctctgttagtgctggaagctcctgtaattgccgcatggatcccactgtgccctcttgttctgtgcaagtctgtcctgtctgggcactaaccttggtcccatgcatgtttatgttctgggtggggctttgcctctccactgggaaactgacttttgctgggttgaacagagtcccttatgctttttgtcctctccctgcgcctgggagaggtgggagtaggagcccaaacacacaggtacagaaagatctggaagaaggcctggcagtgaatccaaggactctgggcccccaacaatagatggtagcgtaagtctggagcagcggtgtttcaccaccaaatgcctttccaggctgcccttccaacactcaggagagcatccagatccctgggcagaggctctacattcttggctttagaggtggtggcagcggcagcaggtcagagccacttctggcggtttccctcccctttttagtgcccatagtttttggatcctcccttgagttttaccagcacaagccattctttgcccctgttcacataactgagctcaagctcttgccaaacaccaacaagcaagatggttgcaacctggcaacattgaatccaccacccttgggctccctctggaagccccagcaccggggggcttttgggcacagggtcagtggtagccatcttagacactgacatttggctttgtcgtcaatttcatcaccctccttgaggttactgtgcagtttcaaccagcattttatcctagtgaggtcattatcaggagttgccatatcatctctccagtacctaacatttctcatccacttcaaaagctgttctgactgccagctggctgatctaagctcctgaggaatgtctcctctcaaaggaatttttccctccaaaggccccctgaagtcctagttggcattggcctggcacatgctttatgttaggcctcccgttgggatggctgagaatcatgaaagacagatcctccgctagcctctgtgggtcaagtttctggacaccaagtctctgggaactagtgtttgattttaaatggcatgtggcccttccttgtttcagtgacttagaaaagtaaaagccatttaaaaaagttagcaagattttttatcgacttcccaactgggcttccagccttgttgaatgaaatcatctatctctgattgggcgcaacgaactgcatttctttggacttctgaatccatgtttgtgctttctctggcccgtgaacacctcggcgattctgttagggatgggatgagtgggaggaagccctttgagaagggggagccggccctgtcatgcgcaggttttccactcatctgaggaagagccagggctctgaatttagcctaacactcatcttggctgtgggcttgggaagaaatggccattatttacagattgtatttggtacatattgtgtgatacttgaaaagataaaagggactgccagcccctaactgaaatctgaagctttttatcgcttatttttcctcgccctgtctcctcccttccacctttctccttgcattgtgatgatctagtaggcacgtctgtcaacaggacacatgcctcctctgactataacctcttaatagttgtgtataatgaaaactgtaaacttttttaaataaacgtgtatataccttggcaaatggctggaccttgatcaataagataatagccctcatgattactctcagctggttttctaaaataccctctctgttctggctcctttgagcagcagacgctggcttcttttggctgagcagctcttagaatgcagat

SEQ ID NO: 6968 - protein, 55 aa, Homo sapiens
MYLHRPEEYKQKIKEYIQKYATEEALKEQEEGTGDSSSESSMSDFSEDEAQDMEL

SEQ ID NO: 6969 - DNA, 4763 bp, Homo sapiens
gggaggccgactgagcaggagtcgtccgcttatagtggaggctgctaggagccggtcagaggcatcgagagtaaacatgaggttacgatcctgggaggacttaatgaatttgtagtgaagttttatggaccacaaggaacaccatatgaaggcggagtatggaaagttagagtggacctacctgataaataccctttcaaatctccatctataggattcatgaataaaattttccatcccaacattgatgaagcgtcaggaactgtgtgtctagatgtaattaatcaaacttggacagctctctatgatcttaccaatatatttgagtccttcctgcctcagttattggcctatcctaaccccatagatcctctcaatggtgacgctgcagccatgtacctccaccgaccagaagaatacaagcagaaaattaaagagtacatccagaaatacgccacggaggaggcgctgaaagaacaggaagagggtaccggggacagctcatcggagagctctatgtctgacttttccgaagatgaggcccaggatatggagttgtagtagaaaaagcacctgcttttcagaaagactattatttcctaaccatgagaagcagactataatattcatatttaaacaaagcaattttttttattactaaacaaggtttttatgaataatagcattgatatatatatattatatatcaccctttagatcttgatttcttggtcatttctcaacctgaggtgcatagcatattcccacattccatttggtagcaatatgcggtctgaatgcatgcattcatgagtccatgtggccaagtcagcctgtgtgctactgaactgtcgaaggaaatagccgctctgataggtagatgtgagtaaaaagaacaggaaaaaattgcttcttttattggtttccaaagaaacaaaccaaaccaaccagctcttggatgtgaagataaaatagtgcttttttgaaatggagaggaaaaacttggggaggaagaggcctgctgtgggggcatcggagccagccatgtaagaatcagagctgctccttcctgtgaatcctaggtggccctatgtcttctgtggagttacagtataaagcagggagctaattaagagtattaaaacttaaaaccattttttgactctgattttaagtacatttttatatgtcagttgctgcccttcacactaccaggccctgcagccacagtgttctgttggagaaacttggggaagtgttttctgaaccagttctttttcttggggtagagcgtgaaatccagacctgtttttgaaaggacagcacaggaggagaaaagtgactgggacgatgcttcctctcatccaaaacacatgcagagtcacatcctcatcctagtgtttggcagtttgagaccgctaccctgaacttaagagctttaaatatgagggttgtgtttctgggggggttatttttttggtgtgtgtgtgtgtgtattgtgcttagaaaggttgcagatttcatcttcacctaccaagaggcggccgcctccttggacaagccgctcatggaccattagacttgagaagacgacccacgtggtgactgcaaagccctgggtacttgccttcatgttctggtttggttttccctttttctgctgctcttggcagcagcctggtcatcatctgcttgtgggagtgggaaatgggtattttagacccaacacaggttctaaatttaaaacaaataataattggaacaaataaaggttcttgtacccagagtgattctacatgggaaaaacaaaccagcttttttcagagagtgaccgaataggaagaagggattcagaaatatgatgtagtagaacatgccctgcaggaagaaaatgttttctctcctgcgtatgttaagaggaaatcagtttaaaatgcctgctaatcaaatgtcgactcagctaaccatatgtccaggttgctgcagagtttctttcaaatctgagtgttgcctgctgaactcggaggggagtttggagaaattttagacagcagctctgtgttctttttttgccgcagccaataagataatagcagaattagccaatcctaaaaccttctaaagacgatttttgagcatcccactgggattatttaatttttctttttgacgtgtgtttttagtttagaagtgctgtattccacaaggtttaagtcagtgaggttggaagataccctatcttttttattcaaaaagcacaatcaatcttttgtttgaaaatctatataaagtacaacttgcttttagcatgattattttcctaaataaaaagacaaagaatttacttactttatgttaattacgggcatgaagcaaaaggttttctttaaaaaaaaaaaaaagtgcagtgatgtagggctgtggttagttaaccgtactgagttatccatctagcatctgtggcttgctggaagggtagtattaactatttaacatgtaatggtgtacttcactcttacctagcacgctgtcttctcattgctttgggggagggagggtctctctgctggcactgtctaacttgcttacctgctgactttgcagtttgcttgtgctatgacatttattgtaggtgctatttagggtaggcttaaagtgctgggtggtgatttgagttcaaacaataaaaaattgtattttttcaatattgtataaacaatagtgttctaattaccttaaaaaaaaataatgaccagttaagaattgcttttgatcttgtcaaaaaactgaatagaccccagtttcgggaaggtgtgtgagcagtgccatgactctgccccttacctaatcccacatctctctaatgataagacattggctcgcctctgaccagagccccagcaccagagagcggaagatgcagaattgtcaaatgacctgctgggggaggttgtaggagtttagcagatttgagtgtggctgcagagagagagagtgtgtgtatgtgtgcacatgtgtgagagtgtgagcgagagtgtgtgtgtgtccatctaagtgtgtgtgatgaaggtgggataaggctcctctgttagtgctggaagctcctgtaattgccgcatggatcccactgtgccctcttgttctgtgcaagtctgtcctgtctgggcactaaccttggtcccatgcatgtttatgttctgggtggggctttgcctctccactgggaaactgacttttgctgggttgaacagagtcccttatgctttttgtcctctccctgcgcctgggagaggtgggagtaggagcccaaacacacaggtacagaaagatctggaagaaggcctggcagtgaatccaaggactctgggcccccaacaatagatggtagcgtaagtctggagcagcggtgtttcaccaccaaatgcctttccaggctgcccttccaacactcaggagagcatccagatccctgggcagaggctctacattcttggctttagaggtggtggcagcggcagcaggtcagagccacttctggcggtttccctcccctttttagtgcccatagtttttggatcctcccttgagttttaccagcacaagccattctttgcccctgttcacataactgagctcaagctcttgccaaacaccaacaagcaagatggttgcaacctggcaacattgaatccaccacccttgggctccctctggaagccccagcaccggggggcttttgggcacagggtcagtggtagccatcttagacactgacatttggctttgtcgtcaatttcatcaccctccttgaggttactgtgcagtttcaaccagcattttatcctagtgaggtcattatcaggagttgccatatcatctctccagtacctaacatttctcatccacttcaaaagctgttctgactgccagctggctgatctaagctcctgaggaatgtctcctctcaaaggaatttttccctccaaaggccccctgaagtcctagttggcattggcctggcacatgctttatgttaggcctcccgttgggatggctgagaatcatgaaagacagatcctccgctagcctctgtgggtcaagtttctggacaccaagtctctgggaactagtgtttgattttaaatggcatgtggcccttccttgtttcagtgacttagaaaagtaaaagccatttaaaaaagttagcaagattttttatcgacttcccaactgggcttccagccttgttgaatgaaatcatctatctctgattgggcgcaacgaactgcatttctttggacttctgaatccatgtttgtgctttctctggcccgtgaacacctcggcgattctgttagggatgggatgagtgggaggaagccctttgagaagggggagccggccctgtcatgcgcaggttttccactcatctgaggaagagccagggctctgaatttagcctaacactcatcttggctgtgggcttgggaagaaatggccattatttacagattgtatttggtacatattgtgtgatacttgaaaagataaaagggactgccagcccctaactgaaatctgaagctttttatcgcttatttttcctcgccctgtctcctcccttccacctttctccttgcattgtgatgatctagtaggcacgtctgtcaacaggacacatgcctcctctgactataacctcttaatagttgtgtataatgaaaactgtaaacttttttaaataaacgtgtatataccttggc

SEQ ID NO: 6970 - protein, 113 aa, Homo sapiens; identical to SEQ ID NO: 6960

SEQ ID NO: 6971 - DNA, 5152 bp, Homo sapiens
ggctggggtagggaggccgactgagcaggagtcgtccgcttatagtggaggctgctaggagccggtcagagggtgagtggggagcaggcgagcgagccacagcaggcaggagggagcgtcgcgcggcgcagaggagcgccggggcagggccgcggcggaaccacagccggagaggggcagcccgagccgggcgccgcagggtccccacccccacccggccggacagtgcccggtgttcccccgtgcggggggcggcggcggcggctgacgggaccgccgggaccgcgggggtgttgccacctccaccgaggagccggcgcggccgcgggctcctcagagccggggccccgggcccgtgacagacgggccgaggaagggagagaggcggcggcgacaccatgtcatctcccagtccgggcaagaggcggatggacacggacgtggtcaagctcatcgagagtaaacatgaggttacgatcctgggaggacttaatgaatttgtagtgaagttttatggaccacaaggaacaccatatgaaggcggagtatggaaagttagagtggacctacctgataaataccctttcaaatctccatctataggattcatgaataaaattttccatcccaacattgatgaagcgtcaggaactgtgtgtctagatgtaattaatcaaacttggacagctctctatgatcttaccaatatatttgagtccttcctgcctcagttattggcctatcctaaccccatagatcctctcaatggtgacgctgcagccatgtacctccaccgaccagaagaatacaagcagaaaattaaagagtacatccagaaatacgccacggaggaggcgctgaaagaacaggaagagggtaccggggacagctcatcggagagctctatgtctgacttttccgaagatgaggcccaggatatggagttgtagtagaaaaagcacctgcttttcagaaagactattatttcctaaccatgagaagcagactataatattcatatttaaacaaagcaattttttttattactaaacaaggtttttatgaataatagcattgatatatatatattatatatcaccctttagatcttgatttcttggtcatttctcaacctgaggtgcatagcatattcccacattccatttggtagcaatatgcggtctgaatgcatgcattcatgagtccatgtggccaagtcagcctgtgtgctactgaactgtcgaaggaaatagccgctctgataggtagatgtgagtaaaaagaacaggaaaaaattgcttcttttattggtttccaaagaaacaaaccaaaccaaccagctcttggatgtgaagataaaatagtgcttttttgaaatggagaggaaaaacttggggaggaagaggcctgctgtgggggcatcggagccagccatgtaagaatcagagctgctccttcctgtgaatcctaggtggccctatgtcttctgtggagttacagtataaagcagggagctaattaagagtattaaaacttaaaaccattttttgactctgattttaagtacatttttatatgtcagttgctgcccttcacactaccaggccctgcagccacagtgttctgttggagaaacttggggaagtgttttctgaaccagttctttttcttggggtagagcgtgaaatccagacctgtttttgaaaggacagcacaggaggagaaaagtgactgggacgatgcttcctctcatccaaaacacatgcagagtcacatcctcatcctagtgtttggcagtttgagaccgctaccctgaacttaagagctttaaatatgagggttgtgtttctgggggggttatttttttggtgtgtgtgtgtgtgtattgtgcttagaaaggttgcagatttcatcttcacctaccaagaggcggccgcctccttggacaagccgctcatggaccattagacttgagaagacgacccacgtggtgactgcaaagccctgggtacttgccttcatgttctggtttggttttccctttttctgctgctcttggcagcagcctggtcatcatctgcttgtgggagtgggaaatgggtattttagacccaacacaggttctaaatttaaaacaaataataattggaacaaataaaggttcttgtacccagagtgattctacatgggaaaaacaaaccagcttttttcagagagtgaccgaataggaagaagggattcagaaatatgatgtagtagaacatgccctgcaggaagaaaatgttttctctcctgcgtatgttaagaggaaatcagtttaaaatgcctgctaatcaaatgtcgactcagctaaccatatgtccaggttgctgcagagtttctttcaaatctgagtgttgcctgctgaactcggaggggagtttggagaaattttagacagcagctctgtgttctttttttgccgcagccaataagataatagcagaattagccaatcctaaaaccttctaaagacgatttttgagcatcccactgggattatttaatttttctttttgacgtgtgtttttagtttagaagtgctgtattccacaaggtttaagtcagtgaggttggaagataccctatcttttttattcaaaaagcacaatcaatcttttgtttgaaaatctatataaagtacaacttgcttttagcatgattattttcctaaataaaaagacaaagaatttacttactttatgttaattacgggcatgaagcaaaaggttttctttaaaaaaaaaaaaaagtgcagtgatgtagggctgtggttagttaaccgtactgagttatccatctagcatctgtggcttgctggaagggtagtattaactatttaacatgtaatggtgtacttcactcttacctagcacgctgtcttctcattgctttgggggagggagggtctctctgctggcactgtctaacttgcttacctgctgactttgcagtttgcttgtgctatgacatttattgtaggtgctatttagggtaggcttaaagtgctgggtggtgatttgagttcaaacaataaaaaattgtattttttcaatattgtataaacaatagtgttctaattaccttaaaaaaaaataatgaccagttaagaattgcttttgatcttgtcaaaaaactgaatagaccccagtttcgggaaggtgtgtgagcagtgccatgactctgccccttacctaatcccacatctctctaatgataagacattggctcgcctctgaccagagccccagcaccagagagcggaagatgcagaattgtcaaatgacctgctgggggaggttgtaggagtttagcagatttgagtgtggctgcagagagagagagtgtgtgtatgtgtgcacatgtgtgagagtgtgagcgagagtgtgtgtgtgtccatctaagtgtgtgtgatgaaggtgggataaggctcctctgttagtgctggaagctcctgtaattgccgcatggatcccactgtgccctcttgttctgtgcaagtctgtcctgtctgggcactaaccttggtcccatgcatgtttatgttctgggtggggctttgcctctccactgggaaactgacttttgctgggttgaacagagtcccttatgctttttgtcctctccctgcgcctgggagaggtgggagtaggagcccaaacacacaggtacagaaagatctggaagaaggcctggcagtgaatccaaggactctgggcccccaacaatagatggtagcgtaagtctggagcagcggtgtttcaccaccaaatgcctttccaggctgcccttccaacactcaggagagcatccagatccctgggcagaggctctacattcttggctttagaggtggtggcagcggcagcaggtcagagccacttctggcggtttccctcccctttttagtgcccatagtttttggatcctcccttgagttttaccagcacaagccattctttgcccctgttcacataactgagctcaagctcttgccaaacaccaacaagcaagatggttgcaacctggcaacattgaatccaccacccttgggctccctctggaagccccagcaccggggggcttttgggcacagggtcagtggtagccatcttagacactgacatttggctttgtcgtcaatttcatcaccctccttgaggttactgtgcagtttcaaccagcattttatcctagtgaggtcattatcaggagttgccatatcatctctccagtacctaacatttctcatccacttcaaaagctgttctgactgccagctggctgatctaagctcctgaggaatgtctcctctcaaaggaatttttccctccaaaggccccctgaagtcctagttggcattggcctggcacatgctttatgttaggcctcccgttgggatggctgagaatcatgaaagacagatcctccgctagcctctgtgggtcaagtttctggacaccaagtctctgggaactagtgtttgattttaaatggcatgtggcccttccttgtttcagtgacttagaaaagtaaaagccatttaaaaaagttagcaagattttttatcgacttcccaactgggcttccagccttgttgaatgaaatcatctatctctgattgggcgcaacgaactgcatttctttggacttctgaatccatgtttgtgctttctctggcccgtgaacacctcggcgattctgttagggatgggatgagtgggaggaagccctttgagaagggggagccggccctgtcatgcgcaggttttccactcatctgaggaagagccagggctctgaatttagcctaacactcatcttggctgtgggcttgggaagaaatggccattatttacagattgtatttggtacatattgtgtgatacttgaaaagataaaagggactgccagcccctaactgaaatctgaagctttttatcgcttatttttcctcgccctgtctcctcccttccacctttctccttgcattgtgatgatctagtaggcacgtctgtcaacaggacacatgcctcctctgactataacctcttaatagttgtgtataatgaaaactgtaaacttttttaaataaacgtgtatataccttggc

SEQ ID NO: 6972 - protein, 183 aa, Homo sapiens; identical to SEQ ID NO: 941

SEQ ID NO: 6973 - DNA, 5092 bp, Homo sapiens
ggctggggtagggaggccgactgagcaggagtcgtccgcttatagtggaggctgctaggagccggtcagagggtgagtggggagcaggcgagcgagccacagcaggcaggagggagcgtcgcgcggcgcagaggagcgccggggcagggccgcggcggaaccacagccggagaggggcagcccgagccgggcgccgcagggtccccacccccacccggccggacagtgcccggtgttcccccgtgcggggggcggcggcggcggctgacgggaccgccgggaccgcgggggtgttgccacctccaccgaggagccggcgcggccgcgggctcctcagagccggggccccgggcccgtgacagacgggccgaggaagggagagaggcggcggcgacaccatgtcatctcccagtccgggcaagaggcggatggacacggacgtggtcaagctcatcgagagtaaacatgaggttacgatcctgggaggacttaatgaatttgtagtgaagttttatggaccacaaggaacaccatatgaaggcggagtatggaaagttagagtggacctacctgataaataccctttcaaatctccatctataggattcatgaataaaattttccatcccaacattgatgaagcgtcaggaactgtgtgtctagatgtaattaatcaaacttggacagctctctatgatcctctcaatggtgacgctgcagccatgtacctccaccgaccagaagaatacaagcagaaaattaaagagtacatccagaaatacgccacggaggaggcgctgaaagaacaggaagagggtaccggggacagctcatcggagagctctatgtctgacttttccgaagatgaggcccaggatatggagttgtagtagaaaaagcacctgcttttcagaaagactattatttcctaaccatgagaagcagactataatattcatatttaaacaaagcaattttttttattactaaacaaggtttttatgaataatagcattgatatatatatattatatatcaccctttagatcttgatttcttggtcatttctcaacctgaggtgcatagcatattcccacattccatttggtagcaatatgcggtctgaatgcatgcattcatgagtccatgtggccaagtcagcctgtgtgctactgaactgtcgaaggaaatagccgctctgataggtagatgtgagtaaaaagaacaggaaaaaattgcttcttttattggtttccaaagaaacaaaccaaaccaaccagctcttggatgtgaagataaaatagtgcttttttgaaatggagaggaaaaacttggggaggaagaggcctgctgtgggggcatcggagccagccatgtaagaatcagagctgctccttcctgtgaatcctaggtggccctatgtcttctgtggagttacagtataaagcagggagctaattaagagtattaaaacttaaaaccattttttgactctgattttaagtacatttttatatgtcagttgctgcccttcacactaccaggccctgcagccacagtgttctgttggagaaacttggggaagtgttttctgaaccagttctttttcttggggtagagcgtgaaatccagacctgtttttgaaaggacagcacaggaggagaaaagtgactgggacgatgcttcctctcatccaaaacacatgcagagtcacatcctcatcctagtgtttggcagtttgagaccgctaccctgaacttaagagctttaaatatgagggttgtgtttctgggggggttatttttttggtgtgtgtgtgtgtgtattgtgcttagaaaggttgcagatttcatcttcacctaccaagaggcggccgcctccttggacaagccgctcatggaccattagacttgagaagacgacccacgtggtgactgcaaagccctgggtacttgccttcatgttctggtttggttttccctttttctgctgctcttggcagcagcctggtcatcatctgcttgtgggagtgggaaatgggtattttagacccaacacaggttctaaatttaaaacaaataataattggaacaaataaaggttcttgtacccagagtgattctacatgggaaaaacaaaccagcttttttcagagagtgaccgaataggaagaagggattcagaaatatgatgtagtagaacatgccctgcaggaagaaaatgttttctctcctgcgtatgttaagaggaaatcagtttaaaatgcctgctaatcaaatgtcgactcagctaaccatatgtccaggttgctgcagagtttctttcaaatctgagtgttgcctgctgaactcggaggggagtttggagaaattttagacagcagctctgtgttctttttttgccgcagccaataagataatagcagaattagccaatcctaaaaccttctaaagacgatttttgagcatcccactgggattatttaatttttctttttgacgtgtgtttttagtttagaagtgctgtattccacaaggtttaagtcagtgaggttggaagataccctatcttttttattcaaaaagcacaatcaatcttttgtttgaaaatctatataaagtacaacttgcttttagcatgattattttcctaaataaaaagacaaagaatttacttactttatgttaattacgggcatgaagcaaaaggttttctttaaaaaaaaaaaaaagtgcagtgatgtagggctgtggttagttaaccgtactgagttatccatctagcatctgtggcttgctggaagggtagtattaactatttaacatgtaatggtgtacttcactcttacctagcacgctgtcttctcattgctttgggggagggagggtctctctgctggcactgtctaacttgcttacctgctgactttgcagtttgcttgtgctatgacatttattgtaggtgctatttagggtaggcttaaagtgctgggtggtgatttgagttcaaacaataaaaaattgtattttttcaatattgtataaacaatagtgttctaattaccttaaaaaaaaataatgaccagttaagaattgcttttgatcttgtcaaaaaactgaatagaccccagtttcgggaaggtgtgtgagcagtgccatgactctgccccttacctaatcccacatctctctaatgataagacattggctcgcctctgaccagagccccagcaccagagagcggaagatgcagaattgtcaaatgacctgctgggggaggttgtaggagtttagcagatttgagtgtggctgcagagagagagagtgtgtgtatgtgtgcacatgtgtgagagtgtgagcgagagtgtgtgtgtgtccatctaagtgtgtgtgatgaaggtgggataaggctcctctgttagtgctggaagctcctgtaattgccgcatggatcccactgtgccctcttgttctgtgcaagtctgtcctgtctgggcactaaccttggtcccatgcatgtttatgttctgggtggggctttgcctctccactgggaaactgacttttgctgggttgaacagagtcccttatgctttttgtcctctccctgcgcctgggagaggtgggagtaggagcccaaacacacaggtacagaaagatctggaagaaggcctggcagtgaatccaaggactctgggcccccaacaatagatggtagcgtaagtctggagcagcggtgtttcaccaccaaatgcctttccaggctgcccttccaacactcaggagagcatccagatccctgggcagaggctctacattcttggctttagaggtggtggcagcggcagcaggtcagagccacttctggcggtttccctcccctttttagtgcccatagtttttggatcctcccttgagttttaccagcacaagccattctttgcccctgttcacataactgagctcaagctcttgccaaacaccaacaagcaagatggttgcaacctggcaacattgaatccaccacccttgggctccctctggaagccccagcaccggggggcttttgggcacagggtcagtggtagccatcttagacactgacatttggctttgtcgtcaatttcatcaccctccttgaggttactgtgcagtttcaaccagcattttatcctagtgaggtcattatcaggagttgccatatcatctctccagtacctaacatttctcatccacttcaaaagctgttctgactgccagctggctgatctaagctcctgaggaatgtctcctctcaaaggaatttttccctccaaaggccccctgaagtcctagttggcattggcctggcacatgctttatgttaggcctcccgttgggatggctgagaatcatgaaagacagatcctccgctagcctctgtgggtcaagtttctggacaccaagtctctgggaactagtgtttgattttaaatggcatgtggcccttccttgtttcagtgacttagaaaagtaaaagccatttaaaaaagttagcaagattttttatcgacttcccaactgggcttccagccttgttgaatgaaatcatctatctctgattgggcgcaacgaactgcatttctttggacttctgaatccatgtttgtgctttctctggcccgtgaacacctcggcgattctgttagggatgggatgagtgggaggaagccctttgagaagggggagccggccctgtcatgcgcaggttttccactcatctgaggaagagccagggctctgaatttagcctaacactcatcttggctgtgggcttgggaagaaatggccattatttacagattgtatttggtacatattgtgtgatacttgaaaagataaaagggactgccagcccctaactgaaatctgaagctttttatcgcttatttttcctcgccctgtctcctcccttccacctttctccttgcattgtgatgatctagtaggcacgtctgtcaacaggacacatgcctcctctgactataacctcttaatagttgtgtataatgaaaactgtaaacttttttaaataaacgtgtatataccttggc

SEQ ID NO: 6974 - protein, 163 aa, Homo sapiens; identical to SEQ ID NO: 6966

SEQ ID NO: 6975 - DNA, 5059 bp, Homo sapiens
ggctggggtagggaggccgactgagcaggagtcgtccgcttatagtggaggctgctaggagccggtcagagggtgagtggggagcaggcgagcgagccacagcaggcaggagggagcgtcgcgcggcgcagaggagcgccggggcagggccgcggcggaaccacagccggagaggggcagcccgagccgggcgccgcagggtccccacccccacccggccggacagtgcccggtgttcccccgtgcggggggcggcggcggcggctgacgggaccgccgggaccgcgggggtgttgccacctccaccgaggagccggcgcggccgcgggctcctcagagccggggccccgggcccgtgacagacgggccgaggaagggagagaggcggcggcgacaccatgtcatctcccagtccgggcaagaggcggatggacacggacgtggtcaagctcatcgagagtaaacatgaggttacgatcctgggaggacttaatgaatttgtagtgaagttttatggaccacaaggaacaccatatgaaggcggagtatggaaagttagagtggacctacctgataaataccctttcaaatctccatctatagatcttaccaatatatttgagtccttcctgcctcagttattggcctatcctaaccccatagatcctctcaatggtgacgctgcagccatgtacctccaccgaccagaagaatacaagcagaaaattaaagagtacatccagaaatacgccacggaggaggcgctgaaagaacaggaagagggtaccggggacagctcatcggagagctctatgtctgacttttccgaagatgaggcccaggatatggagttgtagtagaaaaagcacctgcttttcagaaagactattatttcctaaccatgagaagcagactataatattcatatttaaacaaagcaattttttttattactaaacaaggtttttatgaataatagcattgatatatatatattatatatcaccctttagatcttgatttcttggtcatttctcaacctgaggtgcatagcatattcccacattccatttggtagcaatatgcggtctgaatgcatgcattcatgagtccatgtggccaagtcagcctgtgtgctactgaactgtcgaaggaaatagccgctctgataggtagatgtgagtaaaaagaacaggaaaaaattgcttcttttattggtttccaaagaaacaaaccaaaccaaccagctcttggatgtgaagataaaatagtgcttttttgaaatggagaggaaaaacttggggaggaagaggcctgctgtgggggcatcggagccagccatgtaagaatcagagctgctccttcctgtgaatcctaggtggccctatgtcttctgtggagttacagtataaagcagggagctaattaagagtattaaaacttaaaaccattttttgactctgattttaagtacatttttatatgtcagttgctgcccttcacactaccaggccctgcagccacagtgttctgttggagaaacttggggaagtgttttctgaaccagttctttttcttggggtagagcgtgaaatccagacctgtttttgaaaggacagcacaggaggagaaaagtgactgggacgatgcttcctctcatccaaaacacatgcagagtcacatcctcatcctagtgtttggcagtttgagaccgctaccctgaacttaagagctttaaatatgagggttgtgtttctgggggggttatttttttggtgtgtgtgtgtgtgtattgtgcttagaaaggttgcagatttcatcttcacctaccaagaggcggccgcctccttggacaagccgctcatggaccattagacttgagaagacgacccacgtggtgactgcaaagccctgggtacttgccttcatgttctggtttggttttccctttttctgctgctcttggcagcagcctggtcatcatctgcttgtgggagtgggaaatgggtattttagacccaacacaggttctaaatttaaaacaaataataattggaacaaataaaggttcttgtacccagagtgattctacatgggaaaaacaaaccagcttttttcagagagtgaccgaataggaagaagggattcagaaatatgatgtagtagaacatgccctgcaggaagaaaatgttttctctcctgcgtatgttaagaggaaatcagtttaaaatgcctgctaatcaaatgtcgactcagctaaccatatgtccaggttgctgcagagtttctttcaaatctgagtgttgcctgctgaactcggaggggagtttggagaaattttagacagcagctctgtgttctttttttgccgcagccaataagataatagcagaattagccaatcctaaaaccttctaaagacgatttttgagcatcccactgggattatttaatttttctttttgacgtgtgtttttagtttagaagtgctgtattccacaaggtttaagtcagtgaggttggaagataccctatcttttttattcaaaaagcacaatcaatcttttgtttgaaaatctatataaagtacaacttgcttttagcatgattattttcctaaataaaaagacaaagaatttacttactttatgttaattacgggcatgaagcaaaaggttttctttaaaaaaaaaaaaaagtgcagtgatgtagggctgtggttagttaaccgtactgagttatccatctagcatctgtggcttgctggaagggtagtattaactatttaacatgtaatggtgtacttcactcttacctagcacgctgtcttctcattgctttgggggagggagggtctctctgctggcactgtctaacttgcttacctgctgactttgcagtttgcttgtgctatgacatttattgtaggtgctatttagggtaggcttaaagtgctgggtggtgatttgagttcaaacaataaaaaattgtattttttcaatattgtataaacaatagtgttctaattaccttaaaaaaaaataatgaccagttaagaattgcttttgatcttgtcaaaaaactgaatagaccccagtttcgggaaggtgtgtgagcagtgccatgactctgccccttacctaatcccacatctctctaatgataagacattggctcgcctctgaccagagccccagcaccagagagcggaagatgcagaattgtcaaatgacctgctgggggaggttgtaggagtttagcagatttgagtgtggctgcagagagagagagtgtgtgtatgtgtgcacatgtgtgagagtgtgagcgagagtgtgtgtgtgtccatctaagtgtgtgtgatgaaggtgggataaggctcctctgttagtgctggaagctcctgtaattgccgcatggatcccactgtgccctcttgttctgtgcaagtctgtcctgtctgggcactaaccttggtcccatgcatgtttatgttctgggtggggctttgcctctccactgggaaactgacttttgctgggttgaacagagtcccttatgctttttgtcctctccctgcgcctgggagaggtgggagtaggagcccaaacacacaggtacagaaagatctggaagaaggcctggcagtgaatccaaggactctgggcccccaacaatagatggtagcgtaagtctggagcagcggtgtttcaccaccaaatgcctttccaggctgcccttccaacactcaggagagcatccagatccctgggcagaggctctacattcttggctttagaggtggtggcagcggcagcaggtcagagccacttctggcggtttccctcccctttttagtgcccatagtttttggatcctcccttgagttttaccagcacaagccattctttgcccctgttcacataactgagctcaagctcttgccaaacaccaacaagcaagatggttgcaacctggcaacattgaatccaccacccttgggctccctctggaagccccagcaccggggggcttttgggcacagggtcagtggtagccatcttagacactgacatttggctttgtcgtcaatttcatcaccctccttgaggttactgtgcagtttcaaccagcattttatcctagtgaggtcattatcaggagttgccatatcatctctccagtacctaacatttctcatccacttcaaaagctgttctgactgccagctggctgatctaagctcctgaggaatgtctcctctcaaaggaatttttccctccaaaggccccctgaagtcctagttggcattggcctggcacatgctttatgttaggcctcccgttgggatggctgagaatcatgaaagacagatcctccgctagcctctgtgggtcaagtttctggacaccaagtctctgggaactagtgtttgattttaaatggcatgtggcccttccttgtttcagtgacttagaaaagtaaaagccatttaaaaaagttagcaagattttttatcgacttcccaactgggcttccagccttgttgaatgaaatcatctatctctgattgggcgcaacgaactgcatttctttggacttctgaatccatgtttgtgctttctctggcccgtgaacacctcggcgattctgttagggatgggatgagtgggaggaagccctttgagaagggggagccggccctgtcatgcgcaggttttccactcatctgaggaagagccagggctctgaatttagcctaacactcatcttggctgtgggcttgggaagaaatggccattatttacagattgtatttggtacatattgtgtgatacttgaaaagataaaagggactgccagcccctaactgaaatctgaagctttttatcgcttatttttcctcgccctgtctcctcccttccacctttctccttgcattgtgatgatctagtaggcacgtctgtcaacaggacacatgcctcctctgactataacctcttaatagttgtgtataatgaaaactgtaaacttttttaaataaacgtgtatataccttggc

SEQ ID NO: 6976 - protein, 152 aa, Homo sapiens; identical to SEQ ID NO: 943

SEQ ID NO: 6977 - DNA, 4475 bp, Homo sapiens
agagcgaggctggggtagggaggccgactgagcaggagtcgtccgcttatagtggaggctgctaggagccggtcagagggtgagtggggagcaggcgagcgagccatgtacctccaccgaccagaagaatacaagcagaaaattaaagagtacatccagaaatacgccacggaggaggcgctgaaagaacaggaagagggtaccggggacagctcatcggagagctctatgtctgacttttccgaagatgaggcccaggatatggagttgtagtagaaaaagcacctgcttttcagaaagactattatttcctaaccatgagaagcagactataatattcatatttaaacaaagcaattttttttattactaaacaaggtttttatgaataatagcattgatatatatatattatatatcaccctttagatcttgatttcttggtcatttctcaacctgaggtgcatagcatattcccacattccatttggtagcaatatgcggtctgaatgcatgcattcatgagtccatgtggccaagtcagcctgtgtgctactgaactgtcgaaggaaatagccgctctgataggtagatgtgagtaaaaagaacaggaaaaaattgcttcttttattggtttccaaagaaacaaaccaaaccaaccagctcttggatgtgaagataaaatagtgcttttttgaaatggagaggaaaaacttggggaggaagaggcctgctgtgggggcatcggagccagccatgtaagaatcagagctgctccttcctgtgaatcctaggtggccctatgtcttctgtggagttacagtataaagcagggagctaattaagagtattaaaacttaaaaccattttttgactctgattttaagtacatttttatatgtcagttgctgcccttcacactaccaggccctgcagccacagtgttctgttggagaaacttggggaagtgttttctgaaccagttctttttcttggggtagagcgtgaaatccagacctgtttttgaaaggacagcacaggaggagaaaagtgactgggacgatgcttcctctcatccaaaacacatgcagagtcacatcctcatcctagtgtttggcagtttgagaccgctaccctgaacttaagagctttaaatatgagggttgtgtttctgggggggttatttttttggtgtgtgtgtgtgtgtattgtgcttagaaaggttgcagatttcatcttcacctaccaagaggcggccgcctccttggacaagccgctcatggaccattagacttgagaagacgacccacgtggtgactgcaaagccctgggtacttgccttcatgttctggtttggttttccctttttctgctgctcttggcagcagcctggtcatcatctgcttgtgggagtgggaaatgggtattttagacccaacacaggttctaaatttaaaacaaataataattggaacaaataaaggttcttgtacccagagtgattctacatgggaaaaacaaaccagcttttttcagagagtgaccgaataggaagaagggattcagaaatatgatgtagtagaacatgccctgcaggaagaaaatgttttctctcctgcgtatgttaagaggaaatcagtttaaaatgcctgctaatcaaatgtcgactcagctaaccatatgtccaggttgctgcagagtttctttcaaatctgagtgttgcctgctgaactcggaggggagtttggagaaattttagacagcagctctgtgttctttttttgccgcagccaataagataatagcagaattagccaatcctaaaaccttctaaagacgatttttgagcatcccactgggattatttaatttttctttttgacgtgtgtttttagtttagaagtgctgtattccacaaggtttaagtcagtgaggttggaagataccctatcttttttattcaaaaagcacaatcaatcttttgtttgaaaatctatataaagtacaacttgcttttagcatgattattttcctaaataaaaagacaaagaatttacttactttatgttaattacgggcatgaagcaaaaggttttctttaaaaaaaaaaaaaagtgcagtgatgtagggctgtggttagttaaccgtactgagttatccatctagcatctgtggcttgctggaagggtagtattaactatttaacatgtaatggtgtacttcactcttacctagcacgctgtcttctcattgctttgggggagggagggtctctctgctggcactgtctaacttgcttacctgctgactttgcagtttgcttgtgctatgacatttattgtaggtgctatttagggtaggcttaaagtgctgggtggtgatttgagttcaaacaataaaaaattgtattttttcaatattgtataaacaatagtgttctaattaccttaaaaaaaaataatgaccagttaagaattgcttttgatcttgtcaaaaaactgaatagaccccagtttcgggaaggtgtgtgagcagtgccatgactctgccccttacctaatcccacatctctctaatgataagacattggctcgcctctgaccagagccccagcaccagagagcggaagatgcagaattgtcaaatgacctgctgggggaggttgtaggagtttagcagatttgagtgtggctgcagagagagagagtgtgtgtatgtgtgcacatgtgtgagagtgtgagcgagagtgtgtgtgtgtccatctaagtgtgtgtgatgaaggtgggataaggctcctctgttagtgctggaagctcctgtaattgccgcatggatcccactgtgccctcttgttctgtgcaagtctgtcctgtctgggcactaaccttggtcccatgcatgtttatgttctgggtggggctttgcctctccactgggaaactgacttttgctgggttgaacagagtcccttatgctttttgtcctctccctgcgcctgggagaggtgggagtaggagcccaaacacacaggtacagaaagatctggaagaaggcctggcagtgaatccaaggactctgggcccccaacaatagatggtagcgtaagtctggagcagcggtgtttcaccaccaaatgcctttccaggctgcccttccaacactcaggagagcatccagatccctgggcagaggctctacattcttggctttagaggtggtggcagcggcagcaggtcagagccacttctggcggtttccctcccctttttagtgcccatagtttttggatcctcccttgagttttaccagcacaagccattctttgcccctgttcacataactgagctcaagctcttgccaaacaccaacaagcaagatggttgcaacctggcaacattgaatccaccacccttgggctccctctggaagccccagcaccggggggcttttgggcacagggtcagtggtagccatcttagacactgacatttggctttgtcgtcaatttcatcaccctccttgaggttactgtgcagtttcaaccagcattttatcctagtgaggtcattatcaggagttgccatatcatctctccagtacctaacatttctcatccacttcaaaagctgttctgactgccagctggctgatctaagctcctgaggaatgtctcctctcaaaggaatttttccctccaaaggccccctgaagtcctagttggcattggcctggcacatgctttatgttaggcctcccgttgggatggctgagaatcatgaaagacagatcctccgctagcctctgtgggtcaagtttctggacaccaagtctctgggaactagtgtttgattttaaatggcatgtggcccttccttgtttcagtgacttagaaaagtaaaagccatttaaaaaagttagcaagattttttatcgacttcccaactgggcttccagccttgttgaatgaaatcatctatctctgattgggcgcaacgaactgcatttctttggacttctgaatccatgtttgtgctttctctggcccgtgaacacctcggcgattctgttagggatgggatgagtgggaggaagccctttgagaagggggagccggccctgtcatgcgcaggttttccactcatctgaggaagagccagggctctgaatttagcctaacactcatcttggctgtgggcttgggaagaaatggccattatttacagattgtatttggtacatattgtgtgatacttgaaaagataaaagggactgccagcccctaactgaaatctgaagctttttatcgcttatttttcctcgccctgtctcctcccttccacctttctccttgcattgtgatgatctagtaggcacgtctgtcaacaggacacatgcctcctctgactataacctcttaatagttgtgtataatgaaaactgtaaacttttttaaataaacgtgtatataccttggc

SEQ ID NO: 6978 - protein, 55 aa, Homo sapiens; identical to SEQ ID NO: 6968

SEQ ID NO: 6979 - DNA, 1192 bp, Homo sapiens
ggctggggtagggaggccgactgagcaggagtcgtccgcttatagtggaggctgctaggagccggtcagagggtgagtggggagcaggcgagcgagccacagcaggcaggagggagcgtcgcgcggcgcagaggagcgccggggcagggccgcggcggaaccacagccggagaggggcagcccgagccgggcgccgcagggtccccacccccacccggccggacagtgcccggtgttcccccgtgcggggggcggcggcggcggctgacgggaccgccgggaccgcgggggtgttgccacctccaccgaggagccggcgcggccgcgggctcctcagagccggggccccgggcccgtgacagacgggccgaggaagggagagaggcggcggcgacaccatgtcatctcccagtccgggcaagaggcggatggacacggacgtggtcaagctcatcgagagtaaacatgaggttacgatcctgggaggacttaatgaatttgtagtgaagttttatggaccacaaggaacaccatatgaaggcggagtatggaaagttagagtggacctacctgataaataccctttcaaatctccatctataggattcatgaataaaattttccatcccaacattgatgaagcgtcaggaactgtgtgtctagatgtaattaatcaaacttggacagctctctatgatcttaccaatatatttgagtccttcctgcctcagttattggcctatcctaaccccatagatcctctcaatggtgacgctgcagccatgtacctccaccgaccagaagaatacaagcagaaaattaaagagtacatccagaaatacgccacggaggaggcgctgaaagaacaggaagagggtaccggggacagctcatcggagagctctatgtctgacttttccgaagatgaggcccaggatatggagttgtagtagaaaaagcacctgcttttcagaaagactattatttcctaaccatgagaagcagactataatattcatatttaaacaaagcaattttttttattactaaacaaggtttttatgaataatagcattgatatatatatattatatatcaccctttagatcttgatttcttggtcatttctcaacctgaggtgcatatataatgaaaactgtaaacttttttaaataaacgtgtatataccttg

SEQ ID NO: 6980 - protein, 183 aa, Homo sapiens; identical to SEQ ID NO: 941

SEQ ID NO: 6981 - DNA, 2737 bp, Homo sapiens
gggaggccgactgagcaggagtcgtccgcttatagtggaggctgctaggagccggtcagaggcatcgagagtaaacatgaggttacgatcctgggaggacttaatgaatttgtagtgaagttttatggaccacaaggaacaccatatgaaggcggagtatggaaagttagagtggacctacctgataaataccctttcaaatctccatctataggattcatgaataaaattttccatcccaacattgatgaagcgtcaggaactgtgtgtctagatgtaattaatcaaacttggacagctctctatgatcttaccaatatatttgagtccttcctgcctcagttattggcctatcctaaccccatagatcctctcaatggtgacgctgcagccatgtacctccaccgaccagaagaatacaagcagaaaattaaagagtacatccagaaatacgccacggaggaggcgctgaaagaacaggaagagggtaccggggacagctcatcggagagctctatgtctgacttttccgaagatgaggcccaggatatggagttgtagtagaaaaagcacctgcttttcagaaagactattatttcctaaccatgagaagcagactataatattcatatttaaacaaagcaattttttttattactaaacaaggtttttatgaataatagcattgatatatatatattatatatcaccctttagatcttgatttcttggtcatttctcaacctgaggtgcatagcatattcccacattccatttggtagcaatatgcggtctgaatgcatgcattcatgagtccatgtggccaagtcagcctgtgtgctactgaactgtcgaaggaaatagccgctctgataggtagatgtgagtaaaaagaacaggaaaaaattgcttcttttattggtttccaaagaaacaaaccaaaccaaccagctcttggatgtgaagataaaatagtgcttttttgaaatggagaggaaaaacttggggaggaagaggcctgctgtgggggcatcggagccagccatgtaagaatcagagctgctccttcctgtgaatcctaggtggccctatgtcttctgtggagttacagtataaagcagggagctaattaagagtattaaaacttaaaaccattttttgactctgattttaagtacatttttatatgtcagttgctgcccttcacactaccaggccctgcagccacagtgttctgttggagaaacttggggaagtgttttctgaaccagttctttttcttggggtagagcgtgaaatccagacctgtttttgaaaggacagcacaggaggagaaaagtgactgggacgatgcttcctctcatccaaaacacatgcagagtcacatcctcatcctagtgtttggcagtttgagaccgctaccctgaacttaagagctttaaatatgagggttgtgtttctgggggggttatttttttggtgtgtgtgtgtgtgtattgtgcttagaaaggttgcagatttcatcttcacctaccaagaggcggccgcctccttggacaagccgctcatggaccattagacttgagaagacgacccacgtggtgactgcaaagccctgggtacttgccttcatgttctggtttggttttccctttttctgctgctcttggcagcagcctggtcatcatctgcttgtgggagtgggaaatgggtattttagacccaacacaggttctaaatttaaaacaaataataattggaacaaataaaggttcttgtacccagagtgattctacatgggaaaaacaaaccagcttttttcagagagtgaccgaataggaagaagggattcagaaatatgatgtagtagaacatgccctgcaggaagaaaatgttttctctcctgcgtatgttaagaggaaatcagtttaaaatgcctgctaatcaaatgtcgactcagctaaccatatgtccaggttgctgcagagtttctttcaaatctgagtgttgcctgctgaactcggaggggagtttggagaaattttagacagcagctctgtgttctttttttgccgcagccaataagataatagcagaattagccaatcctaaaaccttctaaagacgatttttgagcatcccactgggattatttaatttttctttttgacgtgtgtttttagtttagaagtgctgtattccacaaggtttaagtcagtgaggttggaagataccctatcttttttattcaaaaagcacaatcaatcttttgtttgaaaatctatataaagtacaacttgcttttagcatgattattttcctaaataaaaagacaaagaatttacttactttatgttaattacgggcatgaagcaaaaggttttctttaaaaaaaaaaaaaagtgcagtgatgtagggctgtggttagttaaccgtactgagttatccatctagcatctgtggcttgctggaagggtagtattaactatttaacatgtaatggtgtacttcactcttacctagcacgctgtcttctcattgctttgggggagggagggtctctctgctggcactgtctaacttgcttacctgctgactttgcagtttgcttgtgctatgacatttattgtaggtgctatttagggtaggcttaaagtgctgggtggtgatttgagttcaaacaataaaaaattgtattttttcaatattgtataaacaatagtgttctaattacctt

SEQ ID NO: 6982 - protein, 113 aa, Homo sapiens; identical to SEQ ID NO: 6960

SEQ ID NO: 6983 - DNA, 3126 bp, Homo sapiens
ggctggggtagggaggccgactgagcaggagtcgtccgcttatagtggaggctgctaggagccggtcagagggtgagtggggagcaggcgagcgagccacagcaggcaggagggagcgtcgcgcggcgcagaggagcgccggggcagggccgcggcggaaccacagccggagaggggcagcccgagccgggcgccgcagggtccccacccccacccggccggacagtgcccggtgttcccccgtgcggggggcggcggcggcggctgacgggaccgccgggaccgcgggggtgttgccacctccaccgaggagccggcgcggccgcgggctcctcagagccggggccccgggcccgtgacagacgggccgaggaagggagagaggcggcggcgacaccatgtcatctcccagtccgggcaagaggcggatggacacggacgtggtcaagctcatcgagagtaaacatgaggttacgatcctgggaggacttaatgaatttgtagtgaagttttatggaccacaaggaacaccatatgaaggcggagtatggaaagttagagtggacctacctgataaataccctttcaaatctccatctataggattcatgaataaaattttccatcccaacattgatgaagcgtcaggaactgtgtgtctagatgtaattaatcaaacttggacagctctctatgatcttaccaatatatttgagtccttcctgcctcagttattggcctatcctaaccccatagatcctctcaatggtgacgctgcagccatgtacctccaccgaccagaagaatacaagcagaaaattaaagagtacatccagaaatacgccacggaggaggcgctgaaagaacaggaagagggtaccggggacagctcatcggagagctctatgtctgacttttccgaagatgaggcccaggatatggagttgtagtagaaaaagcacctgcttttcagaaagactattatttcctaaccatgagaagcagactataatattcatatttaaacaaagcaattttttttattactaaacaaggtttttatgaataatagcattgatatatatatattatatatcaccctttagatcttgatttcttggtcatttctcaacctgaggtgcatagcatattcccacattccatttggtagcaatatgcggtctgaatgcatgcattcatgagtccatgtggccaagtcagcctgtgtgctactgaactgtcgaaggaaatagccgctctgataggtagatgtgagtaaaaagaacaggaaaaaattgcttcttttattggtttccaaagaaacaaaccaaaccaaccagctcttggatgtgaagataaaatagtgcttttttgaaatggagaggaaaaacttggggaggaagaggcctgctgtgggggcatcggagccagccatgtaagaatcagagctgctccttcctgtgaatcctaggtggccctatgtcttctgtggagttacagtataaagcagggagctaattaagagtattaaaacttaaaaccattttttgactctgattttaagtacatttttatatgtcagttgctgcccttcacactaccaggccctgcagccacagtgttctgttggagaaacttggggaagtgttttctgaaccagttctttttcttggggtagagcgtgaaatccagacctgtttttgaaaggacagcacaggaggagaaaagtgactgggacgatgcttcctctcatccaaaacacatgcagagtcacatcctcatcctagtgtttggcagtttgagaccgctaccctgaacttaagagctttaaatatgagggttgtgtttctgggggggttatttttttggtgtgtgtgtgtgtgtattgtgcttagaaaggttgcagatttcatcttcacctaccaagaggcggccgcctccttggacaagccgctcatggaccattagacttgagaagacgacccacgtggtgactgcaaagccctgggtacttgccttcatgttctggtttggttttccctttttctgctgctcttggcagcagcctggtcatcatctgcttgtgggagtgggaaatgggtattttagacccaacacaggttctaaatttaaaacaaataataattggaacaaataaaggttcttgtacccagagtgattctacatgggaaaaacaaaccagcttttttcagagagtgaccgaataggaagaagggattcagaaatatgatgtagtagaacatgccctgcaggaagaaaatgttttctctcctgcgtatgttaagaggaaatcagtttaaaatgcctgctaatcaaatgtcgactcagctaaccatatgtccaggttgctgcagagtttctttcaaatctgagtgttgcctgctgaactcggaggggagtttggagaaattttagacagcagctctgtgttctttttttgccgcagccaataagataatagcagaattagccaatcctaaaaccttctaaagacgatttttgagcatcccactgggattatttaatttttctttttgacgtgtgtttttagtttagaagtgctgtattccacaaggtttaagtcagtgaggttggaagataccctatcttttttattcaaaaagcacaatcaatcttttgtttgaaaatctatataaagtacaacttgcttttagcatgattattttcctaaataaaaagacaaagaatttacttactttatgttaattacgggcatgaagcaaaaggttttctttaaaaaaaaaaaaaagtgcagtgatgtagggctgtggttagttaaccgtactgagttatccatctagcatctgtggcttgctggaagggtagtattaactatttaacatgtaatggtgtacttcactcttacctagcacgctgtcttctcattgctttgggggagggagggtctctctgctggcactgtctaacttgcttacctgctgactttgcagtttgcttgtgctatgacatttattgtaggtgctatttagggtaggcttaaagtgctgggtggtgatttgagttcaaacaataaaaaattgtattttttcaatattgtataaacaatagtgttctaattacctt

SEQ ID NO: 6984 - protein, 183 aa, Homo sapiens; identical to SEQ ID NO: 941

SEQ ID NO: 6985 - DNA, 3066 bp, Homo sapiens
ggctggggtagggaggccgactgagcaggagtcgtccgcttatagtggaggctgctaggagccggtcagagggtgagtggggagcaggcgagcgagccacagcaggcaggagggagcgtcgcgcggcgcagaggagcgccggggcagggccgcggcggaaccacagccggagaggggcagcccgagccgggcgccgcagggtccccacccccacccggccggacagtgcccggtgttcccccgtgcggggggcggcggcggcggctgacgggaccgccgggaccgcgggggtgttgccacctccaccgaggagccggcgcggccgcgggctcctcagagccggggccccgggcccgtgacagacgggccgaggaagggagagaggcggcggcgacaccatgtcatctcccagtccgggcaagaggcggatggacacggacgtggtcaagctcatcgagagtaaacatgaggttacgatcctgggaggacttaatgaatttgtagtgaagttttatggaccacaaggaacaccatatgaaggcggagtatggaaagttagagtggacctacctgataaataccctttcaaatctccatctataggattcatgaataaaattttccatcccaacattgatgaagcgtcaggaactgtgtgtctagatgtaattaatcaaacttggacagctctctatgatcctctcaatggtgacgctgcagccatgtacctccaccgaccagaagaatacaagcagaaaattaaagagtacatccagaaatacgccacggaggaggcgctgaaagaacaggaagagggtaccggggacagctcatcggagagctctatgtctgacttttccgaagatgaggcccaggatatggagttgtagtagaaaaagcacctgcttttcagaaagactattatttcctaaccatgagaagcagactataatattcatatttaaacaaagcaattttttttattactaaacaaggtttttatgaataatagcattgatatatatatattatatatcaccctttagatcttgatttcttggtcatttctcaacctgaggtgcatagcatattcccacattccatttggtagcaatatgcggtctgaatgcatgcattcatgagtccatgtggccaagtcagcctgtgtgctactgaactgtcgaaggaaatagccgctctgataggtagatgtgagtaaaaagaacaggaaaaaattgcttcttttattggtttccaaagaaacaaaccaaaccaaccagctcttggatgtgaagataaaatagtgcttttttgaaatggagaggaaaaacttggggaggaagaggcctgctgtgggggcatcggagccagccatgtaagaatcagagctgctccttcctgtgaatcctaggtggccctatgtcttctgtggagttacagtataaagcagggagctaattaagagtattaaaacttaaaaccattttttgactctgattttaagtacatttttatatgtcagttgctgcccttcacactaccaggccctgcagccacagtgttctgttggagaaacttggggaagtgttttctgaaccagttctttttcttggggtagagcgtgaaatccagacctgtttttgaaaggacagcacaggaggagaaaagtgactgggacgatgcttcctctcatccaaaacacatgcagagtcacatcctcatcctagtgtttggcagtttgagaccgctaccctgaacttaagagctttaaatatgagggttgtgtttctgggggggttatttttttggtgtgtgtgtgtgtgtattgtgcttagaaaggttgcagatttcatcttcacctaccaagaggcggccgcctccttggacaagccgctcatggaccattagacttgagaagacgacccacgtggtgactgcaaagccctgggtacttgccttcatgttctggtttggttttccctttttctgctgctcttggcagcagcctggtcatcatctgcttgtgggagtgggaaatgggtattttagacccaacacaggttctaaatttaaaacaaataataattggaacaaataaaggttcttgtacccagagtgattctacatgggaaaaacaaaccagcttttttcagagagtgaccgaataggaagaagggattcagaaatatgatgtagtagaacatgccctgcaggaagaaaatgttttctctcctgcgtatgttaagaggaaatcagtttaaaatgcctgctaatcaaatgtcgactcagctaaccatatgtccaggttgctgcagagtttctttcaaatctgagtgttgcctgctgaactcggaggggagtttggagaaattttagacagcagctctgtgttctttttttgccgcagccaataagataatagcagaattagccaatcctaaaaccttctaaagacgatttttgagcatcccactgggattatttaatttttctttttgacgtgtgtttttagtttagaagtgctgtattccacaaggtttaagtcagtgaggttggaagataccctatcttttttattcaaaaagcacaatcaatcttttgtttgaaaatctatataaagtacaacttgcttttagcatgattattttcctaaataaaaagacaaagaatttacttactttatgttaattacgggcatgaagcaaaaggttttctttaaaaaaaaaaaaaagtgcagtgatgtagggctgtggttagttaaccgtactgagttatccatctagcatctgtggcttgctggaagggtagtattaactatttaacatgtaatggtgtacttcactcttacctagcacgctgtcttctcattgctttgggggagggagggtctctctgctggcactgtctaacttgcttacctgctgactttgcagtttgcttgtgctatgacatttattgtaggtgctatttagggtaggcttaaagtgctgggtggtgatttgagttcaaacaataaaaaattgtattttttcaatattgtataaacaatagtgttctaattacctt

SEQ ID NO: 6986 - protein, 163 aa, Homo sapiens; identical to SEQ ID NO: 6966

SEQ ID NO: 6987 - DNA, 3033 bp, Homo sapiens
ggctggggtagggaggccgactgagcaggagtcgtccgcttatagtggaggctgctaggagccggtcagagggtgagtggggagcaggcgagcgagccacagcaggcaggagggagcgtcgcgcggcgcagaggagcgccggggcagggccgcggcggaaccacagccggagaggggcagcccgagccgggcgccgcagggtccccacccccacccggccggacagtgcccggtgttcccccgtgcggggggcggcggcggcggctgacgggaccgccgggaccgcgggggtgttgccacctccaccgaggagccggcgcggccgcgggctcctcagagccggggccccgggcccgtgacagacgggccgaggaagggagagaggcggcggcgacaccatgtcatctcccagtccgggcaagaggcggatggacacggacgtggtcaagctcatcgagagtaaacatgaggttacgatcctgggaggacttaatgaatttgtagtgaagttttatggaccacaaggaacaccatatgaaggcggagtatggaaagttagagtggacctacctgataaataccctttcaaatctccatctatagatcttaccaatatatttgagtccttcctgcctcagttattggcctatcctaaccccatagatcctctcaatggtgacgctgcagccatgtacctccaccgaccagaagaatacaagcagaaaattaaagagtacatccagaaatacgccacggaggaggcgctgaaagaacaggaagagggtaccggggacagctcatcggagagctctatgtctgacttttccgaagatgaggcccaggatatggagttgtagtagaaaaagcacctgcttttcagaaagactattatttcctaaccatgagaagcagactataatattcatatttaaacaaagcaattttttttattactaaacaaggtttttatgaataatagcattgatatatatatattatatatcaccctttagatcttgatttcttggtcatttctcaacctgaggtgcatagcatattcccacattccatttggtagcaatatgcggtctgaatgcatgcattcatgagtccatgtggccaagtcagcctgtgtgctactgaactgtcgaaggaaatagccgctctgataggtagatgtgagtaaaaagaacaggaaaaaattgcttcttttattggtttccaaagaaacaaaccaaaccaaccagctcttggatgtgaagataaaatagtgcttttttgaaatggagaggaaaaacttggggaggaagaggcctgctgtgggggcatcggagccagccatgtaagaatcagagctgctccttcctgtgaatcctaggtggccctatgtcttctgtggagttacagtataaagcagggagctaattaagagtattaaaacttaaaaccattttttgactctgattttaagtacatttttatatgtcagttgctgcccttcacactaccaggccctgcagccacagtgttctgttggagaaacttggggaagtgttttctgaaccagttctttttcttggggtagagcgtgaaatccagacctgtttttgaaaggacagcacaggaggagaaaagtgactgggacgatgcttcctctcatccaaaacacatgcagagtcacatcctcatcctagtgtttggcagtttgagaccgctaccctgaacttaagagctttaaatatgagggttgtgtttctgggggggttatttttttggtgtgtgtgtgtgtgtattgtgcttagaaaggttgcagatttcatcttcacctaccaagaggcggccgcctccttggacaagccgctcatggaccattagacttgagaagacgacccacgtggtgactgcaaagccctgggtacttgccttcatgttctggtttggttttccctttttctgctgctcttggcagcagcctggtcatcatctgcttgtgggagtgggaaatgggtattttagacccaacacaggttctaaatttaaaacaaataataattggaacaaataaaggttcttgtacccagagtgattctacatgggaaaaacaaaccagcttttttcagagagtgaccgaataggaagaagggattcagaaatatgatgtagtagaacatgccctgcaggaagaaaatgttttctctcctgcgtatgttaagaggaaatcagtttaaaatgcctgctaatcaaatgtcgactcagctaaccatatgtccaggttgctgcagagtttctttcaaatctgagtgttgcctgctgaactcggaggggagtttggagaaattttagacagcagctctgtgttctttttttgccgcagccaataagataatagcagaattagccaatcctaaaaccttctaaagacgatttttgagcatcccactgggattatttaatttttctttttgacgtgtgtttttagtttagaagtgctgtattccacaaggtttaagtcagtgaggttggaagataccctatcttttttattcaaaaagcacaatcaatcttttgtttgaaaatctatataaagtacaacttgcttttagcatgattattttcctaaataaaaagacaaagaatttacttactttatgttaattacgggcatgaagcaaaaggttttctttaaaaaaaaaaaaaagtgcagtgatgtagggctgtggttagttaaccgtactgagttatccatctagcatctgtggcttgctggaagggtagtattaactatttaacatgtaatggtgtacttcactcttacctagcacgctgtcttctcattgctttgggggagggagggtctctctgctggcactgtctaacttgcttacctgctgactttgcagtttgcttgtgctatgacatttattgtaggtgctatttagggtaggcttaaagtgctgggtggtgatttgagttcaaacaataaaaaattgtattttttcaatattgtataaacaatagtgttctaattacctt

SEQ ID NO: 6988 - protein, 152 aa, Homo sapiens; identical to SEQ ID NO: 943

SEQ ID NO: 6989 - DNA, 2449 bp, Homo sapiens
agagcgaggctggggtagggaggccgactgagcaggagtcgtccgcttatagtggaggctgctaggagccggtcagagggtgagtggggagcaggcgagcgagccatgtacctccaccgaccagaagaatacaagcagaaaattaaagagtacatccagaaatacgccacggaggaggcgctgaaagaacaggaagagggtaccggggacagctcatcggagagctctatgtctgacttttccgaagatgaggcccaggatatggagttgtagtagaaaaagcacctgcttttcagaaagactattatttcctaaccatgagaagcagactataatattcatatttaaacaaagcaattttttttattactaaacaaggtttttatgaataatagcattgatatatatatattatatatcaccctttagatcttgatttcttggtcatttctcaacctgaggtgcatagcatattcccacattccatttggtagcaatatgcggtctgaatgcatgcattcatgagtccatgtggccaagtcagcctgtgtgctactgaactgtcgaaggaaatagccgctctgataggtagatgtgagtaaaaagaacaggaaaaaattgcttcttttattggtttccaaagaaacaaaccaaaccaaccagctcttggatgtgaagataaaatagtgcttttttgaaatggagaggaaaaacttggggaggaagaggcctgctgtgggggcatcggagccagccatgtaagaatcagagctgctccttcctgtgaatcctaggtggccctatgtcttctgtggagttacagtataaagcagggagctaattaagagtattaaaacttaaaaccattttttgactctgattttaagtacatttttatatgtcagttgctgcccttcacactaccaggccctgcagccacagtgttctgttggagaaacttggggaagtgttttctgaaccagttctttttcttggggtagagcgtgaaatccagacctgtttttgaaaggacagcacaggaggagaaaagtgactgggacgatgcttcctctcatccaaaacacatgcagagtcacatcctcatcctagtgtttggcagtttgagaccgctaccctgaacttaagagctttaaatatgagggttgtgtttctgggggggttatttttttggtgtgtgtgtgtgtgtattgtgcttagaaaggttgcagatttcatcttcacctaccaagaggcggccgcctccttggacaagccgctcatggaccattagacttgagaagacgacccacgtggtgactgcaaagccctgggtacttgccttcatgttctggtttggttttccctttttctgctgctcttggcagcagcctggtcatcatctgcttgtgggagtgggaaatgggtattttagacccaacacaggttctaaatttaaaacaaataataattggaacaaataaaggttcttgtacccagagtgattctacatgggaaaaacaaaccagcttttttcagagagtgaccgaataggaagaagggattcagaaatatgatgtagtagaacatgccctgcaggaagaaaatgttttctctcctgcgtatgttaagaggaaatcagtttaaaatgcctgctaatcaaatgtcgactcagctaaccatatgtccaggttgctgcagagtttctttcaaatctgagtgttgcctgctgaactcggaggggagtttggagaaattttagacagcagctctgtgttctttttttgccgcagccaataagataatagcagaattagccaatcctaaaaccttctaaagacgatttttgagcatcccactgggattatttaatttttctttttgacgtgtgtttttagtttagaagtgctgtattccacaaggtttaagtcagtgaggttggaagataccctatcttttttattcaaaaagcacaatcaatcttttgtttgaaaatctatataaagtacaacttgcttttagcatgattattttcctaaataaaaagacaaagaatttacttactttatgttaattacgggcatgaagcaaaaggttttctttaaaaaaaaaaaaaagtgcagtgatgtagggctgtggttagttaaccgtactgagttatccatctagcatctgtggcttgctggaagggtagtattaactatttaacatgtaatggtgtacttcactcttacctagcacgctgtcttctcattgctttgggggagggagggtctctctgctggcactgtctaacttgcttacctgctgactttgcagtttgcttgtgctatgacatttattgtaggtgctatttagggtaggcttaaagtgctgggtggtgatttgagttcaaacaataaaaaattgtattttttcaatattgtataaacaatagtgttctaattacctt

SEQ ID NO: 6990 - protein, 55 aa, Homo sapiens; identical to SEQ ID NO: 6968

SEQ ID NO: 6991 - DNA, 2343 bp, Homo sapiens
gggaggccgactgagcaggagtcgtccgcttatagtggaggctgctaggagccggtcagaggcatcgagagtaaacatgaggttacgatcctgggaggacttaatgaatttgtagtgaagttttatggaccacaaggaacaccatatgaaggcggagtatggaaagttagagtggacctacctgataaataccctttcaaatctccatctataggattcatgaataaaattttccatcccaacattgatgaagcgtcaggaactgtgtgtctagatgtaattaatcaaacttggacagctctctatgatcttaccaatatatttgagtccttcctgcctcagttattggcctatcctaaccccatagatcctctcaatggtgacgctgcagccatgtacctccaccgaccagaagaatacaagcagaaaattaaagagtacatccagaaatacgccacggaggaggcgctgaaagaacaggaagagggtaccggggacagctcatcggagagctctatgtctgacttttccgaagatgaggcccaggatatggagttgtagtagaaaaagcacctgcttttcagaaagactattatttcctaaccatgagaagcagactataatattcatatttaaacaaagcaattttttttattactaaacaaggtttttatgaataatagcattgatatatatatattatatatcaccctttagatcttgatttcttggtcatttctcaacctgaggtgcatagcatattcccacattccatttggtagcaatatgcggtctgaatgcatgcattcatgagtccatgtggccaagtcagcctgtgtgctactgaactgtcgaaggaaatagccgctctgataggtagatgtgagtaaaaagaacaggaaaaaattgcttcttttattggtttccaaagaaacaaaccaaaccaaccagctcttggatgtgaagataaaatagtgcttttttgaaatggagaggaaaaacttggggaggaagaggcctgctgtgggggcatcggagccagccatgtaagaatcagagctgctccttcctgtgaatcctaggtggccctatgtcttctgtggagttacagtataaagcagggagctaattaagagtattaaaacttaaaaccattttttgactctgattttaagtacatttttatatgtcagttgctgcccttcacactaccaggccctgcagccacagtgttctgttggagaaacttggggaagtgttttctgaaccagttctttttcttggggtagagcgtgaaatccagacctgtttttgaaaggacagcacaggaggagaaaagtgactgggacgatgcttcctctcatccaaaacacatgcagagtcacatcctcatcctagtgtttggcagtttgagaccgctaccctgaacttaagagctttaaatatgagggttgtgtttctgggggggttatttttttggtgtgtgtgtgtgtgtattgtgcttagaaaggttgcagatttcatcttcacctaccaagaggcggccgcctccttggacaagccgctcatggaccattagacttgagaagacgacccacgtggtgactgcaaagccctgggtacttgccttcatgttctggtttggttttccctttttctgctgctcttggcagcagcctggtcatcatctgcttgtgggagtgggaaatgggtattttagacccaacacaggttctaaatttaaaacaaataataattggaacaaataaaggttcttgtacccagagtgattctacatgggaaaaacaaaccagcttttttcagagagtgaccgaataggaagaagggattcagaaatatgatgtagtagaacatgccctgcaggaagaaaatgttttctctcctgcgtatgttaagaggaaatcagtttaaaatgcctgctaatcaaatgtcgactcagctaaccatatgtccaggttgctgcagagtttctttcaaatctgagtgttgcctgctgaactcggaggggagtttggagaaattttagacagcagctctgtgttctttttttgccgcagccaataagataatagcagaattagccaatcctaaaaccttctaaagacgatttttgagcatcccactgggattatttaatttttctttttgacgtgtgtttttagtttagaagtgctgtattccacaaggtttaagtcagtgaggttggaagataccctatcttttttattcaaaaagcacaatcaatcttttgtttgaaaatctatataaagtacaacttgcttttagcatgattattttcctaaataaaaagacaaagaattt

SEQ ID NO: 6992 - protein, 113 aa, Homo sapiens; identical to SEQ ID NO: 6960

SEQ ID NO: 6993 - DNA, 2639 bp, Homo sapiens
ggctggggtagggaggccgactgagcaggagtcgtccgcttatagtggaggctgctaggagccggtcagagggtgagtggggagcaggcgagcgagccacagcaggcaggagggagcgtcgcgcggcgcagaggagcgccggggcagggccgcggcggaaccacagccggagaggggcagcccgagccgggcgccgcagggtccccacccccacccggccggacagtgcccggtgttcccccgtgcggggggcggcggcggcggctgacgggaccgccgggaccgcgggggtgttgccacctccaccgaggagccggcgcggccgcgggctcctcagagccggggccccgggcccgtgacagacgggccgaggaagggagagaggcggcggcgacaccatgtcatctcccagtccgggcaagaggcggatggacacggacgtggtcaagctcatcgagagtaaacatgaggttacgatcctgggaggacttaatgaatttgtagtgaagttttatggaccacaaggaacaccatatgaaggcggagtatggaaagttagagtggacctacctgataaataccctttcaaatctccatctatagatcttaccaatatatttgagtccttcctgcctcagttattggcctatcctaaccccatagatcctctcaatggtgacgctgcagccatgtacctccaccgaccagaagaatacaagcagaaaattaaagagtacatccagaaatacgccacggaggaggcgctgaaagaacaggaagagggtaccggggacagctcatcggagagctctatgtctgacttttccgaagatgaggcccaggatatggagttgtagtagaaaaagcacctgcttttcagaaagactattatttcctaaccatgagaagcagactataatattcatatttaaacaaagcaattttttttattactaaacaaggtttttatgaataatagcattgatatatatatattatatatcaccctttagatcttgatttcttggtcatttctcaacctgaggtgcatagcatattcccacattccatttggtagcaatatgcggtctgaatgcatgcattcatgagtccatgtggccaagtcagcctgtgtgctactgaactgtcgaaggaaatagccgctctgataggtagatgtgagtaaaaagaacaggaaaaaattgcttcttttattggtttccaaagaaacaaaccaaaccaaccagctcttggatgtgaagataaaatagtgcttttttgaaatggagaggaaaaacttggggaggaagaggcctgctgtgggggcatcggagccagccatgtaagaatcagagctgctccttcctgtgaatcctaggtggccctatgtcttctgtggagttacagtataaagcagggagctaattaagagtattaaaacttaaaaccattttttgactctgattttaagtacatttttatatgtcagttgctgcccttcacactaccaggccctgcagccacagtgttctgttggagaaacttggggaagtgttttctgaaccagttctttttcttggggtagagcgtgaaatccagacctgtttttgaaaggacagcacaggaggagaaaagtgactgggacgatgcttcctctcatccaaaacacatgcagagtcacatcctcatcctagtgtttggcagtttgagaccgctaccctgaacttaagagctttaaatatgagggttgtgtttctgggggggttatttttttggtgtgtgtgtgtgtgtattgtgcttagaaaggttgcagatttcatcttcacctaccaagaggcggccgcctccttggacaagccgctcatggaccattagacttgagaagacgacccacgtggtgactgcaaagccctgggtacttgccttcatgttctggtttggttttccctttttctgctgctcttggcagcagcctggtcatcatctgcttgtgggagtgggaaatgggtattttagacccaacacaggttctaaatttaaaacaaataataattggaacaaataaaggttcttgtacccagagtgattctacatgggaaaaacaaaccagcttttttcagagagtgaccgaataggaagaagggattcagaaatatgatgtagtagaacatgccctgcaggaagaaaatgttttctctcctgcgtatgttaagaggaaatcagtttaaaatgcctgctaatcaaatgtcgactcagctaaccatatgtccaggttgctgcagagtttctttcaaatctgagtgttgcctgctgaactcggaggggagtttggagaaattttagacagcagctctgtgttctttttttgccgcagccaataagataatagcagaattagccaatcctaaaaccttctaaagacgatttttgagcatcccactgggattatttaatttttctttttgacgtgtgtttttagtttagaagtgctgtattccacaaggtttaagtcagtgaggttggaagataccctatcttttttattcaaaaagcacaatcaatcttttgtttgaaaatctatataaagtacaacttgcttttagcatgattattttcctaaataaaaagacaaagaattt

SEQ ID NO: 6994 - protein, 152 aa, Homo sapiens; identical to SEQ ID NO: 943

SEQ ID NO: 6995 - DNA, 2732 bp, Homo sapiens
ggctggggtagggaggccgactgagcaggagtcgtccgcttatagtggaggctgctaggagccggtcagagggtgagtggggagcaggcgagcgagccacagcaggcaggagggagcgtcgcgcggcgcagaggagcgccggggcagggccgcggcggaaccacagccggagaggggcagcccgagccgggcgccgcagggtccccacccccacccggccggacagtgcccggtgttcccccgtgcggggggcggcggcggcggctgacgggaccgccgggaccgcgggggtgttgccacctccaccgaggagccggcgcggccgcgggctcctcagagccggggccccgggcccgtgacagacgggccgaggaagggagagaggcggcggcgacaccatgtcatctcccagtccgggcaagaggcggatggacacggacgtggtcaagctcatcgagagtaaacatgaggttacgatcctgggaggacttaatgaatttgtagtgaagttttatggaccacaaggaacaccatatgaaggcggagtatggaaagttagagtggacctacctgataaataccctttcaaatctccatctataggattcatgaataaaattttccatcccaacattgatgaagcgtcaggaactgtgtgtctagatgtaattaatcaaacttggacagctctctatgatcttaccaatatatttgagtccttcctgcctcagttattggcctatcctaaccccatagatcctctcaatggtgacgctgcagccatgtacctccaccgaccagaagaatacaagcagaaaattaaagagtacatccagaaatacgccacggaggaggcgctgaaagaacaggaagagggtaccggggacagctcatcggagagctctatgtctgacttttccgaagatgaggcccaggatatggagttgtagtagaaaaagcacctgcttttcagaaagactattatttcctaaccatgagaagcagactataatattcatatttaaacaaagcaattttttttattactaaacaaggtttttatgaataatagcattgatatatatatattatatatcaccctttagatcttgatttcttggtcatttctcaacctgaggtgcatagcatattcccacattccatttggtagcaatatgcggtctgaatgcatgcattcatgagtccatgtggccaagtcagcctgtgtgctactgaactgtcgaaggaaatagccgctctgataggtagatgtgagtaaaaagaacaggaaaaaattgcttcttttattggtttccaaagaaacaaaccaaaccaaccagctcttggatgtgaagataaaatagtgcttttttgaaatggagaggaaaaacttggggaggaagaggcctgctgtgggggcatcggagccagccatgtaagaatcagagctgctccttcctgtgaatcctaggtggccctatgtcttctgtggagttacagtataaagcagggagctaattaagagtattaaaacttaaaaccattttttgactctgattttaagtacatttttatatgtcagttgctgcccttcacactaccaggccctgcagccacagtgttctgttggagaaacttggggaagtgttttctgaaccagttctttttcttggggtagagcgtgaaatccagacctgtttttgaaaggacagcacaggaggagaaaagtgactgggacgatgcttcctctcatccaaaacacatgcagagtcacatcctcatcctagtgtttggcagtttgagaccgctaccctgaacttaagagctttaaatatgagggttgtgtttctgggggggttatttttttggtgtgtgtgtgtgtgtattgtgcttagaaaggttgcagatttcatcttcacctaccaagaggcggccgcctccttggacaagccgctcatggaccattagacttgagaagacgacccacgtggtgactgcaaagccctgggtacttgccttcatgttctggtttggttttccctttttctgctgctcttggcagcagcctggtcatcatctgcttgtgggagtgggaaatgggtattttagacccaacacaggttctaaatttaaaacaaataataattggaacaaataaaggttcttgtacccagagtgattctacatgggaaaaacaaaccagcttttttcagagagtgaccgaataggaagaagggattcagaaatatgatgtagtagaacatgccctgcaggaagaaaatgttttctctcctgcgtatgttaagaggaaatcagtttaaaatgcctgctaatcaaatgtcgactcagctaaccatatgtccaggttgctgcagagtttctttcaaatctgagtgttgcctgctgaactcggaggggagtttggagaaattttagacagcagctctgtgttctttttttgccgcagccaataagataatagcagaattagccaatcctaaaaccttctaaagacgatttttgagcatcccactgggattatttaatttttctttttgacgtgtgtttttagtttagaagtgctgtattccacaaggtttaagtcagtgaggttggaagataccctatcttttttattcaaaaagcacaatcaatcttttgtttgaaaatctatataaagtacaacttgcttttagcatgattattttcctaaataaaaagacaaagaattt

SEQ ID NO: 6996 - protein, 183 aa, Homo sapiens; identical to SEQ ID NO: 941

SEQ ID NO: 6997 - DNA, 2672 bp, Homo sapiens
ggctggggtagggaggccgactgagcaggagtcgtccgcttatagtggaggctgctaggagccggtcagagggtgagtggggagcaggcgagcgagccacagcaggcaggagggagcgtcgcgcggcgcagaggagcgccggggcagggccgcggcggaaccacagccggagaggggcagcccgagccgggcgccgcagggtccccacccccacccggccggacagtgcccggtgttcccccgtgcggggggcggcggcggcggctgacgggaccgccgggaccgcgggggtgttgccacctccaccgaggagccggcgcggccgcgggctcctcagagccggggccccgggcccgtgacagacgggccgaggaagggagagaggcggcggcgacaccatgtcatctcccagtccgggcaagaggcggatggacacggacgtggtcaagctcatcgagagtaaacatgaggttacgatcctgggaggacttaatgaatttgtagtgaagttttatggaccacaaggaacaccatatgaaggcggagtatggaaagttagagtggacctacctgataaataccctttcaaatctccatctataggattcatgaataaaattttccatcccaacattgatgaagcgtcaggaactgtgtgtctagatgtaattaatcaaacttggacagctctctatgatcctctcaatggtgacgctgcagccatgtacctccaccgaccagaagaatacaagcagaaaattaaagagtacatccagaaatacgccacggaggaggcgctgaaagaacaggaagagggtaccggggacagctcatcggagagctctatgtctgacttttccgaagatgaggcccaggatatggagttgtagtagaaaaagcacctgcttttcagaaagactattatttcctaaccatgagaagcagactataatattcatatttaaacaaagcaattttttttattactaaacaaggtttttatgaataatagcattgatatatatatattatatatcaccctttagatcttgatttcttggtcatttctcaacctgaggtgcatagcatattcccacattccatttggtagcaatatgcggtctgaatgcatgcattcatgagtccatgtggccaagtcagcctgtgtgctactgaactgtcgaaggaaatagccgctctgataggtagatgtgagtaaaaagaacaggaaaaaattgcttcttttattggtttccaaagaaacaaaccaaaccaaccagctcttggatgtgaagataaaatagtgcttttttgaaatggagaggaaaaacttggggaggaagaggcctgctgtgggggcatcggagccagccatgtaagaatcagagctgctccttcctgtgaatcctaggtggccctatgtcttctgtggagttacagtataaagcagggagctaattaagagtattaaaacttaaaaccattttttgactctgattttaagtacatttttatatgtcagttgctgcccttcacactaccaggccctgcagccacagtgttctgttggagaaacttggggaagtgttttctgaaccagttctttttcttggggtagagcgtgaaatccagacctgtttttgaaaggacagcacaggaggagaaaagtgactgggacgatgcttcctctcatccaaaacacatgcagagtcacatcctcatcctagtgtttggcagtttgagaccgctaccctgaacttaagagctttaaatatgagggttgtgtttctgggggggttatttttttggtgtgtgtgtgtgtgtattgtgcttagaaaggttgcagatttcatcttcacctaccaagaggcggccgcctccttggacaagccgctcatggaccattagacttgagaagacgacccacgtggtgactgcaaagccctgggtacttgccttcatgttctggtttggttttccctttttctgctgctcttggcagcagcctggtcatcatctgcttgtgggagtgggaaatgggtattttagacccaacacaggttctaaatttaaaacaaataataattggaacaaataaaggttcttgtacccagagtgattctacatgggaaaaacaaaccagcttttttcagagagtgaccgaataggaagaagggattcagaaatatgatgtagtagaacatgccctgcaggaagaaaatgttttctctcctgcgtatgttaagaggaaatcagtttaaaatgcctgctaatcaaatgtcgactcagctaaccatatgtccaggttgctgcagagtttctttcaaatctgagtgttgcctgctgaactcggaggggagtttggagaaattttagacagcagctctgtgttctttttttgccgcagccaataagataatagcagaattagccaatcctaaaaccttctaaagacgatttttgagcatcccactgggattatttaatttttctttttgacgtgtgtttttagtttagaagtgctgtattccacaaggtttaagtcagtgaggttggaagataccctatcttttttattcaaaaagcacaatcaatcttttgtttgaaaatctatataaagtacaacttgcttttagcatgattattttcctaaataaaaagacaaagaattt

SEQ ID NO: 6998 - protein, 163 aa, Homo sapiens; identical to SEQ ID NO: 6966

SEQ ID NO: 6999 - DNA, 2055 bp, Homo sapiens
agagcgaggctggggtagggaggccgactgagcaggagtcgtccgcttatagtggaggctgctaggagccggtcagagggtgagtggggagcaggcgagcgagccatgtacctccaccgaccagaagaatacaagcagaaaattaaagagtacatccagaaatacgccacggaggaggcgctgaaagaacaggaagagggtaccggggacagctcatcggagagctctatgtctgacttttccgaagatgaggcccaggatatggagttgtagtagaaaaagcacctgcttttcagaaagactattatttcctaaccatgagaagcagactataatattcatatttaaacaaagcaattttttttattactaaacaaggtttttatgaataatagcattgatatatatatattatatatcaccctttagatcttgatttcttggtcatttctcaacctgaggtgcatagcatattcccacattccatttggtagcaatatgcggtctgaatgcatgcattcatgagtccatgtggccaagtcagcctgtgtgctactgaactgtcgaaggaaatagccgctctgataggtagatgtgagtaaaaagaacaggaaaaaattgcttcttttattggtttccaaagaaacaaaccaaaccaaccagctcttggatgtgaagataaaatagtgcttttttgaaatggagaggaaaaacttggggaggaagaggcctgctgtgggggcatcggagccagccatgtaagaatcagagctgctccttcctgtgaatcctaggtggccctatgtcttctgtggagttacagtataaagcagggagctaattaagagtattaaaacttaaaaccattttttgactctgattttaagtacatttttatatgtcagttgctgcccttcacactaccaggccctgcagccacagtgttctgttggagaaacttggggaagtgttttctgaaccagttctttttcttggggtagagcgtgaaatccagacctgtttttgaaaggacagcacaggaggagaaaagtgactgggacgatgcttcctctcatccaaaacacatgcagagtcacatcctcatcctagtgtttggcagtttgagaccgctaccctgaacttaagagctttaaatatgagggttgtgtttctgggggggttatttttttggtgtgtgtgtgtgtgtattgtgcttagaaaggttgcagatttcatcttcacctaccaagaggcggccgcctccttggacaagccgctcatggaccattagacttgagaagacgacccacgtggtgactgcaaagccctgggtacttgccttcatgttctggtttggttttccctttttctgctgctcttggcagcagcctggtcatcatctgcttgtgggagtgggaaatgggtattttagacccaacacaggttctaaatttaaaacaaataataattggaacaaataaaggttcttgtacccagagtgattctacatgggaaaaacaaaccagcttttttcagagagtgaccgaataggaagaagggattcagaaatatgatgtagtagaacatgccctgcaggaagaaaatgttttctctcctgcgtatgttaagaggaaatcagtttaaaatgcctgctaatcaaatgtcgactcagctaaccatatgtccaggttgctgcagagtttctttcaaatctgagtgttgcctgctgaactcggaggggagtttggagaaattttagacagcagctctgtgttctttttttgccgcagccaataagataatagcagaattagccaatcctaaaaccttctaaagacgatttttgagcatcccactgggattatttaatttttctttttgacgtgtgtttttagtttagaagtgctgtattccacaaggtttaagtcagtgaggttggaagataccctatcttttttattcaaaaagcacaatcaatcttttgtttgaaaatctatataaagtacaacttgcttttagcatgattattttcctaaataaaaagacaaagaattt

SEQ ID NO: 7000 - protein, 55 aa, Homo sapiens; identical to SEQ ID NO: 6968

SEQ ID NO: 7001 - DNA, 723 bp, Homo sapiens
gggaggccgactgagcaggagtcgtccgcttatagtggaggctgctaggagccggtcagaggcatcgagagtaaacatgaggttacgatcctgggaggacttaatgaatttgtagtgaagttttatggaccacaaggaacaccatatgaaggcggagtatggaaagttagagtggacctacctgataaataccctttcaaatctccatctataggattcatgaataaaattttccatcccaacattgatgaagcgtcaggaactgtgtgtctagatgtaattaatcaaacttggacagctctctatgatcttaccaatatatttgagtccttcctgcctcagttattggcctatcctaaccccatagatcctctcaatggtgacgctgcagccatgtacctccaccgaccagaagaatacaagcagaaaattaaagagtacatccagaaatacgccacggaggaggcgctgaaagaacaggaagagggtaccggggacagctcatcggagagctctatgtctgacttttccgaagatgaggcccaggatatggagttgtagtagaaaaagcacctgcttttcagaaagactattatttcctaaccatgagaagcagactataatattcatatttaaacaaagcaattttttttattactaaacaaggtttttatgaataatagcattgatatatatatattatatatcaccctttagatcttg

SEQ ID NO: 7002 - protein, 113 aa, Homo sapiens; identical to SEQ ID NO: 6960

SEQ ID NO: 7003 - DNA, 1052 bp, Homo sapiens
ggctggggtagggaggccgactgagcaggagtcgtccgcttatagtggaggctgctaggagccggtcagagggtgagtggggagcaggcgagcgagccacagcaggcaggagggagcgtcgcgcggcgcagaggagcgccggggcagggccgcggcggaaccacagccggagaggggcagcccgagccgggcgccgcagggtccccacccccacccggccggacagtgcccggtgttcccccgtgcggggggcggcggcggcggctgacgggaccgccgggaccgcgggggtgttgccacctccaccgaggagccggcgcggccgcgggctcctcagagccggggccccgggcccgtgacagacgggccgaggaagggagagaggcggcggcgacaccatgtcatctcccagtccgggcaagaggcggatggacacggacgtggtcaagctcatcgagagtaaacatgaggttacgatcctgggaggacttaatgaatttgtagtgaagttttatggaccacaaggaacaccatatgaaggcggagtatggaaagttagagtggacctacctgataaataccctttcaaatctccatctataggattcatgaataaaattttccatcccaacattgatgaagcgtcaggaactgtgtgtctagatgtaattaatcaaacttggacagctctctatgatcctctcaatggtgacgctgcagccatgtacctccaccgaccagaagaatacaagcagaaaattaaagagtacatccagaaatacgccacggaggaggcgctgaaagaacaggaagagggtaccggggacagctcatcggagagctctatgtctgacttttccgaagatgaggcccaggatatggagttgtagtagaaaaagcacctgcttttcagaaagactattatttcctaaccatgagaagcagactataatattcatatttaaacaaagcaattttttttattactaaacaaggtttttatgaataatagcattgatatatatatattatatatcaccctttagatcttg

SEQ ID NO: 7004 - protein, 163 aa, Homo sapiens; identical to SEQ ID NO: 6966

SEQ ID NO: 7005 - DNA, 1019 bp, Homo sapiens
ggctggggtagggaggccgactgagcaggagtcgtccgcttatagtggaggctgctaggagccggtcagagggtgagtggggagcaggcgagcgagccacagcaggcaggagggagcgtcgcgcggcgcagaggagcgccggggcagggccgcggcggaaccacagccggagaggggcagcccgagccgggcgccgcagggtccccacccccacccggccggacagtgcccggtgttcccccgtgcggggggcggcggcggcggctgacgggaccgccgggaccgcgggggtgttgccacctccaccgaggagccggcgcggccgcgggctcctcagagccggggccccgggcccgtgacagacgggccgaggaagggagagaggcggcggcgacaccatgtcatctcccagtccgggcaagaggcggatggacacggacgtggtcaagctcatcgagagtaaacatgaggttacgatcctgggaggacttaatgaatttgtagtgaagttttatggaccacaaggaacaccatatgaaggcggagtatggaaagttagagtggacctacctgataaataccctttcaaatctccatctatagatcttaccaatatatttgagtccttcctgcctcagttattggcctatcctaaccccatagatcctctcaatggtgacgctgcagccatgtacctccaccgaccagaagaatacaagcagaaaattaaagagtacatccagaaatacgccacggaggaggcgctgaaagaacaggaagagggtaccggggacagctcatcggagagctctatgtctgacttttccgaagatgaggcccaggatatggagttgtagtagaaaaagcacctgcttttcagaaagactattatttcctaaccatgagaagcagactataatattcatatttaaacaaagcaattttttttattactaaacaaggtttttatgaataatagcattgatatatatatattatatatcaccctttagatcttg

SEQ ID NO: 7006 - protein, 152 aa, Homo sapiens; identical to SEQ ID NO: 943

SEQ ID NO: 7007 - DNA, 1112 bp, Homo sapiens
ggctggggtagggaggccgactgagcaggagtcgtccgcttatagtggaggctgctaggagccggtcagagggtgagtggggagcaggcgagcgagccacagcaggcaggagggagcgtcgcgcggcgcagaggagcgccggggcagggccgcggcggaaccacagccggagaggggcagcccgagccgggcgccgcagggtccccacccccacccggccggacagtgcccggtgttcccccgtgcggggggcggcggcggcggctgacgggaccgccgggaccgcgggggtgttgccacctccaccgaggagccggcgcggccgcgggctcctcagagccggggccccgggcccgtgacagacgggccgaggaagggagagaggcggcggcgacaccatgtcatctcccagtccgggcaagaggcggatggacacggacgtggtcaagctcatcgagagtaaacatgaggttacgatcctgggaggacttaatgaatttgtagtgaagttttatggaccacaaggaacaccatatgaaggcggagtatggaaagttagagtggacctacctgataaataccctttcaaatctccatctataggattcatgaataaaattttccatcccaacattgatgaagcgtcaggaactgtgtgtctagatgtaattaatcaaacttggacagctctctatgatcttaccaatatatttgagtccttcctgcctcagttattggcctatcctaaccccatagatcctctcaatggtgacgctgcagccatgtacctccaccgaccagaagaatacaagcagaaaattaaagagtacatccagaaatacgccacggaggaggcgctgaaagaacaggaagagggtaccggggacagctcatcggagagctctatgtctgacttttccgaagatgaggcccaggatatggagttgtagtagaaaaagcacctgcttttcagaaagactattatttcctaaccatgagaagcagactataatattcatatttaaacaaagcaattttttttattactaaacaaggtttttatgaataatagcattgatatatatatattatatatcaccctttagatcttg

SEQ ID NO: 7008 - protein, 183 aa, Homo sapiens; identical to SEQ ID NO: 941

SEQ ID NO: 7009 - DNA, 1386 bp, Homo sapiens
cattctctgagaatcagactaagcctcatgttcagaattgccagagttcaaacattttgctatccagcctgggcaacagagcgagactctgtctcaaaaaaaaaaaaaaaattatatatataaaaaaaattaaattcagggcttatagccactaaagatcttgcaacatccagaagttctcttctggatctattatattctccttcatatcatatctactttacttaaacactagcattccagataaaattaagatgtcattttatcttacatttaaatgattattggctactattaacagaattgtatcctaatttcagatagaactatagaatattttagaatcttttgtaaataactttaagagcagcctaggaaccctgtcatcatttatacttcttaaaaattagaaaactgtgttataaggtacaggtaacaagtttagaaaccaatttgtgaaatgctaccgatctatatctacatattttcagtgaggaggaccctctactaggagcaggctgtatgcattgcctctgggttgcaatttgatgataccaaagctgggaaggtaagagaaatggttgagaacaggattctggagggactgctgaatggtttgctgaatgttggtagaatggtcaggtacaaaaccagcaagctcgtgctgccatagaacttgatgtgaggccgagcgcagtggctcatcctgtaatcccagcattttggggaggccgaagtgggcacatcactggagacaaggggtttgagaccaccctgagcaatatggagaaaccccatctctaaaaaaaaaaatacaaaaattagctgggcatggtggtgtatacctttagttccagctactcgggaggctgaggtgggagaatcacttgagcccaggaggcagaggttgcagtgtgctgagatagcatcactgcactccagcctgggtgacagagtgaaaccggtctcaagaaattaaaaaaaaaaaaaaaaaaaagaatttgatgttagtggcatgaagcaagaacttgccaaacccatttgagtaaatggagacaaaatgaaaaagtcatgggcaatacaatagttaaaatactctgagctggctgggcgtggtggctcatgcctgtaatcccagcactttgggaggctgaggcgggtggatcacgaggtcaggagatcgagaccatcctggctaacacagtgaaatgctgtctctactaaaaaatacaaaaaattagctgggcatggtggcgggcgcctgtattcccagctacttgggaggctaaggcaggagaatggcgtgaacccgggaggcggagcttgcatgagccaagatcgcgccacggcactccagcctgggcaacagagcgagactcttgtctc

SEQ ID NO: 7010 - protein, 31 aa, Homo sapiens
MFRIARVQTFCYPAWATERDSVSKKKKKLYI

SEQ ID NO: 7011 - DNA, 536 bp, Homo sapiens
aaaaaaaagttctgaagacaatgttaaaatctgacaactgggaaatggatgctgttcattattttattccacatatttgttgtggtgcttaaaatattttgtcattgaaaacaatgtaataaacaaatgactagaaaaagtcaaaaaaaaaaaaaaaaaaaaaagcaatctttaaaatgtcctggtgttggccgggcacagtggctcactgtttaggtggtcaaagtgggaggatcacttgaggccaggagtttgagaacaacctggacaacctatcaagactctctgcctctaaaactaacattggtgtgcttatgtgttagatactgtgctaaccactactacacaatttcacttacttggtaacaatgaccctttgcagcaggtaccattattttctgctagactgtgtcactgtctctgatctttactcttgagggtccaattgtactcatcattctatattttctaagggcagaaaaatggactcatctatttagagacagggtctcactctgtcacctaggctggagtgc

SEQ ID NO: 7012 - protein, 49 aa, Homo sapiens
VVKVGGSLEARSLRTTWTTYQDSLPLKLTLVCLCVRYCANHYYTISLTW

SEQ ID NO: 7013 - DNA, 495 bp, Homo sapiens
aggtgacagatatgcccaatttgatcattacacattgaatacatctatagaagtatcactgtatgccataaatatgtcaattaaaactaaatatatatatacatatataaagaggagaaaatcaacaatatggttaaacagaaaaaaggctctgcatattaaaaaagatacacaaatatgagttttacactttgttttaaaagacttgaattctagcattgaaatctagttttcttgcttgaaataaagataactgctttatgaatagaatattccaacaatgagtgcactgtcaattgcccagagtcaattaagtgcctgataagagtaacatttaggggccaggcacggtggctcacgcctgtaatcccactacttggggggccgaggcaggagaatcacttgaatccaggaggcagaggttgcggtgagccaagatcgtgccattgcactccagcctgggcaacaagagtgaaactccatctcaaaaaaaaa

SEQ ID NO: 7014 - protein, 35 aa, Homo sapiens
MSIKTKYIYTYIKRRKSTIWLNRKKALHIKKDTQI

SEQ ID NO: 7015 - DNA, 1941 bp, Homo sapiens
ggaccaagatggcggcgccctgtgagggacaagcgtttgccgtaggggttgaaaagaattggggtgcagtagttcgctccccagaagggaccccccagaaaatccggcagctgatagatgaggggattgccccggaagagggaggcgtggacgcaaccacacccgcttgaggctctctatgaatctctgagagtcttagagaaggacacgtctgccacatcccagtcagttaatggatcaccccaagcggaacaaccttcattggaatctacaagcaaagaagccttctttagcagagtggaaacattttcttctttgaaatgggcaggtaagccctttgagctgtctccactcgtctgtgcaaaatatggctgggtcacagtggaatgtgatatgctcaagtgctctagctgtcaagcttttctctgtgccagtttacaaccagcttttgactttgacagatataagcaacgatgtgctgagctgaagaaagccttgtgtactgcccatgagaagttctgtttctggccagacagcccatccccagaccgatttgggatgttgcccctggatgagcctgctattcttgttagtgaattcctagatcgttttcaaagcctttgtcacttggacctccagcttccttccctaaggccggaggacttgaaaactatgtgcttgacagaagacaagatcagtcttctcctacacttgcttgaagatgaacttgatcaccgaactgatgagagaaaaactacaatcaaattaggctcagacatccaagtccacgtcactgcctgtattctctctgtgtgtggctgggcgtgtagttcctctttggaatccatgcagctctccctgataacatgttcgcaatgtatgaggaaggtggggctctggggcttccagcagattgaatcgtccatgactgacctggatgcatcctttggcctgaccagctccccaatcccaggccttgaggggcgaccagagcgcttacctctggtgcctgaatctcctcggaggatgatgacccggagccaggatgccactttctccccaggctcagagcaggctgaaaagagccctggtcccattgtctctcgaactcggagctgggactcttccagtcctgttgaccgtcctgagccagaggctgctagccccaccaccagaactcgcccagtgacccgaagcatgggaacaggagacacccctggcctggaggtaccatctagccctctgcggaaagccaagcgagctcgcctctgctcctccagcagttcggacacatcttcccgaagcttctttgatcccacctctcagcatagagactggtgcccttgggtgaatatcacacttggcaaagaaagcagggagaatggtggaactgaaccagatgccagcgccccagcagagccaggctggaaagcagtgctgaccatcctcttggcgcacaaacagtctagccagccagctgaaacggactccatgagtctctctgagaaatcaaggaaagtattccgaatatttcggcagtgggaatctctgtgctcatgctgaagatactccagcgccttcctggagatagctggaatgagagtgactttttgaaaaattaaggctgagttcctttcggtcagctgacactaagtttttcctgttctgggttaatcataaggagccccctgccatagcaaaggcagtgagtgtcaactatctgcatctggctgagagagacccgtttcctttcagggatgtggacagggtaagggcagcaagcatggttctgttaaaggagtgtgggattaacagactagaaggaagactaaggacctgaccacccatttcagcatcttcaatgtggagcagtgttctgaggactcttctatcctaggactatgacagtgtgtattaataaaatatttgctaagattctca

SEQ ID NO: 7016 - protein, 481 aa, Homo sapiens
MRGLPRKREAWTQPHPLEALYESLRVLEKDTSATSQSVNGSPQAEQPSLESTSKEAFFSRVETFSSLKWAGKPFELSPLVCAKYGWVTVECDMLKCSSCQAFLCASLQPAFDFDRYKQRCAELKKALCTAHEKFCFWPDSPSPDRFGMLPLDEPAILVSEFLDRFQSLCHLDLQLPSLRPEDLKTMCLTEDKISLLLHLLEDELDHRTDERKTTIKLGSDIQVHVTACILSVCGWACSSSLESMQLSLITCSQCMRKVGLWGFQQIESSMTDLDASFGLTSSPIPGLEGRPERLPLVPESPRRMMTRSQDATFSPGSEQAEKSPGPIVSRTRSWDSSSPVDRPEPEAASPTTRTRPVTRSMGTGDTPGLEVPSSPLRKAKRARLCSSSSSDTSSRSFFDPTSQHRDWCPWVNITLGKESRENGGTEPDASAPAEPGWKAVLTILLAHKQSSQPAETDSMSLSEKSRKVFRIFRQWESLCSC

SEQ ID NO: 7017 - DNA, 1972 bp, Homo sapiens
gcctcaagaggcggatattaacctcccaggacggaagttccggagccttcaaactctcggggaagcaactcggcagcggaccaagatggcggcgccctgtgagggacaagcgtttgccgtaggggttgaaaagaattggggtgcagtagttcgctccccagaagggaccccccagaaaatccggcagctgatagatgaggggattgccccggaagagggaggcgtggacgcgaaggacacgtctgccacatcccagtcagttaatggatcaccccaagcggaacaaccttcattggaatctacaagcaaagaagccttctttagcagagtggaaacattttcttctttgaaatgggcaggtaagccctttgagctgtctccactcgtctgtgcaaaatatggctgggtcacagtggaatgtgatatgctcaagtgctctagctgtcaagcttttctctgtgccagtttacaaccagcttttgactttgacagatataagcaacgatgtgctgagctgaagaaagccttgtgtactgcccatgagaagttctgtttctggccagacagcccatccccagaccgatttgggatgttgcccctggatgagcctgctattcttgttagtgaattcctagatcgttttcaaagcctttgtcacttggacctccagcttccttccctaaggccggaggacttgaaaactatgtgcttgacagaagacaagatcagtcttctcctacacttgcttgaagatgaacttgatcaccgaactgatgagagaaaaactacaatcaaattaggctcagacatccaagtccacgtcactgcctgtattctctctgtgtgtggctgggcgtgtagttcctctttggaatccatgcagctctccctgataacatgttcgcaatgtatgaggaaggtggggctctggggcttccagcagattgaatcgtccatgactgacctggatgcatcctttggcctgaccagctccccaatcccaggccttgaggggcgaccagagcgcttacctctggtgcctgaatctcctcggaggatgatgacccggagccaggatgccactttctccccaggctcagagcaggctgaaaagagccctggtcccattgtctctcgaactcggagctgggactcttccagtcctgttgaccgtcctgagccagaggctgctagccccaccaccagaactcgcccagtgacccgaagcatgggaacaggagacacccctggcctggaggtaccatctagccctctgcggaaagccaagcgagctcgcctctgctcctccagcagttcggacacatcttcccgaagcttctttgatcccacctctcagcatagagactggtgcccttgggtgaatatcacacttggcaaagaaagcagggagaatggtggaactgaaccagatgccagcgccccagcagagccaggctggaaagcagtgctgaccatcctcttggcgcacaaacagtctagccagccagctgaaacggactccatgagtctctctgagaaatcaaggaaagtattccgaatatttcggcagtgggaatctctgtgctcatgctgaagatactccagcgccttcctggagatagctggaatgagagtgactttttgaaaaattaaggctgagttcctttcggtcagctgacactaagtttttcctgttctgggttaatcataaggagccccctgccatagcaaaggcagtgagtgtcaactatctgcatctggctgagagagacccgtttcctttcagggatgtggacagggtaagggcagcaagcatggttctgttaaaggagtgtgggattaacagactagaaggaagactaaggacctgaccacccatttcagcatcttcaatgtggagcagtgttctgaggactcttctatcctaggactatgacagtgtgtattaataaaatatttgctaagattctca

SEQ ID NO: 7018 - protein, 502 aa, Homo sapiens; identical to SEQ ID NO: 945

SEQ ID NO: 7019 - DNA, 1759 bp, Homo sapiens
gcctcaagaggcggatattaacctcccaggacggaagttccggagccttcaaactctcggggaagcaactcggcagcggaccaagatggcggcgccctgtgagggacaagcgtttgccgtaggggttgaaaagaattggggtgcagtagttcgctccccagaagggaccccccagaaaatccggcagctgatagatgaggggattgccccggaagagggaggcgtggacgcgaaggacacgtctgccacatcccagtcagttaatggatcaccccaagcggaacaaccttcattggaatctacaagcaaagaagccttctttagcagagtggaaacattttcttctttgaaatgggcaggtaagccctttgagctgtctccactcgtctgtgcaaaatatggctgggtcacagtggaatgtgatatgctcaagtgctctagctgtcaagcttttctctgtgccagtttacaaccagcttttgactttgacagatataagcaacgatgtgctgagctgaagaaagccttgtgtactgcccatgagaagttctgtttctggccagacagcccatccccagaccgatttgggatgttgcccctggatgagcctgctattcttgttagtgaattcctagatcgttttcaaagcctttgtcacttggacctccagcttccttccctaaggccggaggacttgaaaactatgtgcttgacagaagacaagatcagtcttctcctacacttgcttgaagatgaacttgatcaccgaactgatgagagaaaaactacaatcaaattaggctcagacatccaagtccacgtcactgcctgtattctctctgtgtgtggctgggcgtgtagttcctctttggaatccatgcagctctccctgataacatgttcgcaatgtatgaggaaggtggggctctggggcttccagcagattgaatcgtccatgactgacctggatgcatcctttggcctgaccagctccccaatcccaggccttgaggggcgaccagagcgcttacctctggtgcctgaatctcctcggaggatgatgacccggagccaggatgccactttctccccaggctcagagcaggacacatcttcccgaagcttctttgatcccacctctcagcatagagactggtgcccttgggtgaatatcacacttggcaaagaaagcagggagaatggtggaactgaaccagatgccagcgccccagcagagccaggctggaaagcagtgctgaccatcctcttggcgcacaaacagtctagccagccagctgaaacggactccatgagtctctctgagaaatcaaggaaagtattccgaatatttcggcagtgggaatctctgtgctcatgctgaagatactccagcgccttcctggagatagctggaatgagagtgactttttgaaaaattaaggctgagttcctttcggtcagctgacactaagtttttcctgttctgggttaatcataaggagccccctgccatagcaaaggcagtgagtgtcaactatctgcatctggctgagagagacccgtttcctttcagggatgtggacagggtaagggcagcaagcatggttctgttaaaggagtgtgggattaacagactagaaggaagactaaggacctgaccacccatttcagcatcttcaatgtggagcagtgttctgaggactcttctatcctaggactatgacagtgtgtattaataaaatatttgctaagattctca

SEQ ID NO: 7020 - protein, 431 aa, Homo sapiens
MAAPCEGQAFAVGVEKNWGAVVRSPEGTPQKIRQLIDEGIAPEEGGVDAKDTSATSQSVNGSPQAEQPSLESTSKEAFFSRVETFSSLKWAGKPFELSPLVCAKYGWVTVECDMLKCSSCQAFLCASLQPAFDFDRYKQRCAELKKALCTAHEKFCFWPDSPSPDRFGMLPLDEPAILVSEFLDRFQSLCHLDLQLPSLRPEDLKTMCLTEDKISLLLHLLEDELDHRTDERKTTIKLGSDIQVHVTACILSVCGWACSSSLESMQLSLITCSQCMRKVGLWGFQQIESSMTDLDASFGLTSSPIPGLEGRPERLPLVPESPRRMMTRSQDATFSPGSEQDTSSRSFFDPTSQHRDWCPWVNITLGKESRENGGTEPDASAPAEPGWKAVLTILLAHKQSSQPAETDSMSLSEKSRKVFRIFRQWESLCSC

SEQ ID NO: 7021 - DNA, 806 bp, Homo sapiens
tgctgtttatgggaggtggagcagaggctgggcctataattagcaccccgcctgccttcagctttcatacgtcaagttatttgggtttttttgtttgtttgtttgttttttgagatggagtctcgttcttgttgcctaggctggagtccaatggcacgatctcagctcactgcaacctccgcctcctgggtcaagcgattctcctgccttagcttcccaactactcaggaggctgaggcaggagaatcgcttgaaccagggagtcaagaggttgcagtgagctgaaatggcaccacagcactccagcctggcgacagagcgagacctgtctcaaaaaaaaaaaaaaaaaaaaaaaaaacctgtgaaagcgtcatatgagaaactggaggtaactgtggatcatcttgctagacattctttgtactctcactgagaccctttctgcgtggaatacttgctcttcattgtgactctcaaaggcagacagaaccaagtgttctgattcaccaagagcttttgtctcctaatgaattactttgtctccctttaccaccatttctcagaatctcagagtacttcattggcatgatcagatggcactgcgattcttcctattattagcactgctggctaaaacataaaagcggtgaagaccaaggccagagcttaaactcataggggtcattcaactctgtttttattagttgtccttggtttatactgttaacctcagctaggcatcacattaagtataagtacttattcacaataaataatgaactagggccaattcagcatcatgaatg

SEQ ID NO: 7022 - protein, 56 aa, Homo sapiens
MESRSCCLGWSPMARSQLTATSASWVKRFSCLSFPTTQEAEAGESLEPGSQEVAVS

SEQ ID NO: 7023 - DNA, 293 bp, Homo sapiens
ccattctacctcctacatggatcttagatataacctttcaattatatgatcccttggtttggttctttaacattcaaaggacatttgtgtggataaaagaacactcagttatttcactttatgcttaaatttattaagcaaaactaataattttgaaggtaatttttttctaacatttgccaataattataagctaaattaaatttctttaaacattttattttattttattttattttttattttgagatggagtctcactctgtcacccaggtgcaccccagcctgggcga

SEQ ID NO: 7024 - protein, 43 aa, Homo sapiens
HSKDICVDKRTLSYFTLCLNLLSKTNNFEGNFFLTFANNYKLN

SEQ ID NO: 7025 - DNA, 827 bp, Homo sapiens
gcctcaagaggcggatattaacctcccaggacggaagttccggagccttcaaactctcggggaagcaactcggcagcggaccaagatggcggcgccctgtgagggacaagcgtttgccgtaggggttgaaaagaattggggtgcagtagttcgctccccagaagggaccccccagaaaatccggcagctgatagatgaggggattgccccggaagagggaggcgtggacgcgaaggacacgtctgccacatcccagtcagttaatggatcaccccaagcggaacaaccttcattggaatctacaagcaaagaagccttctttagcagagtggaaacattttcttctttgaaatgggcaggtaagccctttgagctgtctccactcgtctgtgcaaaatatggctgggtcacagtggaatgtgatatgctcaagtgctctagctgtcaagcttttctctgtgccagtttacaaccagcttttgactttgacagatataagcaacgatgtgctgagctgaagaaagccttgtgtactgcccatgagaagttctgtttctggccagacagcccatccccagatggagtttcactcttgttgcccaggctggagtacagtggcgcgatcttggctcactgcaaccttcgcctcccgcgttcaagcaattctcctgcctcagcctccagagttgctaggattacaggcgtgcgccaccacgcccagctaattttgtatttttagtagagatggggtttcaccatgttggtcaatctggtctcgaactcttgacctcagatgatccgcccgtctcggcctcccaaagtgctgg

SEQ ID NO: 7026 - protein, 217 aa, Homo sapiens
MAAPCEGQAFAVGVEKNWGAVVRSPEGTPQKIRQLIDEGIAPEEGGVDAKDTSATSQSVNGSPQAEQPSLESTSKEAFFSRVETFSSLKWAGKPFELSPLVCAKYGWVTVECDMLKCSSCQAFLCASLQPAFDFDRYKQRCAELKKALCTAHEKFCFWPDSPSPDGVSLLLPRLEYSGAILAHCNLRLPRSSNSPASASRVARITGVRHHAQLILYF

SEQ ID NO: 7027 - DNA, 753 bp, Homo sapiens
caaaatggccgagtttaactggtatgtgaacgttttaagatttgactcaggggcataaaggcagaaaaagagactgaggcaagttttagggcaggagtggaaggcaagaattgatgttgctgcagacctgtacggatttgctgctggaggtctcttttccactggagcctactttgaaatcagctgaggagccaccaaatcctatggccacctgggctgtgccctatgaacagctctctattgaaagagagctactaggttgactgatggcagttccaaggtggataatcaacatcctgtttggaagactactgtactacatcagatgatggaaaagttctgattgaggaaggttacatctactacaatactgcagatacagtataacattggtattgctggtatgattcctctcccttaggatttgtttcccatttcagggaacaaacaagagtgccccaaagaagttctgagaggactattatcagtgattgccacattgattcattggatcatataaccttaggggtgtgccttcactctttatctgaccttcttctggatacagcaaacacttgtggaccagctgcactgaagcattaaacaaggttggtaagttaccaagaagcacacaaaccctgtaacttgagctgtggaaagttagacatgcaatacaagaggactaacattagattaacatgcctattctgagctccttccactatgacactgtttgaattatgcttctctgaa

SEQ ID NO: 7028 - protein, 49 aa, Homo sapiens
MLLQTCTDLLLEVSFPLEPTLKSAEEPPNPMATWAVPYEQLSIERELLG

SEQ ID NO: 7029 - DNA, 227 bp, Homo sapiens
ctattgcttctacgctaaagacttgtgcagcatgttactgtactgaatacggcaggcaattgtaatacaatggctacagcttgcatcagaccagcaatgagcttgtgtgctgaaacaacaaatctgaaacacgattatgactgccatcaccttgcagttaaccaatagtaatggaattcctttctggatcacgaggtcaagagttcaagactagcctgaccaacatg

SEQ ID NO: 7030 - protein, 32 aa, Homo sapiens
MATACIRPAMSLCAETTNLKHDYDCHHLAVNQ

SEQ ID NO: 7031 - DNA, 491 bp, Homo sapiens
agagtctagggaggatgctggtgtcagtggtgagagggactgtgtgatgtgagttttacgtgtcaactagggcaggccgtgccacccagatatgtgatcaaacaccagtctagatgtcactgtgaaggtattttttaggtgattcacatttaaattacactaagagtaaagtagttatcctccaggatgtggttaggcctcatcacaaaggccttaagaaggaaaaaaaccagaggtcccctaaagaggaatacattctgccttcagaccgactttggacttcagcagcaacaccagctcttccctggtctccagcctgtctgcctgctgcgcagacttcagcctggccagccctcataatcatgtcctcagccttattccggaccatcagtgcccttcttcttccacctgccgctccaggagactggccccatcaaagtgggtcagtgcaggctctcatttcatctgcaccctactgataaaacaggtgg

SEQ ID NO: 7032 - protein, 38 aa, Homo sapiens
MSSALFRTISALLLPPAAPGDWPHQSGSVQALISSAPY

SEQ ID NO: 7033 - DNA, 297 bp, Homo sapiens
atgaatgtcaaacaccagttttcatatccagatacaaagagtcttggatggcacaaagtgtatttctccagagaacagcgccaccttcatcagcaacacaaccattcaggagtggttctctgccattttcagacacaaggtcttcctgcattggtacatgagggcatggacgagatggagttcactgaggccaagtgcaatatgaatgacctggtgtttgcctaccaacagtaccatgatgccacggctgaggggaagggagcgtttaaggagtgggatgaggaggaggtgacttag

SEQ ID NO: 7034 - protein, 98 aa, Homo sapiens
MNVKHQFSYPDTKSLGWHKVYFSREQRHLHQQHNHSGVVLCHFQTQGLPALVHEGMDEMEFTEAKCNMNDLVFAYQQYHDATAEGKGAFKEWDEEEVT

SEQ ID NO: 7035 - DNA, 1162 bp, Homo sapiens
gtgctttctttttattgctgcatttgtgttctacaagacagcctctttctccaagattaacatttcttatgattgttcctgacaatggattcacttccagaggccctgctaaggataaccaaaaaagggcatggagcaggctggttttggcagcgtgcacgcagtttcagagctttttaggtcttgggttttctgatgagtgatttcctgagcatgcctagggaatgacaggcatctccacaggcaggctgcatccaccttggctggggtgtcgtcattggctgcctattagaaaaacgacaggacaatgcataccaccgcctcccgactgtaaacataggggatatgtgttcacttagcatggacttctgggaggggccaaggaagggcggtctggagttttattgaatagagcagtgtgtattcggctgcctgcctgcccgcctgcttgctctctggctgtgctcctgcttaaagaaatcagtccttcctttccgacttagtcctcgggaagaagtttcagactacaaggtatcattggaacatttcaagatcatcaaatcaaattccacagggattggtgaccaaccagaaggctcagacatctgattgctgacctgtccagacatcatctggtctccctgaacctgaaatcacaccatggatgattttgagcgtcgcagagaacttagaaggcaaaagagggaggagatgcgactcgaagcagaaaggtaaggatctagggtgaaaaatacttgtattcccttattaacaaccttggtttcaggcctcaaagaccatccttttgagaggccaaatgtggtcatatcgcacaccaaactgttcgcaaaagtagttatggaaaatttttctgctaagactctaaattaagcatttaaaaaaggaaaacaaacaagaatcaagaaaaagagagatttgagaggaatcaattgataactgcatattgataattgcatttaatcaatacctttcacattggaatgttttaaatgacaaaagtaatgtgtgaatgaaggtttaaaaagcttatataataagaaatgacaaaaaaatgtcaagtattgaatattggaaccacttaggacatgagagtcttcaatctaaaaaatataaaggcaaaaagccctggatgaatcttgtg

SEQ ID NO: 7036 - protein, 44 aa, Homo sapiens
MTGISTGRLHPPWLGCRHWLPIRKTTGQCIPPPPDCKHRGYVFT

SEQ ID NO: 7037 - DNA, 1288 bp, Homo sapiens
gtgctttctttttattgctgcatttgtgttctacaagacagcctctttctccaagattaacatttcttatgattgttcctgacaatggattcacttccagaggccctgctaaggataaccaaaaaagggcatggagcaggctggttttggcagcgtgcacgcagtttcagagctttttaggtcttgggttttctgatgagtgatttcctgagcatgcctagggaatgacaggcatctccacaggcaggctgcatccaccttggctggggtgtcgtcattggctgcctattagaaaaacgacaggacaatgcataccaccgcctcccgactgtaaacataggggatatgtgttcacttagcatggacttctgggaggggccaaggaagggcggtctggagttttattgaatagagcagtgtgtattcggctgcctgcctgcccgcctgcttgctctctggctgtgctcctgcttaaagaaatcagtccttcctttccgacttagtcctcgggaagaagtttcagactacaaggtatcattggaacatttcaagatcatcaaatcaaattccacagggattggtgaccaaccagaaggctcagacatctgattgctgacctgtccagacatcatctggtctccctgaacctgaaatcacaccatggatgattttgagcgtcgcagagaacttagaaggcaaaagagggaggagatgcgactcgaagcagaaaggtaaggatctaggacgaggtctcactatgctgcccaggctgctctcaaactcctggactcaagagatcctcctgcctcgggatcccaaagtgtagagattacagacatgagtcaccacacccagtctgtttgctgatctgttttaaaggaatgtctacattcaccttttctaggagtcagttctccaaatcactctacctttcactttgtaagtaacggtggggaagaataaaataacaataaaataaaataaaaacaaaactatattcactccaaagagaagaaaataattcccttttgtcctttaaagagtgaaaatattcattacacaaatcagcaatgtccaccaaaggccactgctcatcagcacttagtgtagtttccagagaaaacatctaaaatgcataaaagttaagcagtttttgtatacctagcttttagctgatttcatgactgctgtatagcttctttgtagatagtttctgcagctgtttcatgaatgttatggtatgcctgcgaattgaattgaaaaagactgagttcacacggcttttgaa

SEQ ID NO: 7038 - protein, 53 aa, Homo sapiens
MILSVAENLEGKRGRRCDSKQKGKDLGRGLTMLPRLLSNSWTQEILLPRDPKV

SEQ ID NO: 7039 - DNA, 4655 bp, Homo sapiens
gtgctttctttttattgctgcatttgtgttctacaagacagcctctttctccaagattaacatttcttatgattgttcctgacaatggattcacttccagaggccctgctaaggataaccaaaaaagggcatggagcaggctggttttggcagcgtgcacgcagtttcagagctttttaggtcttgggttttctgatgagtgatttcctgagcatgcctagggaatgacaggcatctccacaggcaggctgcatccaccttggctggggtgtcgtcattggctgcctattagaaaaacgacaggacaatgcataccaccgcctcccgactgtaaacataggggatatgtgttcacttagcatggacttctgggaggggccaaggaagggcggtctggagttttattgaatagagcagtgtgtattcggctgcctgcctgcccgcctgcttgctctctggctgtgctcctgcttaaagaaatcagtccttcctttccgacttagtcctcgggaagaagtttcagactacaaggtatcattggaacatttcaagatcatcaaatcaaattccacagggattggtgaccaaccagaaggctcagacatctgattgctgacctgtccagacatcatctggtctccctgaacctgaaatcacaccatggatgattttgagcgtcgcagagaacttagaaggcaaaagagggaggagatgcgactcgaagcagaaagaatcgcctaccagaggaatgacgatgatgaagaggaggcagcccgggaacggcgccgccgagcccgacaggaacggctgcggcagaagcaggaggaagaatccttgggacaggtgaccgaccaggtggaggtgaatgcccagaacagtgtgcctgacgaggaggccaagacaaccaccacaaacactcaagtggaaggggatgatgaggccgcattcctggagcgcctggctcggcgtgaggaaagacgccaaaaacgccttcaggaggctctggagcggcagaaggagttcgacccaacaataacagatgcaagtctgtcgctcccaagcagaagaatgcaaaatgacacagcagaaaatgaaactaccgagaaggaagaaaaaagtgaaagtcgccaagaaagatacgagatagaggaaacagaaacagtcaccaagtcctaccagaagaatgattggagggatgctgaagaaaacaagaaagaagacaaggaaaaggaggaggaggaagaggagaagccaaagcgagggagcattggagaaaatcagatcaaagatgaaaagattaaaaaggacaaagaacccaaagaagaagttaagagcttcatggatcgaaagaagggatttacagaagttaagtcgcagaatggagaattcatgacccacaaacttaaacatactgagaatactttcagccgccctggagggagggccagcgtggacaccaaggaggctgagggcgccccccaggtggaagccggcaaaaggctggaggagcttcgtcgtcgtcgcggggagaccgagagcgaagagttcgagaagctcaaacagaagcagcaggaggcggctttggagctggaggaactcaagaaaaagagggaggagagaaggaaggtcctggaggaggaagagcagaggaggaagcaggaggaagccgatcgaaaactcagagaggaggaagagaagaggaggctaaaggaagagattgaaaggcgaagagcagaagctgctgagaaacgccagaagatgccagaagatggcttgtcagatgacaagaaaccattcaagtgtttcactcctaaaggttcatctctcaagatagaagagcgagcagaatttttgaataagtctgtgcagaaaagcagtggtgtcaaatcgacccatcaagcagcaatagtctccaagattgacagcagactggagcagtataccagtgcaattgagggaacaaaaagcgcaaaacctacaaagccggcagcctcggatcttcctgttcctgctgaaggtgtacgcaacatcaagagtatgtgggagaaagggaatgtgttttcatcccccactgcagcaggcacaccaaataaggtgagcatctgatttttgtctcttaagtgtagaggggcatatttttttgcatgtcgattttgatttaggaatcacactagtaaataataaaagcagtgaagaaggtgcaatttgtactttgttttgcaatgaccacaaaagcaagctcagagagaatgtgtttgtgaggttgcatgaggtactaagcccgggccatcttactccaaataaagtgcctgggctgaaatgtccacccttggagttggagtggggtgagttaccagggaaagaaaaccagataacatattctgtaaatatcaagtgttaaggtttatggttatgtgaaatcatacttaatgatattttgaatttgctttgaaaattccttcccaggtaaagtttacttcattctttaatattttggatgattgcccctttgtaggaaactgctggcttgaaggtaggggtttctagccgcatcaatgaatggctaactaaaaccccagatggaaacaagtcacctgctcccaaaccttctgtaagtacctttaggtttttctgagtttctttgatctcccagcttctaccagcagaagaaaacaagcagttggtctgtttacctaggaatggcagtgcccctgttctttgctttccctgatgaatagcaaacaggaaagtgttcagatttacaacagttctaagaagctgcatctcagttactcagagggtaaaatggaaccaaataatcacctctacaccctaactgagaggaggaatcagctagaatactgaggcagttcaaatttagatcctttactcgtctatttgtttagcttctattctataaattctggatagaaatttgaaaatgaaaggtcacatcattttggctacttctttgtcaagagcacccctaaacttattcccaaaagaatatgtatgttgcctattgggaacccatatgttccaatttgcctcatttttataacttggcacaaaaatgcagttattgggtagctgttgaaataattggtctaattgtgttgtcagcacctcctgaggaaagtcataaaactggaaactagaaaaactggttatgaatgatgtttttgagaatctaaaattttcttaatttattaagtgcagctatcttactaaaaagtacatttcttttcacctttttgttgaatgtatacgacaattgcttgcatttgtcattataataagaaaacgtatcaagctccccactgtatattgctgagctttccctgttaagtttgcttttatagctttgttggtgcccaagggagctgagagtccactgtcataatcctacattctagaggaagaagaaaaagtttccaatcctaggcctctgtgcatttaattgcatccattggctccatgccatttaattgcatttgttggctccatatataatctccaaagtcattaaattttgtcactttccaatttaaaaaggaagaaatggaaatgttcacaaatccttcttgggcacaactccttgaaccgtttaattaatctacaccccgagattctttgcataaaggctcacaggaggtatacactaatgtcaacccaatttacaattggaaaatctttatacattgaaaaaagcaacttttcctccccctctcaataggtacaagaatgcgggtttataaaaggacacagttgaggcaagagaccggacccaaaagttatgtgctctttagtgcctcaagttttccaagcatctctggtaacataaggagtagaaattattttcaaaaacaaaataatcactggttccagaccagtgattattaaccctttttgaattatgaacccctttaaaacctaatgaaatttaaggaccctctcccccaaaatatacatataaaaaaacaaggcagtctatggacctactgagtaactctcaagatagtaagtaaggagagaaagatctatgtttccctctttgataagtatgaaatatttggaggagatgctaatttttgcacgtttatgatatttgcaatctttcatttttgtagcagattatactcaaaaatttgatccagaacttggcccctattcttttatcagcactttaacttgtaaactgaaaagtttaccatcatctgtatgacatcctaatgaggttaaaaagataaaatgcagttatgattatgataggtataactgtatccaggtttccacagcaaaaacaaaacaaaacatacaccatgttctggggttattgacagcctcctaaaaaaaaaaaaaaaaaaaaaaaggcattgcagagaaattacaaaatcattgcctgctttacctactaattagtatgtgacttgctagatcaccccctagagggtgaagaaaaggaaagaagaacatggcagttagtatagattttagtgagatccttcttcccattagattttgtagactagtgtggcttcctgaatgagaaccagatggaagaaagttctatgaaatcaatgttgtaaatacaccagattgctactgggatgtcccttgctatttgtgggtagaatttataggatttcagtgta

SEQ ID NO: 7040 - protein, 481 aa, Homo sapiens
MDDFERRRELRRQKREEMRLEAERIAYQRNDDDEEEAARERRRRARQERLRQKQEEESLGQVTDQVEVNAQNSVPDEEAKTTTTNTQVEGDDEAAFLERLARREERRQKRLQEALERQKEFDPTITDASLSLPSRRMQNDTAENETTEKEEKSESRQERYEIEETETVTKSYQKNDWRDAEENKKEDKEKEEEEEEKPKRGSIGENQIKDEKIKKDKEPKEEVKSFMDRKKGFTEVKSQNGEFMTHKLKHTENTFSRPGGRASVDTKEAEGAPQVEAGKRLEELRRRRGETESEEFEKLKQKQQEAALELEELKKKREERRKVLEEEEQRRKQEEADRKLREEEEKRRLKEEIERRRAEAAEKRQKMPEDGLSDDKKPFKCFTPKGSSLKIEERAEFLNKSVQKSSGVKSTHQAAIVSKIDSRLEQYTSAIEGTKSAKPTKPAASDLPVPAEGVRNIKSMWEKGNVFSSPTAAGTPNKVSI

SEQ ID NO: 7041 - DNA, 5334 bp, Homo sapiens
gtgctttctttttattgctgcatttgtgttctacaagacagcctctttctccaagattaacatttcttatgattgttcctgacaatggattcacttccagaggccctgctaaggataaccaaaaaagggcatggagcaggctggttttggcagcgtgcacgcagtttcagagctttttaggtcttgggttttctgatgagtgatttcctgagcatgcctagggaatgacaggcatctccacaggcaggctgcatccaccttggctggggtgtcgtcattggctgcctattagaaaaacgacaggacaatgcataccaccgcctcccgactgtaaacataggggatatgtgttcacttagcatggacttctgggaggggccaaggaagggcggtctggagttttattgaatagagcagtgtgtattcggctgcctgcctgcccgcctgcttgctctctggctgtgctcctgcttaaagaaatcagtccttcctttccgacttagtcctcgggaagaagtttcagactacaaggtatcattggaacatttcaagatcatcaaatcaaattccacagggattggtgaccaaccagaaggctcagacatctgattgctgacctgtccagacatcatctggtctccctgaacctgaaatcacaccatggatgattttgagcgtcgcagagaacttagaaggcaaaagagggaggagatgcgactcgaagcagaaagaatcgcctaccagaggaatgacgatgatgaagaggaggcagcccgggaacggcgccgccgagcccgacaggaacggctgcggcagaagcaggaggaagaatccttgggacaggtgaccgaccaggtggaggtgaatgcccagaacagtgtgcctgacgaggaggccaagacaaccaccacaaacactcaagtggaaggggatgatgaggccgcattcctggagcgcctggctcggcgtgaggaaagacgccaaaaacgccttcaggaggctctggagcggcagaaggagttcgacccaacaataacagatgcaagtctgtcgctcccaagcagaagaatgcaaaatgacacagcagaaaatgaaactaccgagaaggaagaaaaaagtgaaagtcgccaagaaagatacgagatagaggaaacagaaacagtcaccaagtcctaccagaagaatgattggagggatgctgaagaaaacaagaaagaagacaaggaaaaggaggaggaggaagaggagaagccaaagcgagggagcattggagaaaatcaggtagaggtgatggtggaagagaaaacaactgaaagccaggaggaaacagtggtaatgtcattaaaaaatgggcagatcagttcagaagagcctaaacaagaggaggagagggaacaaggttcagatgagatttcccatcatgaaaagatggaagaggaagacaaggaaagagctgaggcagagagggcaaggttggaagcagaagaaagagaaagaattaaagccgagcaagacaaaaagatagcagatgaacgagcaagaattgaagcagaagaaaaagcagctgcccaagaaagagaaaggagagaggcagaagagagggaaaggatgagggaggaagagaaaagggcagcagaggagaggcagaggataaaggaggaagagaaaagggcagcagaggagaggcagaggataaaggaggaagagaaaagggcagcagaggagaggcagaggataaaagaggaagagaaaagggcagcagaggagaggcaaagggccagggcagaggaggaagagaaggctaaggtagaagagcagaaacgtaacaagcagctagaagagaaaaaacatgccatgcaagagacaaagataaaaggggaaaaggtagaacagaaaatagaagggaaatgggtaaatgaaaagaaagcacaagaagataaacttcagacagctgtcctaaagaaacagggagaagagaagggaactaaagtgcaagctaaaagagaaaagctccaagaagacaagcctaccttcaaaaaagaagagatcaaagatgaaaagattaaaaaggacaaagaacccaaagaagaagttaagagcttcatggatcgaaagaagggatttacagaagttaagtcgcagaatggagaattcatgacccacaaacttaaacatactgagaatactttcagccgccctggagggagggccagcgtggacaccaaggaggctgagggcgccccccaggtggaagccggcaaaaggctggaggagcttcgtcgtcgtcgcggggagaccgagagcgaagagttcgagaagctcaaacagaagcagcaggaggcggctttggagctggaggaactcaagaaaaagagggaggagagaaggaaggtcctggaggaggaagagcagaggaggaagcaggaggaagccgatcgaaaactcagagaggaggaagagaagaggaggctaaaggaagagattgaaaggcgaagagcagaagctgctgagaaacgccagaagatgccagaagatggcttgtcagatgacaagaaaccattcaagtgtttcactcctaaaggttcatctctcaagatagaagagcgagcagaatttttgaataagtctgtgcagaaaagcagtggtgtcaaatcgacccatcaagcagcaatagtctccaagattgacagcagactggagcagtataccagtgcaattgagggaacaaaaagcgcaaaacctacaaagccggcagcctcggatcttcctgttcctgctgaaggtgtacgcaacatcaagagtatgtgggagaaagggaatgtgttttcatcccccactgcagcaggcacaccaaataaggaaactgctggcttgaaggtaggggtttctagccgcatcaatgaatggctaactaaaaccccagatggaaacaagtcacctgctcccaaaccttctgacttgagaccaggagacgtatccagcaagcggaacctctgggaaaagcaatctgtggataaggtcacttcccccactaaggtttgagacagttccagaaagaacccaagctcaagacgcaggacgagctcagttgtagagggctaattcgctctgttttgtatttatgttgatttactaaattgggttcattatcttttatttttcaatatcccagtaaacccatgtatattatcactatatttaataatcacagtctagagatgttcatggtaaaagtactgcctttgcacaggagcctgtttctaaagaaacccatgctgtgaaatagagacttttctactgatcatcataactctgtatctgagcagtgataccaaccacatctgaagtcaacagaagatccaagtttaaaattgcctgcggaatgtgtgcagtatctagaaaaatgaaccgtagtttttgtttttttaaatacagaagtcatgttgtttctgcactttataataaagcatggaagaaattatcttagtaggcaattgtaacactttttgaaagtaacccatttcagatttgaaatactgcaataatggttgtctttaaaaaaaaaaaagaaatgtactgttaaggtattactttttttcatgctgatgattcatatctaaattacattattatgttagctgacagtggtactgattttttaggttggttgttttgtggatttctttagtagtgatagtagcctgaaccacattttagataactcaattatgtatgtatgtgcatacacatatacaaacacactaatggtagaatgcttttttatgtgctagactattatatttagtagtatgtcattgtaactagccaatatcacagcttttgaaaaattaaaaaatcacactatattaatattttatatttgccaacagaaacatggcagataggtatcaatatgttttcaatgcctgatgacctataagaagaaagtattgaaaagaagagagattagaactgttagaaggagttgaaattttctaaaagacatagtatttagtttataattaaatgcattcttgaagtccagtgtgaattttattaatgctatcatctcgaccaagctcaaagcctacttattagaaacaatgaagttcacaataggtcataaggtctcttccttttctaaaattgaaagacaagaaatttagtgccaatattgtacagacagaaattccatgtatgagtctcaacaaagactacctttggctaaatgtctagaagcagagaagtaaagtgagcaaaatccagtgttgaggagtcatgacagtactttgatctttatatactctgaagcatttcttcaaacttttctacttttatttgtcattgatacctgtagtaagttgacaatgtggtgaaatttcaaaattatatgtaacttctactagttttactttctcccccaagtcttttttaactcatgatttttacacacacaatccagaacttattatatagcctctaagtctttattcttcacagtagataatgaaagagtcctccagtgtcttggcaaaatgttctagtatagctggatacatacagtggagttctataaactcatacctcagtggacttaaccaaaattgtgttagtctcaattcctaccacactgagggagcctcccaaataactattttcttatctgcagtattcctccagaagagctaaccagggcagggctggcatgagaagtgacatctgcgttacaaagtctatcttcctcataagtctgtaaagagcaattgaatcttctagctttagcaaacctaagccaaaggaaggaaagccatgaagaatgcagaagtcaaaccctcatgacaaagtaggcacaagtctacaataagctaaatcagaatttacaaatacaagtgtcccaggtagcattgactcccgtcattggagtgaaatggatcaaagtttgaattaaggcctatggtaaggtaacattgctttgttgtacttttgaacaagagctcctcctgatcactattacatatttttctagaaaatctaaagttcagaagagaatgtatcactgctgacttttattccaatatttggatggagtaagttttagggtagaattttgttcagtttggatttaatcttttgaaaagtaaattccttgtttactggtttgactataattctctgttatctttacgaggtaaaactgcaagctgactagcatgttctgtgaatctgccattcctaaaaattttataaacacttgatacttttcactgataatggatcgctccaataaacatatattgtgaaaatgcatccacaataaatggaattccttcctgc

SEQ ID NO: 7042 - protein, 793 aa, Homo sapiens; identical to SEQ ID NO: 949

SEQ ID NO: 7043 - DNA, 4569 bp, Homo sapiens
gtgctttctttttattgctgcatttgtgttctacaagacagcctctttctccaagattaacatttcttatgattgttcctgacaatggattcacttccagaggccctgctaaggataaccaaaaaagggcatggagcaggctggttttggcagcgtgcacgcagtttcagagctttttaggtcttgggttttctgatgagtgatttcctgagcatgcctagggaatgacaggcatctccacaggcaggctgcatccaccttggctggggtgtcgtcattggctgcctattagaaaaacgacaggacaatgcataccaccgcctcccgactgtaaacataggggatatgtgttcacttagcatggacttctgggaggggccaaggaagggcggtctggagttttattgaatagagcagtgtgtattcggctgcctgcctgcccgcctgcttgctctctggctgtgctcctgcttaaagaaatcagtccttcctttccgacttagtcctcgggaagaagtttcagactacaaggtatcattggaacatttcaagatcatcaaatcaaattccacagggattggtgaccaaccagaaggctcagacatctgattgctgacctgtccagacatcatctggtctccctgaacctgaaatcacaccatggatgattttgagcgtcgcagagaacttagaaggcaaaagagggaggagatgcgactcgaagcagaaagaatcgcctaccagaggaatgacgatgatgaagaggaggcagcccgggaacggcgccgccgagcccgacaggaacggctgcggcagaagcaggaggaagaatccttgggacaggtgaccgaccaggtggaggtgaatgcccagaacagtgtgcctgacgaggaggccaagacaaccaccacaaacactcaagtggaaggggatgatgaggccgcattcctggagcgcctggctcggcgtgaggaaagacgccaaaaacgccttcaggaggctctggagcggcagaaggagttcgacccaacaataacagatgcaagtctgtcgctcccaagcagaagaatgcaaaatgacacagcagaaaatgaaactaccgagaaggaagaaaaaagtgaaagtcgccaagaaagatacgagatagaggaaacagaaacagtcaccaagtcctaccagaagaatgattggagggatgctgaagaaaacaagaaagaagacaaggaaaaggaggaggaggaagaggagaagccaaagcgagggagcattggagaaaatcagatcaaagatgaaaagattaaaaaggacaaagaacccaaagaagaagttaagagcttcatggatcgaaagaagggatttacagaagttaagtcgcagaatggagaattcatgacccacaaacttaaacatactgagaatactttcagccgccctggagggagggccagcgtggacaccaaggaggctgagggcgccccccaggtggaagccggcaaaaggctggaggagcttcgtcgtcgtcgcggggagaccgagagcgaagagttcgagaagctcaaacagaagcagcaggaggcggctttggagctggaggaactcaagaaaaagagggaggagagaaggaaggtcctggaggaggaagagcagaggaggaagcaggaggaagccgatcgaaaactcagagaggaggaagagaagaggaggctaaaggaagagattgaaaggcgaagagcagaagctgctgagaaacgccagaagatgccagaagatggcttgtcagatgacaagaaaccattcaagtgtttcactcctaaaggttcatctctcaagatagaagagcgagcagaatttttgaataagtctgtgcagaaaagcagtggtgtcaaatcgacccatcaagcagcaatagtctccaagattgacagcagactggagcagtataccagtgcaattgagggaacaaaaagcgcaaaacctacaaagccggcagcctcggatcttcctgttcctgctgaaggtgtacgcaacatcaagagtatgtgggagaaagggaatgtgttttcatcccccactgcagcaggcacaccaaataaggaaactgctggcttgaaggtaggggtttctagccgcatcaatgaatggctaactaaaaccccagatggaaacaagtcacctgctcccaaaccttctgacttgagaccaggagacgtatccagcaagcggaacctctgggaaaagcaatctgtggataaggtcacttcccccactaaggtttgagacagttccagaaagaacccaagctcaagacgcaggacgagctcagttgtagagggctaattcgctctgttttgtatttatgttgatttactaaattgggttcattatcttttatttttcaatatcccagtaaacccatgtatattatcactatatttaataatcacagtctagagatgttcatggtaaaagtactgcctttgcacaggagcctgtttctaaagaaacccatgctgtgaaatagagacttttctactgatcatcataactctgtatctgagcagtgataccaaccacatctgaagtcaacagaagatccaagtttaaaattgcctgcggaatgtgtgcagtatctagaaaaatgaaccgtagtttttgtttttttaaatacagaagtcatgttgtttctgcactttataataaagcatggaagaaattatcttagtaggcaattgtaacactttttgaaagtaacccatttcagatttgaaatactgcaataatggttgtctttaaaaaaaaaaaagaaatgtactgttaaggtattactttttttcatgctgatgattcatatctaaattacattattatgttagctgacagtggtactgattttttaggttggttgttttgtggatttctttagtagtgatagtagcctgaaccacattttagataactcaattatgtatgtatgtgcatacacatatacaaacacactaatggtagaatgcttttttatgtgctagactattatatttagtagtatgtcattgtaactagccaatatcacagcttttgaaaaattaaaaaatcacactatattaatattttatatttgccaacagaaacatggcagataggtatcaatatgttttcaatgcctgatgacctataagaagaaagtattgaaaagaagagagattagaactgttagaaggagttgaaattttctaaaagacatagtatttagtttataattaaatgcattcttgaagtccagtgtgaattttattaatgctatcatctcgaccaagctcaaagcctacttattagaaacaatgaagttcacaataggtcataaggtctcttccttttctaaaattgaaagacaagaaatttagtgccaatattgtacagacagaaattccatgtatgagtctcaacaaagactacctttggctaaatgtctagaagcagagaagtaaagtgagcaaaatccagtgttgaggagtcatgacagtactttgatctttatatactctgaagcatttcttcaaacttttctacttttatttgtcattgatacctgtagtaagttgacaatgtggtgaaatttcaaaattatatgtaacttctactagttttactttctcccccaagtcttttttaactcatgatttttacacacacaatccagaacttattatatagcctctaagtctttattcttcacagtagataatgaaagagtcctccagtgtcttggcaaaatgttctagtatagctggatacatacagtggagttctataaactcatacctcagtggacttaaccaaaattgtgttagtctcaattcctaccacactgagggagcctcccaaataactattttcttatctgcagtattcctccagaagagctaaccagggcagggctggcatgagaagtgacatctgcgttacaaagtctatcttcctcataagtctgtaaagagcaattgaatcttctagctttagcaaacctaagccaaaggaaggaaagccatgaagaatgcagaagtcaaaccctcatgacaaagtaggcacaagtctacaataagctaaatcagaatttacaaatacaagtgtcccaggtagcattgactcccgtcattggagtgaaatggatcaaagtttgaattaaggcctatggtaaggtaacattgctttgttgtacttttgaacaagagctcctcctgatcactattacatatttttctagaaaatctaaagttcagaagagaatgtatcactgctgacttttattccaatatttggatggagtaagttttagggtagaattttgttcagtttggatttaatcttttgaaaagtaaattccttgtttactggtttgactataattctctgttatctttacgaggtaaaactgcaagctgactagcatgttctgtgaatctgccattcctaaaaattttataaacacttgatacttttcactgataatggatcgctccaataaacatatattgtgaaaatgcatccacaataaatggaattccttcctgc

SEQ ID NO: 7044 - protein, 538 aa, Homo sapiens; identical to SEQ ID NO: 947

SEQ ID NO: 7045 - DNA, 5416 bp, Homo sapiens
gtgctttctttttattgctgcatttgtgttctacaagacagcctctttctccaagattaacatttcttatgattgttcctgacaatggattcacttccagaggccctgctaaggataaccaaaaaagggcatggagcaggctggttttggcagcgtgcacgcagtttcagagctttttaggtcttgggttttctgatgagtgatttcctgagcatgcctagggaatgacaggcatctccacaggcaggctgcatccaccttggctggggtgtcgtcattggctgcctattagaaaaacgacaggacaatgcataccaccgcctcccgactgtaaacataggggatatgtgttcacttagcatggacttctgggaggggccaaggaagggcggtctggagttttattgaatagagcagtgtgtattcggctgcctgcctgcccgcctgcttgctctctggctgtgctcctgcttaaagaaatcagtccttcctttccgacttagtcctcgggaagaagtttcagactacaaggtatcattggaacatttcaagatcatcaaatcaaattccacagggattggtgaccaaccagaaggctcagacatctgattgctgacctgtccagacatcatctggtctccctgaacctgaaatcacaccatggatgattttgagcgtcgcagagaacttagaaggcaaaagagggaggagatgcgactcgaagcagaaagaatcgcctaccagaggaatgacgatgatgaagaggaggcagcccgggaacggcgccgccgagcccgacaggaacggctgcggcagaagcaggaggaagaatccttgggacaggtgaccgaccaggtggaggtgaatgcccagaacagtgtgcctgacgaggaggccaagacaaccaccacaaacactcaagtggaaggggatgatgaggccgcattcctggagcgcctggctcggcgtgaggaaagacgccaaaaacgccttcaggaggctctggagcggcagaaggagttcgacccaacaataacagatgcaagtctgtcgctcccaagcagaagaatgcaaaatgacacagcagaaaatgaaactaccgagaaggaagaaaaaagtgaaagtcgccaagaaagatacgagatagaggaaacagaaacagtcaccaagtcctaccagaagaatgattggagggatgctgaagaaaacaagaaagaagacaaggaaaaggaggaggaggaagaggagaagccaaagcgagggagcattggagaaaatcaggtagaggtgatggtggaagagaaaacaactgaaagccaggaggaaacagtggtaatgtcattaaaaaatgggcagatcagttcagaagagcctaaacaagaggaggagagggaacaaggttcagatgagatttcccatcatgaaaagatggaagaggaagacaaggaaagagctgaggcagagagggcaaggttggaagcagaagaaagagaaagaattaaagccgagcaagacaaaaagatagcagatgaacgagcaagaattgaagcagaagaaaaagcagctgcccaagaaagagaaaggagagaggcagaagagagggaaaggatgagggaggaagagaaaagggcagcagaggagaggcagaggataaaggaggaagagaaaagggcagcagaggagaggcagaggataaaggaggaagagaaaagggcagcagaggagaggcagaggataaaagaggaagagaaaagggcagcagaggagaggcaaagggccagggcagaggaggaagagaaggctaaggtagaagagcagaaacgtaacaagcagctagaagagaaaaaacatgccatgcaagagacaaagataaaaggggaaaaggtagaacagaaaatagaagggaaatgggtaaatgaaaagaaagcacaagaagataaacttcagacagctgtcctaaagaaacagggagaagagaagggaactaaagtgcaagctaaaagagaaaagctccaagaagacaagcctaccttcaaaaaagaagagatcaaagatgaaaagattaaaaaggacaaagaacccaaagaagaagttaagagcttcatggatcgaaagaagggatttacagaagttaagtcgcagaatggagaattcatgacccacaaacttaaacatactgagaatactttcagccgccctggagggagggccagcgtggacaccaaggaggctgagggcgccccccaggtggaagccggcaaaaggctggaggagcttcgtcgtcgtcgcggggagaccgagagcgaagagttcgagaagctcaaacagaagcagcaggaggcggctttggagctggaggaactcaagaaaaagagggaggagagaaggaaggtcctggaggaggaagagcagaggaggaagcaggaggaagccgatcgaaaactcagagaggaggaagagaagaggaggctaaaggaagagattgaaaggcgaagagcagaagctgctgagaaacgccagaagatgccagaagatggcttgtcagatgacaagaaaccattcaagtgtttcactcctaaaggttcatctctcaagatagaagagcgagcagaatttttgaataagtctgtgcagaaaagcagtggtgtcaaatcgacccatcaagcagcaatagtctccaagattgacagcagactggagcagtataccagtgcaattgagggaacaaaaagcgcaaaacctacaaagccggcagcctcggatcttcctgttcctgctgaaggtgtacgcaacatcaagagtatgtgggagaaagggaatgtgttttcatcccccactgcagcaggcacaccaaataaggaaactgctggcttgaaggtaggggtttctagccgcatcaatgaatggctaactaaaaccccagatggaaacaagtcacctgctcccaaaccttctgacttgagaccaggagacgtatccagcaagcggaacctctgggaaaagcaatctgtggataaggtcacttcccccactaaggtttgagacagttccagaaagaacccaagctcaagacgcaggacgagctcagttgtagagggctaattcgctctgttttgtatttatgttgatttactaaattgggttcattatcttttatttttcaatatcccagtaaacccatgtatattatcactatatttaataatcacagtctagagatgttcatggtaaaagtactgcctttgcacaggagcctgtttctaaagaaacccatgctgtgaaatagagacttttctactgatcatcataactctgtatctgagcagtgataccaaccacatctgaagtcaacagaagatccaagtttaaaattgcctgcggaatgtgtgcagtatctagaaaaatgaaccgtagtttttgtttttttaaatacagaagtcatgttgtttctgcactttataataaagcatggaagaaattatcttagtaggcaattgtaacactttttgaaagtaacccatttcagatttgaaatactgcaataatggttgtctttaaaaaaaaaaaagaaatgtactgttaaggtattactttttttcatgctgatgattcatatctaaattacattattatgttagctgacagtggtactgattttttaggttggttgttttgtggatttctttagtagtgatagtagcctgaaccacattttagataactcaattatgtatgtatgtgcatacacatatacaaacacactaatggtagaatgcttttttatgtgctagactattatatttagtagtatgtcattgtaactagccaatatcacagcttttgaaaaattaaaaaatcacactatattaatattttatatttgccaacagaaacatggcagataggtatcaatatgttttcaatgcctgatgacctataagaagaaagtattgaaaagaagagagattagaactgttagaaggagttgaaattttctaaaagacatagtatttagtttataattaaatgcattcttgaagtccagtgtgaattttattaatgctatcatctcgaccaagctcaaagcctacttattagaaacaatgaagttcacaataggtcataaggtctcttccttttctaaaattgaaagacaagaaatttagtgccaatattgtacagacagaaattccatgtatgagtctcaacaaagactacctttggctaaatgtctagaagcagagaagtaaagtgagcaaaatccagtgttgaggagtcatgacagtactttgatctttatatactctgaagcatttcttcaaacttttctacttttatttgtcattgatacctgtagtaagttgacaatgtggtgaaatttcaaaattatatgtaacttctactagttttactttctcccccaagtcttttttaactcatgatttttacacacacaatccagaacttattatatagcctctaagtctttattcttcacagtagataatgaaagagtcctccagtgtcttggcaaaatgttctagtatagctggatacatacagtggagttctataaactcatacctcagtggacttaaccaaaattgtgttagtctcaattcctaccacactgagggagcctcccaaataactattttcttatctgcagtattcctccagaagagctaaccagggcagggctggcatgagaagtgacatctgcgttacaaagtctatcttcctcataagtctgtaaagagcaattgaatcttctagctttagcaaacctaagccaaaggaaggaaagccatgaagaatgcagaagtcaaaccctcatgacaaagtaggcacaagtctacaataagctaaatcagaatttacaaatacaagtgtcccaggtagcattgactcccgtcattggagtgaaatggatcaaagtttgaattaaggcctatggtaaggtaacattgctttgttgtacttttgaacaagagctcctcctgatcactattacatatttttctagaaaatctaaagttcagaagagaatgtatcactgctgacttttattccaatatttggatggagtaagttttagggtagaattttgttcagtttggatttaatcttttgaaaagtaaattccttgtttactggtttgactataattctctgttatctttacgaggtaaaactgcaagctgactagcatgttctgtgaatctgccattcctaaaaattttataaacacttgatacttttcactgataatggatcgctccaataaacatatattgtgaaaatgcatccacaataaatggaattccttcctgcaaaatgtctttttctcacttatttttatgtacaatattgatagtgagaggtatgtctattataataaagattatggcacagt

SEQ ID NO: 7046 - protein, 793 aa, Homo sapiens; identical to SEQ ID NO: 949

SEQ ID NO: 7047 - DNA, 4729 bp, Homo sapiens
gtgctttctttttattgctgcatttgtgttctacaagacagcctctttctccaagattaacatttcttatgattgttcctgacaatggattcacttccagaggccctgctaaggataaccaaaaaagggcatggagcaggctggttttggcagcgtgcacgcagtttcagagctttttaggtcttgggttttctgatgagtgatttcctgagcatgcctagggaatgacaggcatctccacaggcaggctgcatccaccttggctggggtgtcgtcattggctgcctattagaaaaacgacaggacaatgcataccaccgcctcccgactgtaaacataggggatatgtgttcacttagcatggacttctgggaggggccaaggaagggcggtctggagttttattgaatagagcagtgtgtattcggctgcctgcctgcccgcctgcttgctctctggctgtgctcctgcttaaagaaatcagtccttcctttccgacttagtcctcgggaagaagtttcagactacaaggtatcattggaacatttcaagatcatcaaatcaaattccacagggattggtgaccaaccagaaggctcagacatctgattgctgacctgtccagacatcatctggtctccctgaacctgaaatcacaccatggatgattttgagcgtcgcagagaacttagaaggcaaaagagggaggagatgcgactcgaagcagaaagaatcgcctaccagaggaatgacgatgatgaagaggaggcagcccgggaacggcgccgccgagcccgacaggaacggctgcggcagaagcaggaggaagaatccttgggacaggtgaccgaccaggtggaggtgaatgcccagaacagtgtgcctgacgaggaggccaagacaaccaccacaaacactcaagtggaaggggatgatgaggccgcattcctggagcgcctggctcggcgtgaggaaagacgccaaaaacgccttcaggaggctctggagcggcagaaggagttcgacccaacaataacagatgcaagtctgtcgctcccaagcagaagaatgcaaaatgacacagcagaaaatgaaactaccgagaaggaagaaaaaagtgaaagtcgccaagaaagatacgagatagaggaaacagaaacagtcaccaagtcctaccagaagaatgattggagggatgctgaagaaaacaagaaagaagacaaggaaaaggaggaggaggaagaggagaagccaaagcgagggagcattggagaaaatcagggagaagagaagggaactaaagtgcaagctaaaagagaaaagctccaagaagacaagcctaccttcaaaaaagaagagatcaaagatgaaaagattaaaaaggacaaagaacccaaagaagaagttaagagcttcatggatcgaaagaagggatttacagaagttaagtcgcagaatggagaattcatgacccacaaacttaaacatactgagaatactttcagccgccctggagggagggccagcgtggacaccaaggaggctgagggcgccccccaggtggaagccggcaaaaggctggaggagcttcgtcgtcgtcgcggggagaccgagagcgaagagttcgagaagctcaaacagaagcagcaggaggcggctttggagctggaggaactcaagaaaaagagggaggagagaaggaaggtcctggaggaggaagagcagaggaggaagcaggaggaagccgatcgaaaactcagagaggaggaagagaagaggaggctaaaggaagagattgaaaggcgaagagcagaagctgctgagaaacgccagaagatgccagaagatggcttgtcagatgacaagaaaccattcaagtgtttcactcctaaaggttcatctctcaagatagaagagcgagcagaatttttgaataagtctgtgcagaaaagcagtggtgtcaaatcgacccatcaagcagcaatagtctccaagattgacagcagactggagcagtataccagtgcaattgagggaacaaaaagcgcaaaacctacaaagccggcagcctcggatcttcctgttcctgctgaaggtgtacgcaacatcaagagtatgtgggagaaagggaatgtgttttcatcccccactgcagcaggcacaccaaataaggaaactgctggcttgaaggtaggggtttctagccgcatcaatgaatggctaactaaaaccccagatggaaacaagtcacctgctcccaaaccttctgacttgagaccaggagacgtatccagcaagcggaacctctgggaaaagcaatctgtggataaggtcacttcccccactaaggtttgagacagttccagaaagaacccaagctcaagacgcaggacgagctcagttgtagagggctaattcgctctgttttgtatttatgttgatttactaaattgggttcattatcttttatttttcaatatcccagtaaacccatgtatattatcactatatttaataatcacagtctagagatgttcatggtaaaagtactgcctttgcacaggagcctgtttctaaagaaacccatgctgtgaaatagagacttttctactgatcatcataactctgtatctgagcagtgataccaaccacatctgaagtcaacagaagatccaagtttaaaattgcctgcggaatgtgtgcagtatctagaaaaatgaaccgtagtttttgtttttttaaatacagaagtcatgttgtttctgcactttataataaagcatggaagaaattatcttagtaggcaattgtaacactttttgaaagtaacccatttcagatttgaaatactgcaataatggttgtctttaaaaaaaaaaaagaaatgtactgttaaggtattactttttttcatgctgatgattcatatctaaattacattattatgttagctgacagtggtactgattttttaggttggttgttttgtggatttctttagtagtgatagtagcctgaaccacattttagataactcaattatgtatgtatgtgcatacacatatacaaacacactaatggtagaatgcttttttatgtgctagactattatatttagtagtatgtcattgtaactagccaatatcacagcttttgaaaaattaaaaaatcacactatattaatattttatatttgccaacagaaacatggcagataggtatcaatatgttttcaatgcctgatgacctataagaagaaagtattgaaaagaagagagattagaactgttagaaggagttgaaattttctaaaagacatagtatttagtttataattaaatgcattcttgaagtccagtgtgaattttattaatgctatcatctcgaccaagctcaaagcctacttattagaaacaatgaagttcacaataggtcataaggtctcttccttttctaaaattgaaagacaagaaatttagtgccaatattgtacagacagaaattccatgtatgagtctcaacaaagactacctttggctaaatgtctagaagcagagaagtaaagtgagcaaaatccagtgttgaggagtcatgacagtactttgatctttatatactctgaagcatttcttcaaacttttctacttttatttgtcattgatacctgtagtaagttgacaatgtggtgaaatttcaaaattatatgtaacttctactagttttactttctcccccaagtcttttttaactcatgatttttacacacacaatccagaacttattatatagcctctaagtctttattcttcacagtagataatgaaagagtcctccagtgtcttggcaaaatgttctagtatagctggatacatacagtggagttctataaactcatacctcagtggacttaaccaaaattgtgttagtctcaattcctaccacactgagggagcctcccaaataactattttcttatctgcagtattcctccagaagagctaaccagggcagggctggcatgagaagtgacatctgcgttacaaagtctatcttcctcataagtctgtaaagagcaattgaatcttctagctttagcaaacctaagccaaaggaaggaaagccatgaagaatgcagaagtcaaaccctcatgacaaagtaggcacaagtctacaataagctaaatcagaatttacaaatacaagtgtcccaggtagcattgactcccgtcattggagtgaaatggatcaaagtttgaattaaggcctatggtaaggtaacattgctttgttgtacttttgaacaagagctcctcctgatcactattacatatttttctagaaaatctaaagttcagaagagaatgtatcactgctgacttttattccaatatttggatggagtaagttttagggtagaattttgttcagtttggatttaatcttttgaaaagtaaattccttgtttactggtttgactataattctctgttatctttacgaggtaaaactgcaagctgactagcatgttctgtgaatctgccattcctaaaaattttataaacacttgatacttttcactgataatggatcgctccaataaacatatattgtgaaaatgcatccacaataaatggaattccttcctgcaaaatgtctttttctcacttatttttatgtacaatattgatagtgagaggtatgtctattataataaagattatggcacagt

SEQ ID NO: 7048 - protein, 564 aa, Homo sapiens; identical to SEQ ID NO: 955

SEQ ID NO: 7049 - DNA, 4651 bp, Homo sapiens
gtgctttctttttattgctgcatttgtgttctacaagacagcctctttctccaagattaacatttcttatgattgttcctgacaatggattcacttccagaggccctgctaaggataaccaaaaaagggcatggagcaggctggttttggcagcgtgcacgcagtttcagagctttttaggtcttgggttttctgatgagtgatttcctgagcatgcctagggaatgacaggcatctccacaggcaggctgcatccaccttggctggggtgtcgtcattggctgcctattagaaaaacgacaggacaatgcataccaccgcctcccgactgtaaacataggggatatgtgttcacttagcatggacttctgggaggggccaaggaagggcggtctggagttttattgaatagagcagtgtgtattcggctgcctgcctgcccgcctgcttgctctctggctgtgctcctgcttaaagaaatcagtccttcctttccgacttagtcctcgggaagaagtttcagactacaaggtatcattggaacatttcaagatcatcaaatcaaattccacagggattggtgaccaaccagaaggctcagacatctgattgctgacctgtccagacatcatctggtctccctgaacctgaaatcacaccatggatgattttgagcgtcgcagagaacttagaaggcaaaagagggaggagatgcgactcgaagcagaaagaatcgcctaccagaggaatgacgatgatgaagaggaggcagcccgggaacggcgccgccgagcccgacaggaacggctgcggcagaagcaggaggaagaatccttgggacaggtgaccgaccaggtggaggtgaatgcccagaacagtgtgcctgacgaggaggccaagacaaccaccacaaacactcaagtggaaggggatgatgaggccgcattcctggagcgcctggctcggcgtgaggaaagacgccaaaaacgccttcaggaggctctggagcggcagaaggagttcgacccaacaataacagatgcaagtctgtcgctcccaagcagaagaatgcaaaatgacacagcagaaaatgaaactaccgagaaggaagaaaaaagtgaaagtcgccaagaaagatacgagatagaggaaacagaaacagtcaccaagtcctaccagaagaatgattggagggatgctgaagaaaacaagaaagaagacaaggaaaaggaggaggaggaagaggagaagccaaagcgagggagcattggagaaaatcagatcaaagatgaaaagattaaaaaggacaaagaacccaaagaagaagttaagagcttcatggatcgaaagaagggatttacagaagttaagtcgcagaatggagaattcatgacccacaaacttaaacatactgagaatactttcagccgccctggagggagggccagcgtggacaccaaggaggctgagggcgccccccaggtggaagccggcaaaaggctggaggagcttcgtcgtcgtcgcggggagaccgagagcgaagagttcgagaagctcaaacagaagcagcaggaggcggctttggagctggaggaactcaagaaaaagagggaggagagaaggaaggtcctggaggaggaagagcagaggaggaagcaggaggaagccgatcgaaaactcagagaggaggaagagaagaggaggctaaaggaagagattgaaaggcgaagagcagaagctgctgagaaacgccagaagatgccagaagatggcttgtcagatgacaagaaaccattcaagtgtttcactcctaaaggttcatctctcaagatagaagagcgagcagaatttttgaataagtctgtgcagaaaagcagtggtgtcaaatcgacccatcaagcagcaatagtctccaagattgacagcagactggagcagtataccagtgcaattgagggaacaaaaagcgcaaaacctacaaagccggcagcctcggatcttcctgttcctgctgaaggtgtacgcaacatcaagagtatgtgggagaaagggaatgtgttttcatcccccactgcagcaggcacaccaaataaggaaactgctggcttgaaggtaggggtttctagccgcatcaatgaatggctaactaaaaccccagatggaaacaagtcacctgctcccaaaccttctgacttgagaccaggagacgtatccagcaagcggaacctctgggaaaagcaatctgtggataaggtcacttcccccactaaggtttgagacagttccagaaagaacccaagctcaagacgcaggacgagctcagttgtagagggctaattcgctctgttttgtatttatgttgatttactaaattgggttcattatcttttatttttcaatatcccagtaaacccatgtatattatcactatatttaataatcacagtctagagatgttcatggtaaaagtactgcctttgcacaggagcctgtttctaaagaaacccatgctgtgaaatagagacttttctactgatcatcataactctgtatctgagcagtgataccaaccacatctgaagtcaacagaagatccaagtttaaaattgcctgcggaatgtgtgcagtatctagaaaaatgaaccgtagtttttgtttttttaaatacagaagtcatgttgtttctgcactttataataaagcatggaagaaattatcttagtaggcaattgtaacactttttgaaagtaacccatttcagatttgaaatactgcaataatggttgtctttaaaaaaaaaaaagaaatgtactgttaaggtattactttttttcatgctgatgattcatatctaaattacattattatgttagctgacagtggtactgattttttaggttggttgttttgtggatttctttagtagtgatagtagcctgaaccacattttagataactcaattatgtatgtatgtgcatacacatatacaaacacactaatggtagaatgcttttttatgtgctagactattatatttagtagtatgtcattgtaactagccaatatcacagcttttgaaaaattaaaaaatcacactatattaatattttatatttgccaacagaaacatggcagataggtatcaatatgttttcaatgcctgatgacctataagaagaaagtattgaaaagaagagagattagaactgttagaaggagttgaaattttctaaaagacatagtatttagtttataattaaatgcattcttgaagtccagtgtgaattttattaatgctatcatctcgaccaagctcaaagcctacttattagaaacaatgaagttcacaataggtcataaggtctcttccttttctaaaattgaaagacaagaaatttagtgccaatattgtacagacagaaattccatgtatgagtctcaacaaagactacctttggctaaatgtctagaagcagagaagtaaagtgagcaaaatccagtgttgaggagtcatgacagtactttgatctttatatactctgaagcatttcttcaaacttttctacttttatttgtcattgatacctgtagtaagttgacaatgtggtgaaatttcaaaattatatgtaacttctactagttttactttctcccccaagtcttttttaactcatgatttttacacacacaatccagaacttattatatagcctctaagtctttattcttcacagtagataatgaaagagtcctccagtgtcttggcaaaatgttctagtatagctggatacatacagtggagttctataaactcatacctcagtggacttaaccaaaattgtgttagtctcaattcctaccacactgagggagcctcccaaataactattttcttatctgcagtattcctccagaagagctaaccagggcagggctggcatgagaagtgacatctgcgttacaaagtctatcttcctcataagtctgtaaagagcaattgaatcttctagctttagcaaacctaagccaaaggaaggaaagccatgaagaatgcagaagtcaaaccctcatgacaaagtaggcacaagtctacaataagctaaatcagaatttacaaatacaagtgtcccaggtagcattgactcccgtcattggagtgaaatggatcaaagtttgaattaaggcctatggtaaggtaacattgctttgttgtacttttgaacaagagctcctcctgatcactattacatatttttctagaaaatctaaagttcagaagagaatgtatcactgctgacttttattccaatatttggatggagtaagttttagggtagaattttgttcagtttggatttaatcttttgaaaagtaaattccttgtttactggtttgactataattctctgttatctttacgaggtaaaactgcaagctgactagcatgttctgtgaatctgccattcctaaaaattttataaacacttgatacttttcactgataatggatcgctccaataaacatatattgtgaaaatgcatccacaataaatggaattccttcctgcaaaatgtctttttctcacttatttttatgtacaatattgatagtgagaggtatgtctattataataaagattatggcacagt

SEQ ID NO: 7050 - protein, 538 aa, Homo sapiens; identical to SEQ ID NO: 947

SEQ ID NO: 7051 - DNA, 5431 bp, Homo sapiens
gtgctttctttttattgctgcatttgtgttctacaagacagcctctttctccaagattaacatttcttatgattgttcctgacaatggattcacttccagaggccctgctaaggataaccaaaaaagggcatggagcaggctggttttggcagcgtgcacgcagtttcagagctttttaggtcttgggttttctgatgagtgatttcctgagcatgcctagggaatgacaggcatctccacaggcaggctgcatccaccttggctggggtgtcgtcattggctgcctattagaaaaacgacaggacaatgcataccaccgcctcccgactgtaaacataggggatatgtgttcacttagcatggacttctgggaggggccaaggaagggcggtctggagttttattgaatagagcagtgtgtattcggctgcctgcctgcccgcctgcttgctctctggctgtgctcctgcttaaagaaatcagtccttcctttccgacttagtcctcgggaagaagtttcagactacaaggtatcattggaacatttcaagatcatcaaatcaaattccacagggattggtgaccaaccagaaggctcagacatctgattgctgacctgtccagacatcatctggtctccctgaacctgaaatcacaccatggatgattttgagcgtcgcagagaacttagaaggcaaaagagggaggagatgcgactcgaagcagaaagaatcgcctaccagaggaatgacgatgatgaagaggaggcagcccgggaacggcgccgccgagcccgacaggaacggctgcggcagaagcaggaggaagaatccttgggacaggtgaccgaccaggtggaggtgaatgcccagaacagtgtgcctgacgaggaggccaagacaaccaccacaaacactcaagtggaaggggatgatgaggccgcattcctggagcgcctggctcggcgtgaggaaagacgccaaaaacgccttcaggaggctctggagcggcagaaggagttcgacccaacaataacagatgcaagtctgtcgctcccaagcagaagaatgcaaaatgacacagcagaaaatgaaactaccgagaaggaagaaaaaagtgaaagtcgccaagaaagatacgagatagaggaaacagaaacagtcaccaagtcctaccagaagaatgattggagggatgctgaagaaaacaagaaagaagacaaggaaaaggaggaggaggaagaggagaagccaaagcgagggagcattggagaaaatcaggtagaggtgatggtggaagagaaaacaactgaaagccaggaggaaacagtggtaatgtcattaaaaaatgggcagatcagttcagaagagcctaaacaagaggaggagagggaacaaggttcagatgagatttcccatcatgaaaagatggaagaggaagacaaggaaagagctgaggcagagagggcaaggttggaagcagaagaaagagaaagaattaaagccgagcaagacaaaaagatagcagatgaacgagcaagaattgaagcagaagaaaaagcagctgcccaagaaagagaaaggagagaggcagaagagagggaaaggatgagggaggaagagaaaagggcagcagaggagaggcagaggataaaggaggaagagaaaagggcagcagaggagaggcagaggataaaggaggaagagaaaagggcagcagaggagaggcagaggataaaagaggaagagaaaagggcagcagaggagaggcaaagggccagggcagaggaggaagagaaggctaaggtagaagagcagaaacgtaacaagcagctagaagagaaaaaacatgccatgcaagagacaaagataaaaggggaaaaggtagaacagaaaatagaagggaaatgggtaaatgaaaagaaagcacaagaagataaacttcagacagctgtcctaaagaaacagggagaagagaagggaactaaagtgcaagctaaaagagaaaagctccaagaagacaagcctaccttcaaaaaagaagagatcaaagatgaaaagattaaaaaggacaaagaacccaaagaagaagttaagagcttcatggatcgaaagaagggatttacagaagttaagtcgcagaatggagaattcatgacccacaaacttaaacatactgagaatactttcagccgccctggagggagggccagcgtggacaccaaggaggctgagggcgccccccaggtggaagccggcaaaaggctggaggagcttcgtcgtcgtcgcggggagaccgagagcgaagagttcgagaagctcaaacagaagcagcaggaggcggctttggagctggaggaactcaagaaaaagagggaggagagaaggaaggtcctggaggaggaagagcagaggaggaagcaggaggaagccgatcgaaaactcagagaggaggaagagaagaggaggctaaaggaagagattgaaaggcgaagagcagaagctgctgagaaacgccagaagatgccagaagatggcttgtcagatgacaagaaaccattcaagtgtttcactcctaaaggttcatctctcaagatagaagagcgagcagaatttttgaataagtctgtgcagaaaagcagtggtgtcaaatcgacccatcaagcagcaatagtctccaagattgacagcagactggagcagtataccagtgcaattgagggaacaaaaagcgcaaaacctacaaagccggcagcctcggatcttcctgttcctgctgaaggtgtacgcaacatcaagagtatgtgggagaaagggaatgtgttttcatcccccactgcagcaggcacaccaaataaggaaactgctggcttgaaggtaggggtttctagccgcatcaatgaatggctaactaaaaccccagatggaaacaagtcacctgctcccaaaccttctgacttgagaccaggagacgtatccagcaagcggaacctctgggaaaagcaatctgtggataaggtcacttcccccactaaggtttgagacagttccagaaagaacccaagctcaagacgcaggacgagctcagttgtagagggctaattcgctctgttttgtatttatgttgatttactaaattgggttcattatcttttatttttcaatatcccagtaaacccatgtatattatcactatatttaataatcacagtctagagatgttcatggtaaaagtactgcctttgcacaggagcctgtttctaaagaaacccatgctgtgaaatagagacttttctactgatcatcataactctgtatctgagcagtgataccaaccacatctgaagtcaacagaagatccaagtttaaaattgcctgcggaatgtgtgcagtatctagaaaaatgaaccgtagtttttgtttttttaaatacagaagtcatgttgtttctgcactttataataaagcatggaagaaattatcttagtaggcaattgtaacactttttgaaagtaacccatttcagatttgaaatactgcaataatggttgtctttaaaaaaaaaaaagaaatgtactgttaaggtattactttttttcatgctgatgattcatatctaaattacattattatgttagctgacagtggtactgattttttaggttggttgttttgtggatttctttagtagtgatagtagcctgaaccacattttagataactcaattatgtatgtatgtgcatacacatatacaaacacactaatggtagaatgcttttttatgtgctagactattatatttagtagtatgtcattgtaactagccaatatcacagcttttgaaaaattaaaaaatcacactatattaatattttatatttgccaacagaaacatggcagataggtatcaatatgttttcaatgcctgatgacctataagaagaaagtattgaaaagaagagagattagaactgttagaaggagttgaaattttctaaaagacatagtatttagtttataattaaatgcattcttgaagtccagtgtgaattttattaatgctatcatctcgaccaagctcaaagcctacttattagaaacaatgaagttcacaataggtcataaggtctcttccttttctaaaattgaaagacaagaaatttagtgccaatattgtacagacagaaattccatgtatgagtctcaacaaagactacctttggctaaatgtctagaagcagagaagtaaagtgagcaaaatccagtgttgaggagtcatgacagtactttgatctttatatactctgaagcatttcttcaaacttttctacttttatttgtcattgatacctgtagtaagttgacaatgtggtgaaatttcaaaattatatgtaacttctactagttttactttctcccccaagtcttttttaactcatgatttttacacacacaatccagaacttattatatagcctctaagtctttattcttcacagtagataatgaaagagtcctccagtgtcttggcaaaatgttctagtatagctggatacatacagtggagttctataaactcatacctcagtggacttaaccaaaattgtgttagtctcaattcctaccacactgagggagcctcccaaataactattttcttatctgcagtattcctccagaagagctaaccagggcagggctggcatgagaagtgacatctgcgttacaaagtctatcttcctcataagtctgtaaagagcaattgaatcttctagctttagcaaacctaagccaaaggaaggaaagccatgaagaatgcagaagtcaaaccctcatgacaaagtaggcacaagtctacaataagctaaatcagaatttacaaatacaagtgtcccaggtagcattgactcccgtcattggagtgaaatggatcaaagtttgaattaaggcctatggtaaggtaacattgctttgttgtacttttgaacaagagctcctcctgatcactattacatatttttctagaaaatctaaagttcagaagagaatgtatcactgctgacttttattccaatatttggatggagtaagttttagggtagaattttgttcagtttggatttaatcttttgaaaagtaaattccttgtttactggtttgactataattctctgttatctttacgaggtaaaactgcaagctgactagcatgttctgtgaatctgccattcctaaaaattttataaacacttgatacttttcactgataatggatcgctccaataaacatatattgtgaaaatgcatccacaataaatggaattccttcctgcaaaatgtctttttctcacttatttttatgtacaatattgatagtgagaggtatgtctattataataaagattatggcacagtaaaacctgtatttca

SEQ ID NO: 7052 - protein, 793 aa, Homo sapiens; identical to SEQ ID NO: 949

SEQ ID NO: 7053 - DNA, 630 bp, Homo sapiens
gacttagtcctcgggaagaagtttcagactacaaggagaactccatctagaacaaaatgtgcattcagcaaggtatcattggaacatttcaagatcatcaaatcaaattccacagggattggtgaccaaccagaaggctcagacatctgattgctgacctgtccagacatcatctggtctccctgaacctgaaatcacaccatggatgattttgagcgtcgcagagaacttagaaggcaaaagagggaggagatgcgactcgaagcagaaaggtaaggatctagggtgaaaaatacttgtattcccttattaacaaccttggtttcaggcctcaaagaccatccttttgagaggccaaatgtggtcatatcgcacaccaaactgttcgcaaaagtagttatggaaaatttttctgctaagactctaaattaagcatttaaaaaaggaaaacaaacaagaatcaagaaaaagagagatttgagaggaatcaattgataactgcatattgataattgcatttaatcaatacctttcacattggaatgttttaaatgacaaaagtaatgtgtgaatgaaggtttaaaaagcttatataataagaaatgacaaaaaaatgtcaagtattgaata

SEQ ID NO: 7054 - protein, 49 aa, Homo sapiens
DLVLGKKFQTTRRTPSRTKCAFSKVSLEHFKIIKSNSTGIGDQPEGSDI

SEQ ID NO: 7055 - DNA, 3270 bp, Homo sapiens
caccgccaggggtgagctggcggcgggggaggcgggcagcggagccaagctgacccggcgagcggagccggggctggagagcggcgaccactgcggatctcggaaggaagaaatgatgtaaatcactcatccaaaccttaaggtcaaaggtgagaaggaaggtcaggaagaacatggcctggccaaatgtttttcaaagagggtctctgctgtcccagttcagccatcatcatgttgtagtgttcctgctcactttcttcagttattcgttgctccatgcttcacgaaaaacatttagcaatgtcaaagtcagtatctctgagcagtggaccccaagtgcttttaacacgtcagttgagctgcctgtggagatctggagcagcaaccatttgttccccagtgcagagaaagcgactcttttcctcggcacactggataccattttcctcttctcctatgctgtgggcctattcatcagtggcatcgttggggatcggttgaatttgcgatgggttctgtcttttggcatgtgctcttctgcattagtggtgtttgtctttggtgcgctcacagaatggctgcgtttctacaacaaatggctgtactgctgcctgtggattgtgaacggcctgctgcagtccactggttggccctgtgtggttgctgttatgggcaactggtttgggaaagccggacgaggagttgtttttggtctctggagtgcctgtgcttcggtgggcaacattttgggagcgtgcctagcttcttctgttcttcagtatggttatgagtatgcctttctggtgacggcgtctgtgcagtttgctggtgggatcgttatcttctttggactcctggtgtcaccagaagaaattggtctctcgggtattgaggcagaagaaaactttgaagaagactcacacaggccattaattaatggtggtgaaaatgaagacgaatatgagccgaattattcaatccaagatgatagttctgttgcccaagtcaaggcgataagcttctaccaggcatgttgccttcctggagtcataccgtactcactggcctacgcctgcttgaagttagtgaattactccttcttcttctggctccccttttatctgagtaacaacttcggctggaaggaggcggaagccgacaagctgtccatttggtacgacgttggagggatcataggtggaactttgcaaggcttcatctctgatgtactacagaagagagcgccggttcttgccctgagtctgcttctggcagttgggtccctcatcgggtatagtcgattttttattggtggaccttctaatatgattagttctgctatttctgcggacttgggtcgccaggagctcatccaaaggagcagtgaagctttggccactgtcacaggaattgtggatggttcggggagcattggagctgcagtgggccagtatttagtgtctctgatccgggacaagctaggatggatgtgggttttctactttttcattctcatgacaagttgtacaattgtgtttatctcgccattaatagtgagggaaatattctctctcgtgctaaggagacaggctcacatattgagggagtgaccggtgcccgcgagacagaaagaacaatgtcagccacatcaggaccgctggggcttcgagtctgccctaatttgggtttgtctaggagctccagcctgatcttggattgtcaggcgtctctcaacactgccagccacctgagatgctgaccagcagtgaaggctgcactagttttctacactacaggaattactgttgatgatttttgctgttgtttcatgaatgtgccgagtgacttctgactctgccagcatctttgacctctgactctgcccgcgtctttgtttggcctattgaggtttagcgttttaaccttaactgttgttttggacttgaactttctctagccttgaaaatggagtgaacaggaggcaaagccacgcgtggtttgtgttggtggtatgttccacaaatggaagagatcattgcattttgctttggtaatgagtttacagagagtgggtcatctttgaagcatcaaatcctgatcaaatgctcaagctggaccgagctgcaagcctgccttggacaaagaatccctctgttcactgtggtgggaaagatcacactacatgcctgttgattggctcagtcactctgtgtctgatctaaacgtcattcagccctagaagcatgaattgcttcaaattattgtcaacttgttctcttccattttcattcaaattaactttgactcctggaagtattgagtcttcctttcaaggaccataaggtacatcagttatcttgaacattctgacgtgtaaaggaccataaggtacatcatttatcttgaacattccgacgtgtaactcacagccgaagcactccatcccagatttgttgtctgggaacttaggatcctctaggaagctaatctgcttagtctatttttagaggattgatctctggcacaagcagcttcctggagttacctcagcagaagactagaattagagaaaagggaaagaccttttcttctagtaagtgtcaagtacagatgctctttgacttatgatggggttatgtcccagtaaacccattggaagtcaaatgcatttaatacccctgactggacaccacagcttagcctcgtccaccctaaatgtactcagaacacttagaattgcccacagttgggcagaatcatctaacacaaactctattttataatcgagtgttgaatatatcatgtaatttattgaatattgtacattatgttgaaattgcaaccatttcacaccattgtaaagtccaaaaatcagaagctgaggactgtctgtacatgacattgaatcacatgaatggattactagggcctgaggggtgtccgttctttagaaaaatgtagagtatatatatcttcagggctgtgaattccatactagttatcaatattttaagatcattctgtatatacatattttaaattatgcaagcaaactaggaggagaatgtgcaattttgagggatacctaatttgcattcggttaggggatatttttcaacctcttgctttatactctgatatggggtgtgtttatgaacttgttaatgttatttaatcatgcagatttccaatcagtgtattgctcatttactgacaaaaagggaaaatacgaaacacagaaagggaaaataaactgacttttataatgaa

SEQ ID NO: 7056 - protein, 478 aa, Homo sapiens
MAWPNVFQRGSLLSQFSHHHVVVFLLTFFSYSLLHASRKTFSNVKVSISEQWTPSAFNTSVELPVEIWSSNHLFPSAEKATLFLGTLDTIFLFSYAVGLFISGIVGDRLNLRWVLSFGMCSSALVVFVFGALTEWLRFYNKWLYCCLWIVNGLLQSTGWPCVVAVMGNWFGKAGRGVVFGLWSACASVGNILGACLASSVLQYGYEYAFLVTASVQFAGGIVIFFGLLVSPEEIGLSGIEAEENFEEDSHRPLINGGENEDEYEPNYSIQDDSSVAQVKAISFYQACCLPGVIPYSLAYACLKLVNYSFFFWLPFYLSNNFGWKEAEADKLSIWYDVGGIIGGTLQGFISDVLQKRAPVLALSLLLAVGSLIGYSRFFIGGPSNMISSAISADLGRQELIQRSSEALATVTGIVDGSGSIGAAVGQYLVSLIRDKLGWMWVFYFFILMTSCTIVFISPLIVREIFSLVLRRQAHILRE

SEQ ID NO: 7057 - DNA, 3318 bp, Homo sapiens
caccgccaggggtgagctggcggcgggggaggcgggcagcggagccaagctgacccggcgagcggagccggggctggagagcggcgaccactgcggatctcggaaggaagaaatgatgtaaatcactcatccaaaccttaaggtcaaaggtgagaaggaaggtcaggaagaacatggcctggccaaatgtttttcaaagagggtctctgctgtcccagttcagccatcatcatgttgtagtgttcctgctcactttcttcagttattcgttgctccatgcttcacgaaaaacatttagcaatgtcaaagtcagtatctctgagcagtggaccccaagtgcttttaacacgtcagttgagctgcctgtggagatctggagcagcaaccatttgttccccagtgcagagaaagcgactcttttcctcggcacactggataccattttcctcttctcctatgctgtgggcctattcatcagtggcatcgttggggatcggttgaatttgcgatgggttctgtcttttggcatgtgctcttctgcattagtggtgtttgtctttggtgcgctcacagaatggctgcgtttctacaacaaatggctgtactgctgcctgtggattgtgaacggcctgctgcagtccactggttggccctgtgtggttgctgttatgggcaactggtttgggaaagccggacgaggagttgtttttggtctctggagtgcctgtgcttcggtgggcaacattttgggagcgtgcctagcttcttctgttcttcagtatggttatgagtatgcctttctggtgacggcgtctgtgcagtttgctggtgggatcgttatcttctttggactcctggtgtcaccagaagaaattggtctctcgggtattgaggcagaagaaaactttgaagaagactcacacaggccattaattaatggtggtgaaaatgaagacgaatatgagccgaattattcaatccaagatgatagttctgttgcccaagtcaaggcgataagcttctaccaggcatgttgccttcctggagtcataccgtactcactggcctacgcctgcttgaagttagtgaattactccttcttcttctggctccccttttatctgagtaacaacttcggctggaaggaggcggaagccgacaagctgtccatttggtacgacgttggagggatcataggtggaactttgcaaggcttcatctctgatgtactacagaagagagcgccggttcttgccctgagtctgcttctggcagttgggtccctcatcgggtatagtcgttctccaaatgataagtccatcaatgcccttctgatgactgttacaggattttttattggtggaccttctaatatgattagttctgctatttctgcggacttgggtcgccaggagctcatccaaaggagcagtgaagctttggccactgtcacaggaattgtggatggttcggggagcattggagctgcagtgggccagtatttagtgtctctgatccgggacaagctaggatggatgtgggttttctactttttcattctcatgacaagttgtacaattgtgtttatctcgccattaatagtgagggaaatattctctctcgtgctaaggagacaggctcacatattgagggagtgaccggtgcccgcgagacagaaagaacaatgtcagccacatcaggaccgctggggcttcgagtctgccctaatttgggtttgtctaggagctccagcctgatcttggattgtcaggcgtctctcaacactgccagccacctgagatgctgaccagcagtgaaggctgcactagttttctacactacaggaattactgttgatgatttttgctgttgtttcatgaatgtgccgagtgacttctgactctgccagcatctttgacctctgactctgcccgcgtctttgtttggcctattgaggtttagcgttttaaccttaactgttgttttggacttgaactttctctagccttgaaaatggagtgaacaggaggcaaagccacgcgtggtttgtgttggtggtatgttccacaaatggaagagatcattgcattttgctttggtaatgagtttacagagagtgggtcatctttgaagcatcaaatcctgatcaaatgctcaagctggaccgagctgcaagcctgccttggacaaagaatccctctgttcactgtggtgggaaagatcacactacatgcctgttgattggctcagtcactctgtgtctgatctaaacgtcattcagccctagaagcatgaattgcttcaaattattgtcaacttgttctcttccattttcattcaaattaactttgactcctggaagtattgagtcttcctttcaaggaccataaggtacatcagttatcttgaacattctgacgtgtaaaggaccataaggtacatcatttatcttgaacattccgacgtgtaactcacagccgaagcactccatcccagatttgttgtctgggaacttaggatcctctaggaagctaatctgcttagtctatttttagaggattgatctctggcacaagcagcttcctggagttacctcagcagaagactagaattagagaaaagggaaagaccttttcttctagtaagtgtcaagtacagatgctctttgacttatgatggggttatgtcccagtaaacccattggaagtcaaatgcatttaatacccctgactggacaccacagcttagcctcgtccaccctaaatgtactcagaacacttagaattgcccacagttgggcagaatcatctaacacaaactctattttataatcgagtgttgaatatatcatgtaatttattgaatattgtacattatgttgaaattgcaaccatttcacaccattgtaaagtccaaaaatcagaagctgaggactgtctgtacatgacattgaatcacatgaatggattactagggcctgaggggtgtccgttctttagaaaaatgtagagtatatatatcttcagggctgtgaattccatactagttatcaatattttaagatcattctgtatatacatattttaaattatgcaagcaaactaggaggagaatgtgcaattttgagggatacctaatttgcattcggttaggggatatttttcaacctcttgctttatactctgatatggggtgtgtttatgaacttgttaatgttatttaatcatgcagatttccaatcagtgtattgctcatttactgacaaaaagggaaaatacgaaacacagaaagggaaaataaactgacttttataatgaa

SEQ ID NO: 7058 - protein, 494 aa, Homo sapiens; identical to SEQ ID NO: 959

SEQ ID NO: 7059 - DNA, 3016 bp, Homo sapiens
caccgccaggggtgagctggcggcgggggaggcgggcagcggagccaagctgacccggcgagcggagccggggctggagagcggcgaccactgcggatctcggaaggaagaaatgatgtaaatcactcatccaaaccttaaggtcaaaggtgagaaggaaggtcaggaagaacatggcctggccaaatgtttttcaaagagggtctctgctgtcccagttcagccatcatcatgttgtagtgttcctgctcactttcttcagttattcgttgctccatgcttcacgaaaaacatttagcaatgtcaaagtcagtatctctgagcagtggaccccaagtgcttttaacacgtcagttgagctgcctgtggagatctggagcagcaaccatttgttccccagtgcagagaaagcgactcttttcctcggcacactggataccattttcctcttctcctatgctgtgggcctattcatcagtggcatcgttggggatcggttgaatttgcgatgggttctgtcttttggcatgtgctcttctgcattagtggtgtttgtctttggtgcgctcacagaatggctgcgtttctacaacaaatggctgtactgctgcctgtggattgtgaacggcctgctgcagtccactggttggccctgtgtggttgctgttatgggcaactggtttgggaaagccggacgaggagttgtttttggtctctggagtgcctgtgcttcggtgggcaacattttgggagcgtgcctagcttcttctgttcttcagtatggttatgagtatgcctttctggtgacggcgtctgtgcagtttgctggtgggatcgttatcttctttggactcctggtgtcaccagaagaaattggtctctcgggtattgaggcagaagaaaactttgaagaagactcacacaggccattaattaatggtggtgaaaatgaagacgaatatgagccgaattattcaatccaagatgatagttctgttgcccaagtcaaggcgataagcttctaccaggcatgttgccttcctggagtcataccgtactcactggcctacgcctgcttgaagttagtgaattactccttcttcttctggctccccttttatctgagtaacaacttcggctggaaggaggcggaagccgacaagctgtccatttggtacgacgttggagggatcatagtatttagtgtctctgatccgggacaagctaggatggatgtgggttttctactttttcattctcatgacaagttgtacaattgtgtttatctcgccattaatagtgagggaaatattctctctcgtgctaaggagacaggctcacatattgagggagtgaccggtgcccgcgagacagaaagaacaatgtcagccacatcaggaccgctggggcttcgagtctgccctaatttgggtttgtctaggagctccagcctgatcttggattgtcaggcgtctctcaacactgccagccacctgagatgctgaccagcagtgaaggctgcactagttttctacactacaggaattactgttgatgatttttgctgttgtttcatgaatgtgccgagtgacttctgactctgccagcatctttgacctctgactctgcccgcgtctttgtttggcctattgaggtttagcgttttaaccttaactgttgttttggacttgaactttctctagccttgaaaatggagtgaacaggaggcaaagccacgcgtggtttgtgttggtggtatgttccacaaatggaagagatcattgcattttgctttggtaatgagtttacagagagtgggtcatctttgaagcatcaaatcctgatcaaatgctcaagctggaccgagctgcaagcctgccttggacaaagaatccctctgttcactgtggtgggaaagatcacactacatgcctgttgattggctcagtcactctgtgtctgatctaaacgtcattcagccctagaagcatgaattgcttcaaattattgtcaacttgttctcttccattttcattcaaattaactttgactcctggaagtattgagtcttcctttcaaggaccataaggtacatcagttatcttgaacattctgacgtgtaaaggaccataaggtacatcatttatcttgaacattccgacgtgtaactcacagccgaagcactccatcccagatttgttgtctgggaacttaggatcctctaggaagctaatctgcttagtctatttttagaggattgatctctggcacaagcagcttcctggagttacctcagcagaagactagaattagagaaaagggaaagaccttttcttctagtaagtgtcaagtacagatgctctttgacttatgatggggttatgtcccagtaaacccattggaagtcaaatgcatttaatacccctgactggacaccacagcttagcctcgtccaccctaaatgtactcagaacacttagaattgcccacagttgggcagaatcatctaacacaaactctattttataatcgagtgttgaatatatcatgtaatttattgaatattgtacattatgttgaaattgcaaccatttcacaccattgtaaagtccaaaaatcagaagctgaggactgtctgtacatgacattgaatcacatgaatggattactagggcctgaggggtgtccgttctttagaaaaatgtagagtatatatatcttcagggctgtgaattccatactagttatcaatattttaagatcattctgtatatacatattttaaattatgcaagcaaactaggaggagaatgtgcaattttgagggatacctaatttgcattcggttaggggatatttttcaacctcttgctttatactctgatatggggtgtgtttatgaacttgttaatgttatttaatcatgcagatttccaatcagtgtattgctcatttactgacaaaaagggaaaatacgaaacacagaaagggaaaataaactgacttttataatgaa

SEQ ID NO: 7060 - protein, 443 aa, Homo sapiens; identical to SEQ ID NO: 957

SEQ ID NO: 7061 - DNA, 648 bp, Homo sapiens
ggaaaccctggtcgcaccgccaggggtgagctggcggcgggggaggcgggcagcggagccaagctgacccggcgagcggagccggggctggagagcggcgaccactgcggatctcggaaggaagaaatgatgtaaatcactcatccaaaccttaaggtcaaaggtgagaaggaaggtcaggaagaacatggcctggccaaatgtttttcaaagagggtctctgctgtcccagttcagccatcatcatgttgtagtgttcctgctcactttcttcagttattcgttgctccatgcttcacgaaaaacatttagcaatgtcaaagtcagtatctctgagcagtggaccccaagtgcttttaacacgtcagttgagctgcctgtggagatctggagcagcaaccatttgttccccagtgcagagaaagcgactcttttcctcggcacactggataccattttcctcttctcctatgctgtgggcctattcatcagtggcatcgttggggatcggttgaatttgcgatgggttctgtcttttggcatgtgctcttctgcattagtgtatgcctttctggtgacggcgtctgtgcagtttgctggtgggatcgttatcttctttggactcctggtgtcaccagaagaaattgg

SEQ ID NO: 7062 - protein, 152 aa, Homo sapiens
MAWPNVFQRGSLLSQFSHHHVVVFLLTFFSYSLLHASRKTFSNVKVSISEQWTPSAFNTSVELPVEIWSSNHLFPSAEKATLFLGTLDTIFLFSYAVGLFISGIVGDRLNLRWVLSFGMCSSALVYAFLVTASVQFAGGIVIFFGLLVSPEE

SEQ ID NO: 7063 - DNA, 795 bp, Homo sapiens; identical to SEQ ID NO: 960

SEQ ID NO: 7064 - protein, 264 aa, Homo sapiens; identical to SEQ ID NO: 961

SEQ ID NO: 7065 - DNA, 459 bp, Homo sapiens
atggtcatgcaggtgtgggacacagctggccaggagcgcttccgcaccatcacccaaagctactaccgcagtgcccacgcagccatcatcgcctatgacctcacccggcggtccacgttcgagtccatccctcactggattcatgagatagagaaatatggagctgcaaatgtggtcattatgctgattggaaataaatgtgacctctgggaaaagcggcacgtcctgttcgaggatgcctgcacactggctgagaagtacggcctcctggccgttttggagacatctgccaaggagtcaaagaacatagaagaagtcttcgtgctcatggccaaggagctgatcgcgcgcaacagcctgcacctatatggggagagtgccctgaacggcctccccctggactccagccccgttcttatggcccagggtccaagtgaaaagacccactgcacttgctaa

SEQ ID NO: 7066 - protein, 152 aa, Homo sapiens
MVMQVWDTAGQERFRTITQSYYRSAHAAIIAYDLTRRSTFESIPHWIHEIEKYGAANVVIMLIGNKCDLWEKRHVLFEDACTLAEKYGLLAVLETSAKESKNIEEVFVLMAKELIARNSLHLYGESALNGLPLDSSPVLMAQGPSEKTHCTC

SEQ ID NO: 7067 - DNA, 345 bp, Homo sapiens
atgaccttcaggcctgatacagcagcaagcgtggagcatcaccccagctcaggagggccctcctggaccctggagcggaccctcatcgtggtgaagccagatggggcacagcggcggctcgtgggggacgggatccagcgctttgagaggtggcttcacgctgggtccagtgtggtcccgcgccccgggaccatacagggagatttcagcgcccacatcagcaggaacttcttccaggcaagcaactccgtggaaggggctcggagatggatcccgctgtggctcccgagcagggacctggtgagctgggcacggcgccagcacagccgcagccacccagcctga

SEQ ID NO: 7068 - protein, 114 aa, Homo sapiens
MTFRPDTAASVEHHPSSGGPSWTLERTLIVVKPDGAQRRLVGDGIQRFERWLHAGSSVVPRPGTIQGDFSAHISRNFFQASNSVEGARRWIPLWLPSRDLVSWARRQHSRSHPA

SEQ ID NO: 7069 - DNA, 3764 bp, Homo sapiens
agtagagacgggctttctccgtgttggtcaggctggtcttgaactcccgacctcaggtgatctgccggcctcagcctcccaaagtgctgggattagaggcgtgagccaccgcacccggtctatgatccttatcgttcactttgagctctctgagaagagtagggccctattttatctgcagggctttctttcctcagttcctcagtttctttcctcagttccagtatcatgaacaggatactcagttactgagtatcctgagcagatactgagtaaatgcttgagtgatgttgataaagtcatatacctagaattacccactttaacaggaactttgtaagattcctctgctttcattaaaaaaaaaaaaaacaaaacttgtaaattaccaaagacaaagtacttaacagaacacatgtgtatcttccttttttttttttttttttgagatggagtgtcgctctgtcgcccaggctggagtgcagtggcgagatctcagctcactgcaacctctgcctcctgggttcaagcgattctcctgcctcagcctcctgagtaggtgggattacgcccggccacatgtatattttttctggaactaccttattcaatcattcagtaagtaaacattgcacgccacctgggtgacagagtgagatttcgtctcaaaaaaaaaaaaaaagaaagaaggaaatccttcagaaattctttatctgagtgctgtgacgtccatagtgaaatttattacttggaaactacatagtggttgtgagaggaaataagtaataaatattaaatggtattaaaaagattatgcaactgggaaagaaaaattaatttgctatcgctaccatgattcaccatcacatctagctgtcttctacagccttttatttatttattttttttttgagacggagtctcagtggcgtgatcctggttcactgcaacctctgggccccccccaacccactgcgagttcaagcaattctgcctcagcctcccaagtagctgggactacaggtattttatgcatggggtttgtaaggaaggagacaactgtcgctactcgcatgacctctctgacagtccgtatagtgtagtgtgcaagtattttcagcgagggtactgtatttatggagaccgctgcagatatgaacatagcaaaccattgaaacaggaagaagcaactgctacagagctaactacaaagtcatcccttgctgcttcctcaagtctctcatcgatagttggaccacttgttgaaatgaatacaggcgaagctgagtcaagaaattcaaactttgcaactgtaggagcaggttcagaggactgggtgaatgctattgagtttgttcctgggcaaccctactgtggccgtactgcgccttcctgcactgaagcacccctgcagggctcagtgaccaaggaagaatcagagaaagagcaaaccgccgtggagacaaagaagcagctgtgcccctatgctgcagtgggagagtgccgatacggggagaactgtgtgtatctccacggagattcttgtgacatgtgtgggctgcaggtcctgcatccaatggatgctgcccagagatcgcagcatatcaaatcgtgcattgaggcccatgagaaggacatggagctctcatttgccgtgcagcgcagcaaggacatggtgtgtgggatctgcatggaggtggtctatgagaaagccaaccccagtgagcgccgcttcgggatcctctccaactgcaaccacacctactgtctcaagtgcattcgcaagtggaggagtgctaagcaatttgagagcaagatcataaagtcctgcccagaatgccggatcacatctaactttgtcattccaagtgagtactgggtggaggagaaagaagagaagcagaaactcattctgaaatacaaggaggcaatgagcaacaaggcgtgcaggtattttgatgaaggacgtgggagctgcccatttggagggaactgtttttacaagcatgcgtaccctgatggccgtagagaggagccacagagacagaaagtgggaacatcaagcagataccgggcccaacgaaggaaccacttctgggaactcattgaggaaagagagaacagcaacccctttgacaacgatgaagaagaggttgtcacctttgagctgggcgagatgttgcttatgcttttggctgcaggtggggacgacgaactaacagactctgaagatgagtgggacttgtttcatgatgagctggaagatttttatgacttggatctatagcaaccttgcgtggcgtgtgaactggtctgctgacctcagacagcagctgtcccctgtggtggtgtggcagtgcctgtgttctctcctaggcaggcctctcaactccaggtgctgtcctaagaatttttacccagggcctgtcttctcaacccctcacctttccctgaggagtgtgttgttttccctgttgaaaaaagttacaaaaataaatcttaaagttagttttttgtaacacgaatttaactgtcagacagttagtgtaggtgtgttgcgtcatctgttttcaaccagattgcatttatggacttttcacacactcattttgaggaccccaggttcaaaagtaaaagcagtggccctgctttggggtccaagaataggagtgatgggtgaagggacctaagctggccaatagccctctgccccagacatgggatgtggatccttgaggtttctggtgaaatctgcacatctgtgtttttatatctgttccctaccctgtaatccctaccacgtgcacttgttctgtggttttggtctcttgtttaattgcacacaagtaatactactgggtaaccagaatcaggtgtgaatgtgttgagattttttactgttttgcatgataggaaaattgagaaagaatacgtataaaagatagagaggcataacatcaatgcagagttggaagttggctcccaagggctgacatggtgtgagtgtgtgggtgtgtgataagcttctcatccctgcatagatgcagtattcttagccttagtagaaaaacctggtttagtggtttaagccttgtgtggcagatagatcttaaagggcaaagcagtatattggtagttgtcaatatagcagtgctagctctgtctatataaatagagaaatggggttagccatagaggttaaaactacctggttatcccatataataacacaaactgggtcttggatacacagttgtatttaatgttttacgatctagcctttccagtacaggcactttctgagaaacctttgtcctcacttgaggcattttgttgtcgggtttttgtgtttgtttttgtgggtatttgcctcattccacccctgagctttcaggtagacagacgtgattcaaaactctgttctaaggtgtttattgtagtggagtaatgggtttgcagtgataagtcatacttttccaccgaaagggagggcttgggaatccctgagattagctaaagttaagttgttggaagaattccttgattggaaattgtacctttgtgttttgttgctctgtttcctgaaaataactcggggatgctcctggtttgtccatctactgctttgattccttggatcccacccattctttcactttaagaaaaaacaaataattgttgcagaggtctctgtattttgcagctgcccttttgtaagaagcacttttcccaaataaaacaattaaaaaaaaagttggctgttc

SEQ ID NO: 7070 - protein, 418 aa, Homo sapiens
MHGVCKEGDNCRYSHDLSDSPYSVVCKYFQRGYCIYGDRCRYEHSKPLKQEEATATELTTKSSLAASSSLSSIVGPLVEMNTGEAESRNSNFATVGAGSEDWVNAIEFVPGQPYCGRTAPSCTEAPLQGSVTKEESEKEQTAVETKKQLCPYAAVGECRYGENCVYLHGDSCDMCGLQVLHPMDAAQRSQHIKSCIEAHEKDMELSFAVQRSKDMVCGICMEVVYEKANPSERRFGILSNCNHTYCLKCIRKWRSAKQFESKIIKSCPECRITSNFVIPSEYWVEEKEEKQKLILKYKEAMSNKACRYFDEGRGSCPFGGNCFYKHAYPDGRREEPQRQKVGTSSRYRAQRRNHFWELIEERENSNPFDNDEEEVVTFELGEMLLMLLAAGGDDELTDSEDEWDLFHDELEDFYDLDL

SEQ ID NO: 7071 - DNA, 3161 bp, Homo sapiens
ctcgcggcccccgctgccgccgcgttcccccagtcactgcgtcaacccccgctgggccgcggagccctcagcgctgtccgcggaggcctggcggtgcgcgattactgcggagccgcggggctgcaccgccgcttacacttccctgagcgctgcctgagctggctgcgagcgcatcggggagaggtgggctggctcctcccctgccgctggaaggatgcccccgccgctgcctccggctcccggggctcgggaggtggtcacttgaggccggtctcccagcgatcctctccgggcctagacaccccgccgagggccccagcgagcttgcctggctcccggccctctcctctctccgtgccatccgtttgtaacgtcttttcacgtccctccgtccctccgccccccatcctccgcccaactgtattttatgcatggggtttgtaaggaaggagacaactgtcgctactcgcatgacctctctgacagtccgtatagtgtagtgtgcaagtattttcagcgagggtactgtatttatggagaccgctgcagatatgaacatagcaaaccattgaaacaggaagaagcaactgctacagagctaactacaaagtcatcccttgctgcttcctcaagtctctcatcgatagttggaccacttgttgaaatgaatacaggcgaagctgagtcaagaaattcaaactttgcaactgtaggagcaggttcagaggactgggtgaatgctattgagtttgttcctgggcaaccctactgtggccgtactgcgccttcctgcactgaagcacccctgcagggctcagtgaccaaggaagaatcagagaaagagcaaaccgccgtggagacaaagaagcagctgtgcccctatgctgcagtgggagagtgccgatacggggagaactgtgtgtatctccacggagattcttgtgacatgtgtgggctgcaggtcctgcatccaatggatgctgcccagagatcgcagcatatcaaatcgtgcattgaggcccatgagaaggacatggagctctcatttgccgtgcagcgcagcaaggacatggtgtgtgggatctgcatggaggtggtctatgagaaagccaaccccagtgagcgccgcttcgggatcctctccaactgcaaccacacctactgtctcaagtgcattcgcaagtggaggagtgctaagcaatttgagagcaagatcataaagtcctgcccagaatgccggatcacatctaactttgtcattccaagtgagtactgggtggaggagaaagaagagaagcagaaactcattctgaaatacaaggaggcaatgagcaacaaggcgtgcaggtattttgatgaaggacgtgggagctgcccatttggagggaactgtttttacaagcatgcgtaccctgatggccgtagagaggagccacagagacagaaagtgggaacatcaagcagataccgggcccaacgaaggaaccacttctgggaactcattgaggaaagagagaacagcaacccctttgacaacgatgaagaagaggttgtcacctttgagctgggcgagatgttgcttatgcttttggctgcaggtggggacgacgaactaacagactctgaagatgagtgggacttgtttcatgatgagctggaagatttttatgacttggatctatagcaaccttgcgtggcgtgtgaactggtctgctgacctcagacagcagctgtcccctgtggtggtgtggcagtgcctgtgttctctcctaggcaggcctctcaactccaggtgctgtcctaagaatttttacccagggcctgtcttctcaacccctcacctttccctgaggagtgtgttgttttccctgttgaaaaaagttacaaaaataaatcttaaagttagttttttgtaacacgaatttaactgtcagacagttagtgtaggtgtgttgcgtcatctgttttcaaccagattgcatttatggacttttcacacactcattttgaggaccccaggttcaaaagtaaaagcagtggccctgctttggggtccaagaataggagtgatgggtgaagggacctaagctggccaatagccctctgccccagacatgggatgtggatccttgaggtttctggtgaaatctgcacatctgtgtttttatatctgttccctaccctgtaatccctaccacgtgcacttgttctgtggttttggtctcttgtttaattgcacacaagtaatactactgggtaaccagaatcaggtgtgaatgtgttgagattttttactgttttgcatgataggaaaattgagaaagaatacgtataaaagatagagaggcataacatcaatgcagagttggaagttggctcccaagggctgacatggtgtgagtgtgtgggtgtgtgataagcttctcatccctgcatagatgcagtattcttagccttagtagaaaaacctggtttagtggtttaagccttgtgtggcagatagatcttaaagggcaaagcagtatattggtagttgtcaatatagcagtgctagctctgtctatataaatagagaaatggggttagccatagaggttaaaactacctggttatcccatataataacacaaactgggtcttggatacacagttgtatttaatgttttacgatctagcctttccagtacaggcactttctgagaaacctttgtcctcacttgaggcattttgttgtcgggtttttgtgtttgtttttgtgggtatttgcctcattccacccctgagctttcaggtagacagacgtgattcaaaactctgttctaaggtgtttattgtagtggagtaatgggtttgcagtgataagtcatacttttccaccgaaagggagggcttgggaatccctgagattagctaaagttaagttgttggaagaattccttgattggaaattgtacctttgtgttttgttgctctgtttcctgaaaataactcggggatgctcctggtttgtccatctactgctttgattccttggatcccacccattctttcactttaagaaaaaacaaataattgttgcagaggtctctgtattttgcagctgcccttttgtaagaagcacttttcccaaataaaacaattaaaaaaaaagttggctgttc

SEQ ID NO: 7072 - protein, 418 aa, Homo sapiens; identical to SEQ ID NO: 7070

SEQ ID NO: 7073 - DNA, 3193 bp, Homo sapiens
gtctcgatctctgcagccctcgcggcccccgctgccgccgcgttcccccagtcactgcgtcaacccccgctgggccgcggagccctcagcgctgtccgcggaggcctggcggtgcgcgattactgcggagccgcggggctgcaccgccgcttacacttccctgagcgctgcctgagctggctgcgagcgcatcggggagagacggagtctcagtggcgtgatcctggttcactgcaacctctgggccccccccaacccactgcgagttcaagcaattctgcctcagcctcccaagtagctgggactacagtaggtaccgctttcaccatgttggtcaggctggtctcaaactcccaacctcagtgtctcatggagacagagtctgcacagtggaaggaacttcagaaataatatatggcccaggttttcaccgaaggcaaactcaacttggggtattttatgcatggggtttgtaaggaaggagacaactgtcgctactcgcatgacctctctgacagtccgtatagtgtagtgtgcaagtattttcagcgagggtactgtatttatggagaccgctgcagatatgaacatagcaaaccattgaaacaggaagaagcaactgctacagagctaactacaaagtcatcccttgctgcttcctcaagtctctcatcgatagttggaccacttgttgaaatgaatacaggcgaagctgagtcaagaaattcaaactttgcaactgtaggagcaggttcagaggactgggtgaatgctattgagtttgttcctgggcaaccctactgtggccgtactgcgccttcctgcactgaagcacccctgcagggctcagtgaccaaggaagaatcagagaaagagcaaaccgccgtggagacaaagaagcagctgtgcccctatgctgcagtgggagagtgccgatacggggagaactgtgtgtatctccacggagattcttgtgacatgtgtgggctgcaggtcctgcatccaatggatgctgcccagagatcgcagcatatcaaatcgtgcattgaggcccatgagaaggacatggagctctcatttgccgtgcagcgcagcaaggacatggtgtgtgggatctgcatggaggtggtctatgagaaagccaaccccagtgagcgccgcttcgggatcctctccaactgcaaccacacctactgtctcaagtgcattcgcaagtggaggagtgctaagcaatttgagagcaagatcataaagtcctgcccagaatgccggatcacatctaactttgtcattccaagtgagtactgggtggaggagaaagaagagaagcagaaactcattctgaaatacaaggaggcaatgagcaacaaggcgtgcaggtattttgatgaaggacgtgggagctgcccatttggagggaactgtttttacaagcatgcgtaccctgatggccgtagagaggagccacagagacagaaagtgggaacatcaagcagataccgggcccaacgaaggaaccacttctgggaactcattgaggaaagagagaacagcaacccctttgacaacgatgaagaagaggttgtcacctttgagctgggcgagatgttgcttatgcttttggctgcaggtggggacgacgaactaacagactctgaagatgagtgggacttgtttcatgatgagctggaagatttttatgacttggatctatagcaaccttgcgtggcgtgtgaactggtctgctgacctcagacagcagctgtcccctgtggtggtgtggcagtgcctgtgttctctcctaggcaggcctctcaactccaggtgctgtcctaagaatttttacccagggcctgtcttctcaacccctcacctttccctgaggagtgtgttgttttccctgttgaaaaaagttacaaaaataaatcttaaagttagttttttgtaacacgaatttaactgtcagacagttagtgtaggtgtgttgcgtcatctgttttcaaccagattgcatttatggacttttcacacactcattttgaggaccccaggttcaaaagtaaaagcagtggccctgctttggggtccaagaataggagtgatgggtgaagggacctaagctggccaatagccctctgccccagacatgggatgtggatccttgaggtttctggtgaaatctgcacatctgtgtttttatatctgttccctaccctgtaatccctaccacgtgcacttgttctgtggttttggtctcttgtttaattgcacacaagtaatactactgggtaaccagaatcaggtgtgaatgtgttgagattttttactgttttgcatgataggaaaattgagaaagaatacgtataaaagatagagaggcataacatcaatgcagagttggaagttggctcccaagggctgacatggtgtgagtgtgtgggtgtgtgataagcttctcatccctgcatagatgcagtattcttagccttagtagaaaaacctggtttagtggtttaagccttgtgtggcagatagatcttaaagggcaaagcagtatattggtagttgtcaatatagcagtgctagctctgtctatataaatagagaaatggggttagccatagaggttaaaactacctggttatcccatataataacacaaactgggtcttggatacacagttgtatttaatgttttacgatctagcctttccagtacaggcactttctgagaaacctttgtcctcacttgaggcattttgttgtcgggtttttgtgtttgtttttgtgggtatttgcctcattccacccctgagctttcaggtagacagacgtgattcaaaactctgttctaaggtgtttattgtagtggagtaatgggtttgcagtgataagtcatacttttccaccgaaagggagggcttgggaatccctgagattagctaaagttaagttgttggaagaattccttgattggaaattgtacctttgtgttttgttgctctgtttcctgaaaataactcggggatgctcctggtttgtccatctactgctttgattccttggatcccacccattctttcactttaagaaaaaacaaataattgttgcagaggtctctgtattttgcagctgcccttttgtaagaagcacttttcccaaataaaacaattaaaaaaaaagttggctgttc

SEQ ID NO: 7074 - protein, 433 aa, Homo sapiens
MAQVFTEGKLNLGYFMHGVCKEGDNCRYSHDLSDSPYSVVCKYFQRGYCIYGDRCRYEHSKPLKQEEATATELTTKSSLAASSSLSSIVGPLVEMNTGEAESRNSNFATVGAGSEDWVNAIEFVPGQPYCGRTAPSCTEAPLQGSVTKEESEKEQTAVETKKQLCPYAAVGECRYGENCVYLHGDSCDMCGLQVLHPMDAAQRSQHIKSCIEAHEKDMELSFAVQRSKDMVCGICMEVVYEKANPSERRFGILSNCNHTYCLKCIRKWRSAKQFESKIIKSCPECRITSNFVIPSEYWVEEKEEKQKLILKYKEAMSNKACRYFDEGRGSCPFGGNCFYKHAYPDGRREEPQRQKVGTSSRYRAQRRNHFWELIEERENSNPFDNDEEEVVTFELGEMLLMLLAAGGDDELTDSEDEWDLFHDELEDFYDLDL

SEQ ID NO: 7075 - DNA, 3099 bp, Homo sapiens
gataaacagtaatggcggaggctgcaactcccggaacaacagccacaacatcaggagcaggagcggcagcggcgacggcggcagcagcctcccccaccccgatccccacagtcaccgccccgtccctgggggcgggcggagggggcggcggcagcgacggcagcggcggcggctggactaaacaggtcacctgcagacggagtctcagtggcgtgatcctggttcactgcaacctctgggccccccccaacccactgcgagttcaagcaattctgcctcagcctcccaagtagctgggactacagtaggtaccgctttcaccatgttggtcaggctggtctcaaactcccaacctcaggtattttatgcatggggtttgtaaggaaggagacaactgtcgctactcgcatgacctctctgacagtccgtatagtgtagtgtgcaagtattttcagcgagggtactgtatttatggagaccgctgcagatatgaacatagcaaaccattgaaacaggaagaagcaactgctacagagctaactacaaagtcatcccttgctgcttcctcaagtctctcatcgatagttggaccacttgttgaaatgaatacaggcgaagctgagtcaagaaattcaaactttgcaactgtaggagcaggttcagaggactgggtgaatgctattgagtttgttcctgggcaaccctactgtggccgtactgcgccttcctgcactgaagcacccctgcagggctcagtgaccaaggaagaatcagagaaagagcaaaccgccgtggagacaaagaagcagctgtgcccctatgctgcagtgggagagtgccgatacggggagaactgtgtgtatctccacggagattcttgtgacatgtgtgggctgcaggtcctgcatccaatggatgctgcccagagatcgcagcatatcaaatcgtgcattgaggcccatgagaaggacatggagctctcatttgccgtgcagcgcagcaaggacatggtgtgtgggatctgcatggaggtggtctatgagaaagccaaccccagtgagcgccgcttcgggatcctctccaactgcaaccacacctactgtctcaagtgcattcgcaagtggaggagtgctaagcaatttgagagcaagatcataaagtcctgcccagaatgccggatcacatctaactttgtcattccaagtgagtactgggtggaggagaaagaagagaagcagaaactcattctgaaatacaaggaggcaatgagcaacaaggcgtgcaggtattttgatgaaggacgtgggagctgcccatttggagggaactgtttttacaagcatgcgtaccctgatggccgtagagaggagccacagagacagaaagtgggaacatcaagcagataccgggcccaacgaaggaaccacttctgggaactcattgaggaaagagagaacagcaacccctttgacaacgatgaagaagaggttgtcacctttgagctgggcgagatgttgcttatgcttttggctgcaggtggggacgacgaactaacagactctgaagatgagtgggacttgtttcatgatgagctggaagatttttatgacttggatctatagcaaccttgcgtggcgtgtgaactggtctgctgacctcagacagcagctgtcccctgtggtggtgtggcagtgcctgtgttctctcctaggcaggcctctcaactccaggtgctgtcctaagaatttttacccagggcctgtcttctcaacccctcacctttccctgaggagtgtgttgttttccctgttgaaaaaagttacaaaaataaatcttaaagttagttttttgtaacacgaatttaactgtcagacagttagtgtaggtgtgttgcgtcatctgttttcaaccagattgcatttatggacttttcacacactcattttgaggaccccaggttcaaaagtaaaagcagtggccctgctttggggtccaagaataggagtgatgggtgaagggacctaagctggccaatagccctctgccccagacatgggatgtggatccttgaggtttctggtgaaatctgcacatctgtgtttttatatctgttccctaccctgtaatccctaccacgtgcacttgttctgtggttttggtctcttgtttaattgcacacaagtaatactactgggtaaccagaatcaggtgtgaatgtgttgagattttttactgttttgcatgataggaaaattgagaaagaatacgtataaaagatagagaggcataacatcaatgcagagttggaagttggctcccaagggctgacatggtgtgagtgtgtgggtgtgtgataagcttctcatccctgcatagatgcagtattcttagccttagtagaaaaacctggtttagtggtttaagccttgtgtggcagatagatcttaaagggcaaagcagtatattggtagttgtcaatatagcagtgctagctctgtctatataaatagagaaatggggttagccatagaggttaaaactacctggttatcccatataataacacaaactgggtcttggatacacagttgtatttaatgttttacgatctagcctttccagtacaggcactttctgagaaacctttgtcctcacttgaggcattttgttgtcgggtttttgtgtttgtttttgtgggtatttgcctcattccacccctgagctttcaggtagacagacgtgattcaaaactctgttctaaggtgtttattgtagtggagtaatgggtttgcagtgataagtcatacttttccaccgaaagggagggcttgggaatccctgagattagctaaagttaagttgttggaagaattccttgattggaaattgtacctttgtgttttgttgctctgtttcctgaaaataactcggggatgctcctggtttgtccatctactgctttgattccttggatcccacccattctttcactttaagaaaaaacaaataattgttgcagaggtctctgtattttgcagctgcccttttgtaagaagcacttttcccaaataaaacaattaaaaaaaaagttggctgttc

SEQ ID NO: 7076 - protein, 418 aa, Homo sapiens; identical to SEQ ID NO: 7070

SEQ ID NO: 7077 - DNA, 2970 bp, Homo sapiens
gaccgaacgggtgcctcagtgtccttcccctcccctcgcctggcctcgccgtcctctccccgcagccggaccggaactatgtgatcccggaagttccggggcctttgctgtgtgggataaacagtaatggcggaggctgcaactcccggaacaacagccacaacatcaggagcaggggcggcggcagcgacggcagcggcggcggctggactaaacaggtcacctgcaggtattttatgcatggggtttgtaaggaaggagacaactgtcgctactcgcatgacctctctgacagtccgtatagtgtagtgtgcaagtattttcagcgagggtactgtatttatggagaccgctgcagatatgaacatagcaaaccattgaaacaggaagaagcaactgctacagagctaactacaaagtcatcccttgctgcttcctcaagtctctcatcgatagttggaccacttgttgaaatgaatacaggcgaagctgagtcaagaaattcaaactttgcaactgtaggagcaggttcagaggactgggtgaatgctattgagtttgttcctgggcaaccctactgtggccgtactgcgccttcctgcactgaagcacccctgcagggctcagtgaccaaggaagaatcagagaaagagcaaaccgccgtggagacaaagaagcagctgtgcccctatgctgcagtgggagagtgccgatacggggagaactgtgtgtatctccacggagattcttgtgacatgtgtgggctgcaggtcctgcatccaatggatgctgcccagagatcgcagcatatcaaatcgtgcattgaggcccatgagaaggacatggagctctcatttgccgtgcagcgcagcaaggacatggtgtgtgggatctgcatggaggtggtctatgagaaagccaaccccagtgagcgccgcttcgggatcctctccaactgcaaccacacctactgtctcaagtgcattcgcaagtggaggagtgctaagcaatttgagagcaagatcataaagtcctgcccagaatgccggatcacatctaactttgtcattccaagtgagtactgggtggaggagaaagaagagaagcagaaactcattctgaaatacaaggaggcaatgagcaacaaggcgtgcaggtattttgatgaaggacgtgggagctgcccatttggagggaactgtttttacaagcatgcgtaccctgatggccgtagagaggagccacagagacagaaagtgggaacatcaagcagataccgggcccaacgaaggaaccacttctgggaactcattgaggaaagagagaacagcaacccctttgacaacgatgaagaagaggttgtcacctttgagctgggcgagatgttgcttatgcttttggctgcaggtggggacgacgaactaacagactctgaagatgagtgggacttgtttcatgatgagctggaagatttttatgacttggatctatagcaaccttgcgtggcgtgtgaactggtctgctgacctcagacagcagctgtcccctgtggtggtgtggcagtgcctgtgttctctcctaggcaggcctctcaactccaggtgctgtcctaagaatttttacccagggcctgtcttctcaacccctcacctttccctgaggagtgtgttgttttccctgttgaaaaaagttacaaaaataaatcttaaagttagttttttgtaacacgaatttaactgtcagacagttagtgtaggtgtgttgcgtcatctgttttcaaccagattgcatttatggacttttcacacactcattttgaggaccccaggttcaaaagtaaaagcagtggccctgctttggggtccaagaataggagtgatgggtgaagggacctaagctggccaatagccctctgccccagacatgggatgtggatccttgaggtttctggtgaaatctgcacatctgtgtttttatatctgttccctaccctgtaatccctaccacgtgcacttgttctgtggttttggtctcttgtttaattgcacacaagtaatactactgggtaaccagaatcaggtgtgaatgtgttgagattttttactgttttgcatgataggaaaattgagaaagaatacgtataaaagatagagaggcataacatcaatgcagagttggaagttggctcccaagggctgacatggtgtgagtgtgtgggtgtgtgataagcttctcatccctgcatagatgcagtattcttagccttagtagaaaaacctggtttagtggtttaagccttgtgtggcagatagatcttaaagggcaaagcagtatattggtagttgtcaatatagcagtgctagctctgtctatataaatagagaaatggggttagccatagaggttaaaactacctggttatcccatataataacacaaactgggtcttggatacacagttgtatttaatgttttacgatctagcctttccagtacaggcactttctgagaaacctttgtcctcacttgaggcattttgttgtcgggtttttgtgtttgtttttgtgggtatttgcctcattccacccctgagctttcaggtagacagacgtgattcaaaactctgttctaaggtgtttattgtagtggagtaatgggtttgcagtgataagtcatacttttccaccgaaagggagggcttgggaatccctgagattagctaaagttaagttgttggaagaattccttgattggaaattgtacctttgtgttttgttgctctgtttcctgaaaataactcggggatgctcctggtttgtccatctactgctttgattccttggatcccacccattctttcactttaagaaaaaacaaataattgttgcagaggtctctgtattttgcagctgcccttttgtaagaagcacttttcccaaataaaacaattaaaaaaaaagttggctgttc

SEQ ID NO: 7078 - protein, 418 aa, Homo sapiens; identical to SEQ ID NO: 7070

SEQ ID NO: 7079 - DNA, 3088 bp, Homo sapiens
cgagagcgctcagatacgcgacgcgtagcaggcggggaccgaacgggtgcctcagtgtccttcccctcccctcgcctggcctcgccgtcctctccccgcagccggaccggaactatgtgatcccggaagttccggggcctttgctgtgtgggataaacagtaatggcggaggctgcaactcccggaacaacagccacaacatcaggagcaggagcggcagcggcgacggcggcagcagcctcccccaccccgatccccacagtcaccgccccgtccctgggggcgggcggagggggcggcggcagcgacggcagcggcggcggctggactaaacaggtcacctgcaggtattttatgcatggggtttgtaaggaaggagacaactgtcgctactcgcatgacctctctgacagtccgtatagtgtagtgtgcaagtattttcagcgagggtactgtatttatggagaccgctgcagatatgaacatagcaaaccattgaaacaggaagaagcaactgctacagagctaactacaaagtcatcccttgctgcttcctcaagtctctcatcgatagttggaccacttgttgaaatgaatacaggcgaagctgagtcaagaaattcaaactttgcaactgtaggagcaggttcagaggactgggtgaatgctattgagtttgttcctgggcaaccctactgtggccgtactgcgccttcctgcactgaagcacccctgcagggctcagtgaccaaggaagaatcagagaaagagcaaaccgccgtggagacaaagaagcagctgtgcccctatgctgcagtgggagagtgccgatacggggagaactgtgtgtatctccacggagattcttgtgacatgtgtgggctgcaggtcctgcatccaatggatgctgcccagagatcgcagcatatcaaatcgtgcattgaggcccatgagaaggacatggagctctcatttgccgtgcagcgcagcaaggacatggtgtgtgggatctgcatggaggtggtctatgagaaagccaaccccagtgagcgccgcttcgggatcctctccaactgcaaccacacctactgtctcaagtgcattcgcaagtggaggagtgctaagcaatttgagagcaagatcataaagtcctgcccagaatgccggatcacatctaactttgtcattccaagtgagtactgggtggaggagaaagaagagaagcagaaactcattctgaaatacaaggaggcaatgagcaacaaggcgtgcaggtattttgatgaaggacgtgggagctgcccatttggagggaactgtttttacaagcatgcgtaccctgatggccgtagagaggagccacagagacagaaagtgggaacatcaagcagataccgggcccaacgaaggaaccacttctgggaactcattgaggaaagagagaacagcaacccctttgacaacgatgaagaagaggttgtcacctttgagctgggcgagatgttgcttatgcttttggctgcaggtggggacgacgaactaacagactctgaagatgagtgggacttgtttcatgatgagctggaagatttttatgacttggatctatagcaaccttgcgtggcgtgtgaactggtctgctgacctcagacagcagctgtcccctgtggtggtgtggcagtgcctgtgttctctcctaggcaggcctctcaactccaggtgctgtcctaagaatttttacccagggcctgtcttctcaacccctcacctttccctgaggagtgtgttgttttccctgttgaaaaaagttacaaaaataaatcttaaagttagttttttgtaacacgaatttaactgtcagacagttagtgtaggtgtgttgcgtcatctgttttcaaccagattgcatttatggacttttcacacactcattttgaggaccccaggttcaaaagtaaaagcagtggccctgctttggggtccaagaataggagtgatgggtgaagggacctaagctggccaatagccctctgccccagacatgggatgtggatccttgaggtttctggtgaaatctgcacatctgtgtttttatatctgttccctaccctgtaatccctaccacgtgcacttgttctgtggttttggtctcttgtttaattgcacacaagtaatactactgggtaaccagaatcaggtgtgaatgtgttgagattttttactgttttgcatgataggaaaattgagaaagaatacgtataaaagatagagaggcataacatcaatgcagagttggaagttggctcccaagggctgacatggtgtgagtgtgtgggtgtgtgataagcttctcatccctgcatagatgcagtattcttagccttagtagaaaaacctggtttagtggtttaagccttgtgtggcagatagatcttaaagggcaaagcagtatattggtagttgtcaatatagcagtgctagctctgtctatataaatagagaaatggggttagccatagaggttaaaactacctggttatcccatataataacacaaactgggtcttggatacacagttgtatttaatgttttacgatctagcctttccagtacaggcactttctgagaaacctttgtcctcacttgaggcattttgttgtcgggtttttgtgtttgtttttgtgggtatttgcctcattccacccctgagctttcaggtagacagacgtgattcaaaactctgttctaaggtgtttattgtagtggagtaatgggtttgcagtgataagtcatacttttccaccgaaagggagggcttgggaatccctgagattagctaaagttaagttgttggaagaattccttgattggaaattgtacctttgtgttttgttgctctgtttcctgaaaataactcggggatgctcctggtttgtccatctactgctttgattccttggatcccacccattctttcactttaagaaaaaacaaataattgttgcagaggtctctgtattttgcagctgcccttttgtaagaagcacttttcccaaataaaacaattaaaaaaaaagttggctgttc

SEQ ID NO: 7080 - protein, 482 aa, Homo sapiens
MAEAATPGTTATTSGAGAAAATAAAASPTPIPTVTAPSLGAGGGGGGSDGSGGGWTKQVTCRYFMHGVCKEGDNCRYSHDLSDSPYSVVCKYFQRGYCIYGDRCRYEHSKPLKQEEATATELTTKSSLAASSSLSSIVGPLVEMNTGEAESRNSNFATVGAGSEDWVNAIEFVPGQPYCGRTAPSCTEAPLQGSVTKEESEKEQTAVETKKQLCPYAAVGECRYGENCVYLHGDSCDMCGLQVLHPMDAAQRSQHIKSCIEAHEKDMELSFAVQRSKDMVCGICMEVVYEKANPSERRFGILSNCNHTYCLKCIRKWRSAKQFESKIIKSCPECRITSNFVIPSEYWVEEKEEKQKLILKYKEAMSNKACRYFDEGRGSCPFGGNCFYKHAYPDGRREEPQRQKVGTSSRYRAQRRNHFWELIEERENSNPFDNDEEEVVTFELGEMLLMLLAAGGDDELTDSEDEWDLFHDELEDFYDLDL

SEQ ID NO: 7081 - DNA, 517 bp, Homo sapiens
gttgaagtggcgagagcgctcagatacgcgacgcgtagcaggcggggaccgaacgggtgcctcagtgtccttcccctcccctcgcctggcctcgccgtcctctccccgcagccggaccggaactatgtgatcccggaagttccggggcctttgctgtgtgggataaacagtaatggcggaggctgcaactcccggaacaacagccacaacatcaggagcaggagcggcagcggcgacggcggcagcagcctcccccaccccgatccccacagtcaccgccccgtccctgggggcgggcggagggggcggcggcagcgacggcagcggcggcggctggactaaacaggtcacctgcaggtattttatgcatggggtttgtaaggaaggagacaactgtcgctactcgcatgacctctctgacagtccgtatagtgtagtgtgcaagtattttcagcgagggtctctgtattttgcagctgcccttttgtaagaagcacttttcccaaataaaacaatt

SEQ ID NO: 7082 - protein, 105 aa, Homo sapiens
MAEAATPGTTATTSGAGAAAATAAAASPTPIPTVTAPSLGAGGGGGGSDGSGGGWTKQVTCRYFMHGVCKEGDNCRYSHDLSDSPYSVVCKYFQRGSLYFAAALL

SEQ ID NO: 7083 - DNA, 1776 bp, Homo sapiens
cgagagcgctcagatacgcgacgcgtagcaggcggggaccgaacgggtgcctcagtgtccttcccctcccctcgcctggcctcgccgtcctctccccgcagccggaccggaactatgtgatcccggaagttccggggcctttgctgtgtgggataaacagtaatggcggaggctgcaactcccggaacaacagccacaacatcaggagcaggagcggcagcggcgacggcggcagcagcctcccccaccccgatccccacagtcaccgccccgtccctgggggcgggcggagggggcggcggcagcgacggcagcggcggcggctggactaaacaggtcacctgcaggtattttatgcatggggtttgtaaggaaggagacaactgtcgctactcgcatgacctctctgacagtccgtatagtgtagtgtgcaagtattttcagcgagggtactgtatttatggagaccgctgcagatatgaacatagcaaaccattgaaacaggaagaagcaactgctacagagctaactacaaagtcatcccttgctgcttcctcaagtctctcatcgatagttggaccacttgttgaaatgaatacaggcgaagctgagtcaagaaattcaaactttgcaactgtaggagcaggttcagaggactgggtgaatgctattgagtttgttcctgggcaaccctactgtggccgtactgcgccttcctgcactgaagcacccctgcagggctcagtgaccaaggaagaatcagagaaagagcaaaccgccgtggagacaaagaagcagctgtgcccctatgctgcagtgggagagtgccgatacggggagaactgtgtgtatctccacggagattcttgtgacatgtgtgggctgcaggtcctgcatccaatggatgctgcccagagatcgcagcatatcaaatcgtgcattgaggcccatgagaaggacatggagctctcatttgccgtgcagcgcagcaaggacatggtgtgtgggatctgcatggaggtggtctatgagaaagccaaccccagtgagcgccgcttcgggatcctctccaactgcaaccacacctactgtctcaagtgcattcgcaagtggaggagtgctaagcaatttgagagcaagatcataaagtgagactcctccccagtcttcatttgtgctttctcttttggggaagaatttagtaacttgtgccaactttcaaccagatggaccgcatttaaatgcatgcattttatcttgaaactgggatattctaatggggatttcttctttgtatttcagctagcttctaggttagttggtctatctacttttatttgaatgaggaaaccctgtgtatcagttagaatcttcgtgctttttctgaggagattgtgtttaatggattattagccagtttaggctcagtgaacaaactgatctagctctgaatgtatgtttcctgacgttttacatttccactttcctattccattcattaagctagccaacaatccaccatcctttaaagattgttctcataactgaacaaaaaccacataatctaaacagagcaaagctacaagaaataaatttatttaaacgaaagaaaaaggagtctgtgtgaaatgtcttcttttgtttttgttttttacctaagttatatttttcaaaaaaaaaaaaaaagaactggctagcccttgagttggatttataaaggaggttgccttgcttgaaagaaatggtcagttgtgtgacagtatgtggaaccctttc

SEQ ID NO: 7084 - protein, 329 aa, Homo sapiens
MAEAATPGTTATTSGAGAAAATAAAASPTPIPTVTAPSLGAGGGGGGSDGSGGGWTKQVTCRYFMHGVCKEGDNCRYSHDLSDSPYSVVCKYFQRGYCIYGDRCRYEHSKPLKQEEATATELTTKSSLAASSSLSSIVGPLVEMNTGEAESRNSNFATVGAGSEDWVNAIEFVPGQPYCGRTAPSCTEAPLQGSVTKEESEKEQTAVETKKQLCPYAAVGECRYGENCVYLHGDSCDMCGLQVLHPMDAAQRSQHIKSCIEAHEKDMELSFAVQRSKDMVCGICMEVVYEKANPSERRFGILSNCNHTYCLKCIRKWRSAKQFESKIIK

SEQ ID NO: 7085 - DNA, 1627 bp, Homo sapiens
gataaacagtaatggcggaggctgcaactcccggaacaacagccacaacatcaggagcaggagcggcagcggcgacggcggcagcagcctcccccaccccgatccccacagtcaccgccccgtccctgggggcgggcggagggggcggcggcagcgacggcagcggcggcggctggactaaacaggtcacctgcagacggagtctcagtggcgtgatcctggttcactgcaacctctgggccccccccaacccactgcgagttcaagcaattctgcctcagcctcccaagtagctgggactacagtaggtaccgctttcaccatgttggtcaggctggtctcaaactcccaacctcaggtattttatgcatggggtttgtaaggaaggagacaactgtcgctactcgcatgacctctctgacagtccgtatagtgtagtgtgcaagtattttcagcgagggtactgtatttatggagaccgctgcagatatgaacatagcaaaccattgaaacaggaagaagcaactgctacagagctaactacaaagtcatcccttgctgcttcctcaagtctctcatcgatagttggaccacttgttgaaatgaatacaggcgaagctgagtcaagaaattcaaactttgcaactgtaggagcaggttcagaggactgggtgaatgctattgagtttgttcctgggcaaccctactgtggccgtactgcgccttcctgcactgaagcacccctgcagggctcagtgaccaaggaagaatcagagaaagagcaaaccgccgtggagacaaagaagcagctgtgcccctatgctgcagtgggagagtgccgatacggggagaactgtgtgtatctccacggagattcttgtgacatgtgtgggctgcaggtcctgcatccaatggatgctgcccagagatcgcagcatatcaaatcgtgcattgaggcccatgagaaggacatggagctctcatttgccgtgcagcgcagcaaggacatggtgtgtgggatctgcatggaggtggtctatgagaaagccaaccccagtgagcgccgcttcgggatcctctccaactgcaaccacacctactgtctcaagtgcattcgcaagtggaggagtgctaagcaatttgagagcaagatcataaagtgagactcctccccagtcttcatttgtgctttctcttttggggaagaatttagtaacttgtgccaactttcaaccagatggaccgcatttaaatgcatgcattttatcttgaaactgggatattctaatggggatttcttctttgtatttcagctagcttctaggttagttggtctatctacttttatttgaatgaggaaaccctgtgtatcagttagaatcttcgtgctttttctgaggagattgtgtttaatggattattagccagtttaggctcagtgaacaaactgatctagctctgaatgtatgtttcctgacgttttacatttccactttcctattccattcattaagctagccaacaatccaccatcctttaaagattgttctcataactgaacaaaaaccacataatctaaacagagcaaagctacaagaaataaatttatttaaacgaaagaaaaagg

SEQ ID NO: 7086 - protein, 265 aa, Homo sapiens
MHGVCKEGDNCRYSHDLSDSPYSVVCKYFQRGYCIYGDRCRYEHSKPLKQEEATATELTTKSSLAASSSLSSIVGPLVEMNTGEAESRNSNFATVGAGSEDWVNAIEFVPGQPYCGRTAPSCTEAPLQGSVTKEESEKEQTAVETKKQLCPYAAVGECRYGENCVYLHGDSCDMCGLQVLHPMDAAQRSQHIKSCIEAHEKDMELSFAVQRSKDMVCGICMEVVYEKANPSERRFGILSNCNHTYCLKCIRKWRSAKQFESKIIK

SEQ ID NO: 7087 - DNA, 1616 bp, Homo sapiens
cgagagcgctcagatacgcgacgcgtagcaggcggggaccgaacgggtgcctcagtgtccttcccctcccctcgcctggcctcgccgtcctctccccgcagccggaccggaactatgtgatcccggaagttccggggcctttgctgtgtgggataaacagtaatggcggaggctgcaactcccggaacaacagccacaacatcaggagcaggagcggcagcggcgacggcggcagcagcctcccccaccccgatccccacagtcaccgccccgtccctgggggcgggcggagggggcggcggcagcgacggcagcggcggcggctggactaaacaggtcacctgcaggtattttatgcatggggtttgtaaggaaggagacaactgtcgctactcgcatgacctctctgacagtccgtatagtgtagtgtgcaagtattttcagcgagggtactgtatttatggagaccgctgcagatatgaacatagcaaaccattgaaacaggaagaagcaactgctacagagctaactacaaagtcatcccttgctgcttcctcaagtctctcatcgatagttggaccacttgttgaaatgaatacaggcgaagctgagtcaagaaattcaaactttgcaactgtaggagcaggttcagaggactgggtgaatgctattgagtttgttcctgggcaaccctactgtggccgtactgcgccttcctgcactgaagcacccctgcagggctcagtgaccaaggaagaatcagagaaagagcaaaccgccgtggagacaaagaagcagctgtgcccctatgctgcagtgggagagtgccgatacggggagaactgtgtgtatctccacggagattcttgtgacatgtgtgggctgcaggtcctgcatccaatggatgctgcccagagatcgcagcatatcaaatcgtgcattgaggcccatgagaaggacatggagctctcatttgccgtgcagcgcagcaaggacatggtgtgtgggatctgcatggaggtggtctatgagaaagccaaccccagtgagcgccgcttcgggatcctctccaactgcaaccacacctactgtctcaagtgcattcgcaagtggaggagtgctaagcaatttgagagcaagatcataaagtgagactcctccccagtcttcatttgtgctttctcttttggggaagaatttagtaacttgtgccaactttcaaccagatggaccgcatttaaatgcatgcattttatcttgaaactgggatattctaatggggatttcttctttgtatttcagctagcttctaggttagttggtctatctacttttatttgaatgaggaaaccctgtgtatcagttagaatcttcgtgctttttctgaggagattgtgtttaatggattattagccagtttaggctcagtgaacaaactgatctagctctgaatgtatgtttcctgacgttttacatttccactttcctattccattcattaagctagccaacaatccaccatcctttaaagattgttctcataactgaacaaaaaccacataatctaaacagagcaaagctacaagaaataaatttatttaaacgaaagaaaaagg

SEQ ID NO: 7088 - protein, 329 aa, Homo sapiens; identical to SEQ ID NO: 7084

SEQ ID NO: 7089 - DNA, 1403 bp, Homo sapiens
gagcgctcagatacgcgacgcgtagcaggcggggaccgaacgggtgcctcagtgtccttcccctcccctcgcctggcctcgccgtcctctccccgcagccggaccggaactatgtgatcccggaagttccggggcctttgctgtgtgggataaacagtaatggcggaggctgcaactcccggaacaacagccacaacatcaggagcaggagcggcagcggcgacggcggcagcagcctcccccaccccgatccccacagtcaccgccccgtccctgggggcgggcggagggggcggcggcagcgacggcagcggcggcggctggactaaacaggtcacctgcaggtattttatgcatggggtttgtaaggaaggagacaactgtcgctactcgcatgacctctctgacagtccgtatagtgtagtgtgcaagtattttcagcgagggtactgtatttatggagaccgctgcagatatgaacatagcaaaccattgaaacaggaagaagcaactgctacagagctaactacaaagtcatcccttgctgcttcctcaagtctctcatcgatagttggaccacttgttgaaatgaatacaggcgaagctgagtcaagaaattcaaactttgcaactgtaggagcaggttcagaggactgggtgaatgctattgagtttgttcctgggcaaccctactgtggccgtactgcgccttcctgcactgaagcacccctgcagggctcagtgaccaaggaagaatcagagaaagagcaaaccgccgtggagacaaagaagcagctgtgcccctatgctgcagtgggagaaaagccaaccccagtgagcgccgcttcgggatcctctccaactgcaaccacacctactgtctcaagtgcattcgcaagtggaggagtgctaagcaatttgagagcaagatcataaagtgagactcctccccagtcttcatttgtgctttctcttttggggaagaatttagtaacttgtgccaactttcaaccagatggaccgcatttaaatgcatgcattttatcttgaaactgggatattctaatggggatttcttctttgtatttcagctagcttctaggttagttggtctatctacttttatttgaatgaggaaaccctgtgtatcagttagaatcttcgtgctttttctgaggagattgtgtttaatggattattagccagtttaggctcagtgaacaaactgatctagctctgaatgtatgtttcctgacgttttacatttccactttcctattccattcattaagctagccaacaatccaccatcctttaaagattgttctcataactgaacaaaaaccacataatctaaacagagcaaagctacaagaaataaatttatttaaacgaaagaaaaa

SEQ ID NO: 7090 - protein, 258 aa, Homo sapiens
MAEAATPGTTATTSGAGAAAATAAAASPTPIPTVTAPSLGAGGGGGGSDGSGGGWTKQVTCRYFMHGVCKEGDNCRYSHDLSDSPYSVVCKYFQRGYCIYGDRCRYEHSKPLKQEEATATELTTKSSLAASSSLSSIVGPLVEMNTGEAESRNSNFATVGAGSEDWVNAIEFVPGQPYCGRTAPSCTEAPLQGSVTKEESEKEQTAVETKKQLCPYAAVGEKPTPVSAASGSSPTATTPTVSSAFASGGVLSNLRARS

SEQ ID NO: 7091 - DNA, 5299 bp, Homo sapiens
atggagggaagaatcagcagagcagcatctccaagcatcagcatctgggttccaggaaaagagactgatcaggagtcaggcttcagaaggagtcccctggaaggcctccacaacctcacgctagagtcaagaatggatatgttcagcttggatatgatcatcagtgacccagctgcagaagccagcagggctgggaagaagcagctcagaggtgttcagaacccttgcccatctgccagagccagaccccggcacaagtccctcaacataaaggacaagatatcagaatgggaagggaagaaagaggtgcccactcctgcacccagcaggagagcagacggacaggaggattatctgccgtcctctacggtggagaggaggagtagtgatggggtgagaactcaggtcacagaggctaagaatggaatgaggccaggaacagagagcacagagaaggagaggaataaaggagcagtgaacgtcgggggacaggacccagagccggggcaagacctaagccagccagaacgggaagtggatcctagctggggccgaggccgagagccaagacttggcaagctacgctttcagaacgatcccctctccgtgctgaagcaggtcaagaaactcgagcaggctttgaaggatgggtcggcagggctggatccccagttaccagggacttgttactccccacactgccctcctgacaaggcagaggcagggtccacccttcctgagaacctgggaggcgggagtggctcagaagtcagccagagggtccacccctcggacctggaaggcagggagcccacccctgagcttgtggaggacaggaaaggttcatgcagaaggccctgggaccggagccttgagaacgtgtataggggctcggagggttcccccacaaagcccttcatcaaccctctgccaaaaccccggagaacgttcaaacatgccggagaaggggacaaagatgggaagcctggcatcggcttcaggaaagagaaaagaaatctgcctcctctgccctctctacctcccccgcctctgccctcctctcccccaccttcctctgtgaacagaagactgtggaccgggagacagaaatccagtgcagaccacagaaagtcctatgagtttgaagatttactgcagtcttcctctgagagcagcagggtggactggtacgcgcagactaagctggggctgacacgcactttatcggaggagaacgtctatgaagacattctagatccgccaatgaaggagaacccttatgaggacatcgagttacatggtcgctgcctgggaaagaagtgtgtcttgaattttcctgcttctcccacctcttccatccctgacacactcaccaagcagtcattgtccaaacctgcttttttccgacaaaattcagagaggaggaacttcaagctgctggacactaggaagctgagtcgggatggaactgggtccccttccaaaatcagccctccctccactcccagcagccctgatgacattttctttaaccttggagacccacagaacggcaggaagaagagaaagatacccaagctggtgttgcgaatcaacgccatttatgaggtccggagaggaaagaaacgggtgaagaggctgtcccagtcaatggagagcaactcaggaaaagtgacagatgagaacagtgagtctgacagtgacacagaggagaagctgaaagctcacagccagcgcctggtcaacgtgaagtcccggctgaagcaggcgcctcggtacccatcacttgcccgggaactcatcgagtaccaggagaggcagctcttcgagtactttgtggttgtgtctttgcacaagaagcaggccggggctgcctacgtgccagaactcacccaacagttccctctgaagttggaaaggtctttcaagttcatgagagaagctgaggaccaactgaaggccattccccagttctgttttcccgatgccaaggattgggttcctgtccagcagttcaccagtgaaacattctcatttgtcttaactggagaagatgggagcagaaggttcggttactgccgaagactgctgcctggaggcaaagggaagcgccttcctgaagtttactgcattgtgagccgcctgggatgcttcagcctcttttcaaggatcttggatgaggtggaaaaaagacgaggcatctctcctgccctggttcagccactcatgagaagtgtcatggaagcccctttcccagccctgggcaaaaccatccttgtcaagaacttcctgccaggttcaggaactgaggtgatcgaactgtgccgcccgctggactcccggctcgagcacgtggactttgagtctctcttctcctccctcagcgtccgccacctggtctgtgtgtttgcctccctgcttctggagaggagggtcatcttcattgcagacaagctcagcatcctgtccaagtgctgccacgcgatggtggcgctgatctaccccttcgcctggcagcacacctacatcccggtgctgccacccgccatggtcgacatcgtgtgctcgccgacgcccttcctcatcgggctgctctccagctcgctgccactgctcagggagctgccgctggaagaggtccttgtggttgacctcgtcaacagccggttcctcagacagatggacgatgaggactccatcctgccccggaagcttcaggtggccctggaacacattctggaacagaggaacgagctggcttgtgagcaggacgaagggcccctagacggcaggcacggtccagagtccagccccttgaacgaggtggtgtctgaagcctttgtccgcttcttcgtggagattgtgggacactactctttgttcctgacgtcgggcgagcgtgaggagagaaccctgcagcgggaggccttccgcaaagctgtctcctccaagagcctccgccacttcctggaggtcttcatggagactcagatgtttcggggcttcatccaggagcgggagctgcgccggcaggatgccaaaggtctgtttgaggtccgagcccaagagtatctggaaacactccccagtggagagcacagcggtgtcaataagttcctgaagggactaggcaataaaatgaaatttctccacaagaaataactctcagcctcaagggaaaacttcctcctagtgcagccctatgctttaaaaacagttcctggtggcctttctgaaaggctgggtcccaggttgtcacggtgcggaactggaggccgcggtggcttctggccgaggctgggctcttccctggatgaggacctgggagccgcctgggaggacagccccagaaagggagcccgagaccaggcgtgtcgccgacatgcaaatgggttgttttggtggttgggtttttttttttatcttagatattaaaagtaagaaaaatgtgtgggttttctgtttattatgccaaggccaagaggagcctgtcctgccctacacgttcccctcgttcgtcccatccggccgctcagcaatggagctaagaggagtggtgatgggcaacagaaatgaggtgctcctcggagcgggactgacgacacatgaggactgtgaggggaggaggcggagccggtgcctcgggttcagggagtgaggcctcctagtgaaaggctgggcccttgccctagagtggaggctagggaggaacgggagctgtagacggatgtggcttcccagacacgctgctcttccagaagggacagtgatgccacctggtggccgaggccatggacgtctctcttcccaaatggacctgactcttcttgactgccttgttctcttagaagaagccatggaactgtccactgcctgagtagtccctggcttttagaggcacacacacaaaaagaggtcagtaaactgttctaggggtcttcaagtttacgacactgctcacggcccaccttccaacacatagccacaactttgaccccgttcccatctcattccaggggcccagagcagcattaatgcaatagtggatgtgcactgcctgtacacggtggggggcggggggaccttttgcggctgatggtaacaagatggagggtgagaacgctggggcggcgtcatgagccgtgtgcagccagagaggcagcttgcgttttctggaccagaagcagggagggtgtggagaaggccaaaaacctcagggcgacctaagagctgtcctgcagcggggacagtggggacagcagggacagcggggaggcaggaaaagccccgaacacagctgaggcaggttctcagagcaagcctcagggccactaccaggtgacccctgccctcagctctcaccagcgaccctcacagaaacacaaaagggaggggcgccgacctcaacaatggcccagaggggccatactgcctggcaggggttctcaacctttagggagcgggagcaaggggccttccgaggataaatagaaatgaggaaaatgaggggaggtgacctctcatccttcctcttagctggagttatggaccccctcgcccctccaagttctacccaggctttggtgtgtccattactttttcagaggtgaagatccacagtttacatcaaattctcaaagatgctcccagaatggtagaaaccaggctgtgcataaaaattaacctgcctggccgggcgcaatggctcatgcctataatcccagcactttgagaggccaaggcaggcaggtggatcacctgaggtcaggagttcaagatcagcctggccaacatggcaaaaccccatctgtactaaaaatacaagaaaaacttagccgggcatcgtggtgcgtgcctgtaatcccaactacctggaaggctgaggcagaagaatcgcttgaactggggaggagaaggttgcagtgagccgagatcatgccactgcactccagcctggacaacagagcaagactccttctcaaaaaaactctggctgggtgtgtgtgggtggggactagggggatgcctgaatgagaatccctgaatccttgagtgtgggggttcaggaatatgtatctaacaagctccttggattagtcaagtttgtgtgtgggctcaggaatatatgtatctagcaagctcctcagactagtcaactttcttaatagtctgcatatttgtatattgcccagaaagggacactttttggaatatactttctttttttaacttatttcgcattatattgtttacttaataactccaagcaaataaatgtacatctttatcaacattccca

SEQ ID NO: 7092 - protein, 1053 aa, Homo sapiens
MEGRISRAASPSISIWVPGKETDQESGFRRSPLEGLHNLTLESRMDMFSLDMIISDPAAEASRAGKKQLRGVQNPCPSARARPRHKSLNIKDKISEWEGKKEVPTPAPSRRADGQEDYLPSSTVERRSSDGVRTQVTEAKNGMRPGTESTEKERNKGAVNVGGQDPEPGQDLSQPEREVDPSWGRGREPRLGKLRFQNDPLSVLKQVKKLEQALKDGSAGLDPQLPGTCYSPHCPPDKAEAGSTLPENLGGGSGSEVSQRVHPSDLEGREPTPELVEDRKGSCRRPWDRSLENVYRGSEGSPTKPFINPLPKPRRTFKHAGEGDKDGKPGIGFRKEKRNLPPLPSLPPPPLPSSPPPSSVNRRLWTGRQKSSADHRKSYEFEDLLQSSSESSRVDWYAQTKLGLTRTLSEENVYEDILDPPMKENPYEDIELHGRCLGKKCVLNFPASPTSSIPDTLTKQSLSKPAFFRQNSERRNFKLLDTRKLSRDGTGSPSKISPPSTPSSPDDIFFNLGDPQNGRKKRKIPKLVLRINAIYEVRRGKKRVKRLSQSMESNSGKVTDENSESDSDTEEKLKAHSQRLVNVKSRLKQAPRYPSLARELIEYQERQLFEYFVVVSLHKKQAGAAYVPELTQQFPLKLERSFKFMREAEDQLKAIPQFCFPDAKDWVPVQQFTSETFSFVLTGEDGSRRFGYCRRLLPGGKGKRLPEVYCIVSRLGCFSLFSRILDEVEKRRGISPALVQPLMRSVMEAPFPALGKTILVKNFLPGSGTEVIELCRPLDSRLEHVDFESLFSSLSVRHLVCVFASLLLERRVIFIADKLSILSKCCHAMVALIYPFAWQHTYIPVLPPAMVDIVCSPTPFLIGLLSSSLPLLRELPLEEVLVVDLVNSRFLRQMDDEDSILPRKLQVALEHILEQRNELACEQDEGPLDGRHGPESSPLNEVVSEAFVRFFVEIVGHYSLFLTSGEREERTLQREAFRKAVSSKSLRHFLEVFMETQMFRGFIQERELRRQDAKGLFEVRAQEYLETLPSGEHSGVNKFLKGLGNKMKFLHKK

SEQ ID NO: 7093 - DNA, 966 bp, Homo sapiens
cagggtctagctcttgttgccaaggttagagtgcagtggtgcaatcatggctcactgcagcctcaaactcctgggctcaaatgattatctcacctcagcctcccgagtagctgggactacaagtacgtgtcaccacatctggctaatttttttattttttattgagatgggatctcactatgttgctcaggctgggaggaaatttagatccttaaagctcttccccgcatcctaccttcagaagccgggccctgaatgaaaggaatcacaaacatgcaaacctacttaatcctaggttaaaatcctgaagggctgttaaggtaaatcattccctcatctgcagctttgcggaaaaactccagttttgctaagtactggagatcagaaacagaataatcatcacaggtagtaagcactcaaaaaagtacatgaagcaggtaacaagagtgatgttcatccaccacatgtaaattcaaatttctaattcaataacagtcctgtgagtagaaaaaagaacaatttctgtcattgggggaaaaatcaactaaaatggaacagagagtattatataaatctatagtttatataggctgtggcagtaaaattgttttgaagccttgcttaaatcagtggatctgggtttaatactacaaagtagtagaggttcaagtgagtgggcaagaccaggcgcagtggctcaggcctgtaatcccagcactttgggagccaaaactagtatttgtaatatacaaaaagtccttatgaatcataagaaaagcccaacctaattgcacaagatccaacactgtaacagccaattcacaaatataaacaaacagtaactgacatttaacttcactgaataattaagacacggtataaccaattctaacaatgttttacctattggactgaagattaagattgataatattgtgttgagaatataggtaaacagacattcca

SEQ ID NO: 7094 - protein, 70 aa, Homo sapiens
MAHCSLKLLGSNDYLTSASRVAGTTSTCHHIWLIFLFFIEMGSHYVAQAGRKFRSLKLFPASYLQKPGPE

SEQ ID NO: 7095 - DNA, 2652 bp, Homo sapiens
ctgctcgctccatgttgccgcctctcccggtacctgctgctgctcccggggctgcgggaaatgcgagaggctgagccggggaggaggaacccgagcagcagcggcggcggcggcggccgcggcggcgggagccccccaggaggaggaccgggatccatgtgtctttcctggtgactaggatgtcgtcggaggaggacaagagcgtggagcagccgcagccgccgccaccaccccccgaggagcctggagccccggccccgagccccgcagccgcagacaaaagacctcggggccggcctcgcaaagatggcgcttcccctttccagagagccagaaagaaacctcgaagtagggggaaaactgcagtggaagatgaggacagcatggatgggctggagacaacagaaacagaaacgattgtggaaacagaaatcaaagaacaatctgcagaagaggatgctgaagcagaagtggataacagcaaacagctaattccaactcttcagcgatctgtgtctgaggaatcggcaaactccctggtctctgttggtgtagaagccaaaatcagtgaacagctctgcgctttttgttactgtggggaaaaaagttccttaggacaaggagacttaaaacaattcagaccgtgggcagctctgctatgactataagtttgactttgaagatgaccagcacaagattccgtgtcactgtggagctgtgaactgccggaagtggatgaactgaaatgcattccttgctagctcagcgggcggcttgtccctaggaagaggcgattcaacacaccattggaattttgcagacagaaagagatttttgttttctgttttatgactttttgaaaaagcttctgggagttctgatttcctcagtcctttaggttaaagcagcgccaggaggaagctgacagaagcagcgttcctgaagtggccgaggttaaacggaatcacagaatggtccagcacttttgcttttttttcttttccttttcttttttttttgtttgttttttgttttgtttttcccttgtgggtgggtttcattgttttggttttctagtctcactaaggagaaacttttactggggcaaagagccgatggctgccctgccccgggcaggggccttcctatgaatgtaagactgaaatcaccagcgagggggacagagagtgctggccacggccttattaaaaaggggcaggccctctaacttcaaaatgtttttaaataaagtagacaccactgaacaaggaatgtactgaaatgacttccttagggatagagctaagggataataacttgcactaaatacatttaaatacttgattccatgagtcagtttattgtagtttttgatttctgtaaaataagagaaacttttgtatttattattgaataagtgaatgaagctatttttaaataaagttagaagaaagccaagctgctgctgttacctgcagaactaacaaaccctgttactttgtacagatatgtaaatattttgagaaaaaatacagtataaaaatagttattgaccaaatgctaccaggctctgcagcagctcgggggcttataaaatgttcatagggatgttacaatataattttgtgttataaaatatgccattataattatgtaataaccaaaatttcaacctagagtgttgggggttttttggaaaccgcagtctattagtactcaatggttttatacaccttacttctgacagagcggggcgtatgctacgactacaacttttatagctgttttggtaatttaaactaattttttcatattatattgttgcatccctacttcttcagtcaggtttttttgtgcttacaatttgtgataactgtgaataactgcttaaaaatacacccaaatggaggctgaattttttcttcagcaaaagtagttttgattagaactttgtttcagccacagagaatcatgtaaacgtaataggatcatgtagcagaaacttaaatctaaccctttagccttctatttaacacaaaaatttgaaaaagttaaaaaaaaaaaggagatgtgattatgcttacagctgcaggactctggcaatagggtttttggaagatgtaattttaaaatgtgtttgtatgaactgtttgtttacatttctttaataaaaaaaacactgttttgtgtttgcttgtagaaacttaatcagcattttgaaccaggttagctttttattttgtacttaaaattctggtactgacacttcacaggctaagtataaaatgaagttttgtgtgcacaattcaagtggactgtaaactgttggtatattcagtgatgcagttctgaacttgtatatggcatgatgtatttttatcttacagaataaatcaattgtatatatttttctcttgataaatagctgtatgaaatttgtttcctgaatatttttcttctcttgtacaatatcctgacatcctaccagtatttgtcctaccgggtttttgttgttttctgttctgtataatagtatctaatgttggcaaaaattgaattttttgaagtatacagagtgttatgggttttggaatttgtggacacagatttagaagatcaccatttacaaataaaatattttacatctataag

SEQ ID NO: 7096 - protein, 160 aa, Homo sapiens
MSSEEDKSVEQPQPPPPPPEEPGAPAPSPAAADKRPRGRPRKDGASPFQRARKKPRSRGKTAVEDEDSMDGLETTETETIVETEIKEQSAEEDAEAEVDNSKQLIPTLQRSVSEESANSLVSVGVEAKISEQLCAFCYCGEKSSLGQGDLKQFRPWAALL

SEQ ID NO: 7097 - DNA, 16824 bp, Homo sapiens
cctgctcgctccatgttgccgcctctcccggtacctgctgctgctcccggggctgcgggaaatgcgagaggctgagccggggaggaggaacccgagcagcagcggcggcggcggcggccgcggcggcgggagccccccaggaggaggaccgggatccatgtgtctttcctggtgactaggatgtcgtcggaggaggacaagagcgtggagcagccgcagccgccgccaccaccccccgaggagcctggagccccggccccgagccccgcagccgcagacaaaagacctcggggccggcctcgcaaagatggcgcttcccctttccagagagccagaaagaaacctcgaagtagggggaaaactgcagtggaagatgaggacagcatggatgggctggagacaacagaaacagaaacgattgtggaaacagaaatcaaagaacaatctgcagaagaggatgctgaagcagaagtggataacagcaaacagctaattccaactcttcagcgatctgtgtctgaggaatcggcaaactccctggtctctgttggtgtagaagccaaaatcagtgaacagctctgcgctttttgttactgtggggaaaaaagttccttaggacaaggagacttaaaacaattcagaataacgcctggatttatcttgccatggagaaaccaaccttctaacaagaaggacattgatgacaacagcaatggaacctatgagaaaatgcaaaactcagcaccacgaaaacaaagaggacagagaaaagaacgatctcctcagcagaatatagtatcttgtgtaagtgtaagcacccagacagcttcagatgatcaagctggtaaactgtgggatgaactcagtctggttgggcttccagatgccattgatatccaagccttatttgattctacaggcacttgttgggctcatcaccgttgtgtggagtggtcactaggagtatgccagatggaagaaccattgttagtgaacgtggacaaagctgttgtctcagggagcacagaacgatgtgcattttgtaagcaccttggagccactatcaaatgctgtgaagagaaatgtacccagatgtatcattatccttgtgctgcaggagccggcacctttcaggatttcagtcacatcttcctgctttgtccagaacacattgaccaagctcctgaaagatcgaaggaagatgcaaactgtgcagtgtgcgacagcccgggagacctcttagatcagttcttttgtactacttgtggtcagcactatcatggaatgtgcctggatatagcggttactccattaaaacgtgcaggttggcaatgtcctgagtgcaaagtgtgccagaactgcaaacaatcgggagaagatagcaagatgctagtgtgtgatacgtgtgacaaagggtatcatactttttgtcttcaaccagttatgaaatcagtaccaaccaatggctggaaatgcaaaaattgcagaatatgtatagagtgtggcacacggtctagttctcagtggcaccacaattgcctgatatgtgacaattgttaccaacagcaggataacttatgtcccttctgtgggaagtgttatcatccagaattgcagaaagacatgcttcattgtaatatgtgcaaaaggtgggttcacctagagtgtgacaaaccaacagatcatgaactggatactcagctcaaagaagagtatatctgcatgtattgtaaacacctgggagctgagatggatcgtttacagccaggtgaggaagtggagatagctgagctcactacagattataacaatgaaatggaagttgaaggccctgaagatcaaatggtattctcagagcaggcagctaataaagatgtcaacggtcaggagtccactcctggaattgttccagatgcggttcaagtccacactgaagagcaacagaagagtcatccctcagaaagtcttgacacagatagtcttcttattgctgtatcatcccaacatacagtgaatactgaattggaaaaacagatttctaatgaagttgatagtgaagacctgaaaatgtcttctgaagtgaagcatatttgtggcgaagatcaaattgaagataaaatggaagtgacagaaaacattgaagtcgttacacaccagatcactgtgcagcaagaacaactgcagttgttagaggaacctgaaacagtggtatccagagaagaatcaaggcctccaaaattagtcatggaatctgtcactcttccactagaaaccttagtgtccccacatgaggaaagtatttcattatgtcctgaggaacagttggttatagaaaggctacaaggagaaaaggaacagaaagaaaattctgaactttctactggattgatggactctgaaatgactcctacaattgagggttgtgtgaaagatgtttcataccaaggaggcaaatctataaagttatcatctgagacagagtcatcattttcatcatcagcagacataagcaaggcagatgtgtcttcctccccaacaccttcttcagacttgccttcgcatgacatgctgcataattacccttcagctcttagttcctctgctggaaacatcatgccaacaacttacatctcagtcactccaaaaattggcatgggtaaaccagctattactaagagaaaattttctcctggtagacctcggtccaaacagggggcttggagtacccataatacagtgagcccaccttcctggtccccagacatttcagaaggtcgggaaatttttaaacccaggcagcttcctggcagtgccatttggagcatcaaagtgggccgtgggtctggatttccaggaaagcggagacctcgaggtgcaggactgtcggggcgaggtggccgaggcaggtcaaagctgaaaagtggaatcggagctgttgtattacctggggtgtctactgcagatatttcatcaaataaggatgatgaagaaaactctatgcacaatacagttgtgttgttttctagcagtgacaagttcactttgaatcaggatatgtgtgtagtttgtggcagttttggccaaggagcagaaggaagattacttgcctgttctcagtgtggtcagtgttaccatccatactgtgtcagtattaagatcactaaagtggttcttagcaaaggttggaggtgtcttgagtgcactgtgtgtgaggcctgtgggaaggcaactgacccaggaagactcctgctgtgtgatgactgtgacataagttatcacacctactgcctagaccctccattgcagacagttcccaaaggaggctggaagtgcaaatggtgtgtttggtgcagacactgtggagcaacatctgcaggtctaagatgtgaatggcagaacaattacacacagtgcgctccttgtgcaagcttatcttcctgtccagtctgctatcgaaactatagagaagaagatcttattctgcaatgtagacaatgtgatagatggatgcatgcagtttgtcagaacttaaatactgaggaagaagtggaaaatgtagcagacattggttttgattgtagcatgtgcagaccctatatgcctgcgtctaatgtgccttcctcagactgctgtgaatcttcacttgtagcacaaattgtcacaaaagtaaaagagctagacccacccaagacttatacccaggatggtgtgtgtttgactgaatcagggatgactcagttacagagcctcacagttacagttccaagaagaaaacggtcaaaaccaaaattgaaattgaagattataaatcagaatagcgtggccgtccttcagacccctccagacatccaatcagagcattcaagggatggtgaaatggatgatagtcgagaaggagaacttatggattgtgatggaaaatcagaatctagtcctgagcgggaagctgtggatgatgaaactaagggagtggaaggaacagatggtgtcaaaaagagaaaaaggaaaccatacagaccaggtattggtggatttatggtgcggcaaagaagtcgaactgggcaagggaaaaccaaaagatctgtgatcagaaaagattcctcaggctctatttccgagcagttaccttgcagagatgatggctggagtgagcagttaccagatactttagttgatgaatctgtttctgttactgaaagcactgaaaaaataaagaagagataccgaaaaaggaaaaataagcttgaagaaactttccctgcctatttacaagaagctttctttggaaaagatcttctagatacaagtagacaaagcaagataagtttagataatctgtcagaagatggagctcagcttttatataaaacaaacatgaacacaggtttcttggatccttccttagatccactacttagttcatcctcggctccaacaaaatctggaactcacggtcctgctgatgacccattagctgatatttctgaagttttaaacacagatgatgacattcttggaataatttcagatgatctagcaaaatcagttgatcattcagatattggtcctgtcactgatgatccttcctctttgcctcagccaaatgtcaatcagagttcacgaccattaagtgaagaacagctagatgggatcctcagtcctgaactagacaaaatggtcacagatggagcaattcttggaaaattatataaaattccagagcttggcggaaaagatgttgaagacttatttacagctgtacttagtcctgcgaacactcagccaactccattgccacagcctcccccaccaacacagctgttgccaatacacaatcaggatgctttttcacggatgcctctcatgaatggccttattggatccagtcctcatctcccacataattctttgccacctggaagcggactgggaactttctctgcaattgcacaatcctcttatcctgatgccagggataaaaattcagcctttaatccaatggcaagtgatcctaacaactcttggacatcatcagctcccactgtggaaggagaaaatgacacaatgtcgaatgcccagagaagcacgcttaagtgggagaaagaggaggctctgggtgaaatggcaactgttgccccagttctctacaccaatattaatttccccaacttaaaggaagaattccctgattggactactagagtgaagcaaattgccaaattgtggagaaaagcaagctcacaagaaagagcaccatatgtgcaaaaagccagagataacagagctgctttacgcattaataaagtacagatgtcaaatgattccatgaaaaggcagcaacagcaagatagcattgatcccagctctcgtattgattcggagctttttaaagatcctttaaagcaaagagaatcagaacatgaacaggaatggaaatttagacagcaaatgcgtcagaaaagtaagcagcaagctaaaattgaagccacacagaaacttgaacaggtgaaaaatgagcagcagcagcagcaacaacagcaatttggttctcagcatcttctggtgcagtctggttcagatacaccaagtagtgggatacagagtcccttgacacctcagcctggcaatggaaatatgtctcctgcacagtcattccataaagaactgtttacaaaacagccacccagtacccctacgtctacatcttcagatgatgtgtttgtaaagccacaagctccacctcctcctccagccccatcccggattcccatccaggatagtctttctcaggctcagacttctcagccaccctcaccgcaagtgttttcacctgggtcctctaactcacgaccaccatctccaatggatccatatgcaaaaatggttggtacccctcgaccacctcctgtgggccatagtttttccagaagaaattctgctgcaccagtggaaaactgtacacctttatcatcggtatctaggccccttcaaatgaatgagacaacagcaaataggccatcccctgtcagagatttatgttcttcttccacgacaaataatgacccctatgcaaaacctccagacacacctaggcctgtgatgacagatcaatttcccaaatccttgggcctatcccggtctcctgtagtttcagaacaaactgcaaaaggccctatagcagctggaaccagtgatcactttactaaaccatctcctagggcagatgtgtttcaaagacaaaggatacctgactcatatgcacgacccttgttgacacctgcacctcttgatagtggtcctggaccttttaagactccaatgcaacctcctccatcctctcaggatccttatggatcagtgtcacaggcatcaaggcgattgtctgttgacccttatgaaaggcctgctttgacaccaagacctatagataatttttctcataatcagtcaaatgatccatatagtcagcctccccttaccccacatccagcagtgaatgaatcttttgcccatccttcaagggctttttcccagcctggaaccatatcaaggccaacatctcaggacccatactcccaacccccaggaactccacgacctgttgtagattcttattcccaatcttcaggaacagctaggtccaatacagacccttactctcaacctcctggaactccccggcctactactgttgacccatatagtcagcagccccaaaccccaagaccatctacacaaactgacttgtttgttacacctgtaacaaatcagaggcattctgatccatatgctcatcctcctggaacaccaagacctggaatttctgtcccttactctcagccaccagcaacaccaaggccaaggatttcagagggttttactaggtcctcaatgacaagaccagtcctcatgccaaatcaggatcctttcctgcaagcagcacaaaaccgaggaccagctttacctggcccgttggtaaggccacctgatacatgttcccagacacctaggccccctggacctggtctttcagacacatttagccgtgtttccccatctgctgcccgtgatccctatgatcagtctccaatgactccaagatctcagtctgactcttttggaacaagtcaaactgcccatgatgttgctgatcagccaaggcctggatcagaggggagcttctgtgcatcttcaaactctccaatgcactcccaaggccagcagttctctggtgtctcccaacttcctggacctgtgccaacttcaggagtaactgatacacagaatactgtaaatatggcccaagcagatacagagaaattgagacagcggcagaagttacgtgaaatcattctccagcagcaacagcagaagaagattgcaggtcgacaggagaaggggtcacaggactcacccgcagtgcctcatccagggcctcttcaacactggcaaccagagaatgttaaccaggctttcaccagacccccacctccctatcctgggaacattaggtctcctgttgcccctcctttaggacctagatatgctgttttcccaaaagatcagcgtggaccctatcctcctgatgttgctagtatggggatgagacctcatggatttagatttggatttccaggaggtagtcatggtaccatgccgagtcaagagcgcttccttgtgcctcctcagcaaatacagggatctggagtttctccacagctaagaagatcagtatctgtagatatgcctaggcctttaaataactcacaaatgaataatccagttggacttcctcagcatttttcaccacagagcttgccagttcagcagcacaacatactgggccaagcatatattgaactgagacatagggctcctgacggaaggcaacggctgcctttcagtgctccacctggcagcgttgtagaggcatcttctaatctgagacatggaaacttcattccccggccagactttccgggccctagacacacagaccccatgcgacgacctccccagggtctacctaatcagctacctgtgcacccagatttggaacaagtgccaccatctcaacaagagcaaggtcattctgtccattcatcttctatggtcatgaggactctgaaccatccactaggtggtgaattttcagaagctcctttgtcaacatctgtaccgtctgaaacaacgtctgataatttacagataaccacccagccttctgatggtctagaggaaaaacttgattctgatgacccttctgtgaaggaactggatgttaaagaccttgagggggttgaagtcaaagacttagatgatgaagatcttgaaaacttaaatttagatacagaggatggcaaggtagttgaattggatactttagataatttggaaactaatgatcccaacctggatgacctcttaaggtcaggagagtttgatatcattgcatatacagatccagaacttgacatgggagataagaaaagcatgtttaatgaggaactagaccttccaattgatgataagttagataatcagtgtgtatctgttgaaccaaaaaaaaaggaacaagaaaacaaaactctggttctctctgataaacattcaccacagaaaaaatccactgttaccaatgaggtaaaaacggaagtactgtctccaaattctaaggtggaatccaaatgtgaaactgaaaaaaatgatgagaataaagataatgttgacactccttgctcacaggcttctgctcactcagacctaaatgatggagaaaagacttctttgcatccttgtgatccagatctatttgagaaaagaaccaatcgagaaactgctggccccagtgcaaatgtcattcaggcatccactcaactacctgctcaagatgtaataaactcttgtggcataactggatcaactccagttctctcaagtttacttgctaatgagaaatctgataattcagacattaggccatcggggtctccaccaccaccaactctgccggcctccccatccaatcatgtgtcaagtttgcctcctttcatagcaccgcctggccgtgttttggataatgccatgaattctaatgtgacagtagtctctagggtaaaccatgttttttctcagggtgtgcaggtaaacccagggctcattccaggtcaatcaacagttaaccacagtctggggacaggaaaacctgcaactcaaactgggcctcaaacaagtcagtctggtaccagtagcatgtctggaccccaacagctaatgattcctcaaacattagcacagcagaatagagagaggccccttcttctagaagaacagcctctacttctacaggatcttttggatcaagaaaggcaagaacagcagcagcaaagacagatgcaagccatgattcgtcagcgatcagaaccgttcttccctaatattgattttgatgcaattacagatcctataatgaaagccaaaatggtggcccttaaaggtataaataaagtgatggcacaaaacaatctgggcatgccaccaatggtgatgagcaggttcccttttatgggccaggtggtaactggaacacagaacagtgaaggacagaaccttggaccacaggccattcctcaggatggcagtataacacatcagatttctaggcctaatcctccaaattttggtccaggctttgtcaatgattcacagcgtaagcagtatgaagagtggctccaggagacccaacagctgcttcaaatgcagcagaagtatcttgaagaacaaattggtgctcacagaaaatctaagaaggccctttcagctaaacaacgtactgccaagaaagctgggcgtgaatttccagaggaagatgcagaacaactcaagcatgttactgaacagcaaagcatggttcagaaacagctagaacagattcgtaaacaacagaaagaacatgctgaattgattgaagattatcggatcaaacagcagcagcaatgtgcaatggccccacctaccatgatgcccagtgtccagccccagccacccctaattccaggtgccactccacccaccatgagccaacccacctttcccatggtgccacagcagcttcagcaccagcagcacacaacagttatttctggccatactagccctgttagaatgcccagtttacctggatggcaacccaacagtgctcctgcccacctgcccctcaatcctcctagaattcagcccccaattgcccagttaccaataaaaacttgtacaccagccccagggacagtctcaaatgcaaatccacagagtggaccaccacctcgggtagaatttgatgacaacaatccctttagtgaaagttttcaagaacgggaacgtaaggaacgtttacgagaacagcaagagagacaacggatccaactcatgcaggaggtagatagacaaagagctttgcagcagaggatggaaatggagcagcatggtatggtgggctctgagataagtagtagtaggacatctgtgtcccagattcccttctacagttccgacttaccttgtgattttatgcaacctctaggaccccttcagcagtctccacaacaccaacagcaaatggggcaggttttacagcagcagaatatacaacaaggatcaattaattcaccctccacccaaactttcatgcagactaatgagcgaaggcaggtaggccctccttcatttgttcctgattcaccatcaatccctgttggaagcccaaatttttcttctgtgaagcagggacatggaaatctttctgggaccagcttccagcagtccccagtgaggccttcttttacacctgctttaccagcagcacctccagtagctaatagcagtctcccatgtggccaagattctactataacccatggacacagttatccgggatcaacccaatcgctcattcagttgtattctgatataatcccagaggaaaaagggaaaaagaaaagaacaagaaagaagaaaagagatgatgatgcagaatccaccaaggctccatcaactccccattcagatataactgccccaccgactccaggcatctcagaaactacctctactcctgcagtgagcacacccagtgagcttcctcaacaagccgaccaagagtcggtggaaccagtcggcccatccactcccaatatggcagcaggccagctatgtacagaattagagaacaaactgcccaatagtgatttctcacaagcaactccaaatcaacagacgtatgcaaattcagaagtagacaagctctccatggaaacccctgccaaaacagaagagataaaactggaaaaggctgagacagagtcctgcccaggccaagaggagcctaaattggaggaacagaatggtagtaaggtagaaggaaacgctgtagcctgtcctgtctcctcagcacagagtcctccccattctgctggggcccctgctgccaaaggagactcagggaatgaacttctgaaacacttgttgaaaaataaaaagtcatcttctcttttgaatcaaaaacctgagggcagtatttgttcagaagatgactgtacaaaggataataaactagttgagaagcagaacccagctgaaggactgcaaactttgggggctcaaatgcaaggtggttttggatgtggcaaccagttgccaaaaacagatggaggaagtgaaaccaagaaacagcgaagcaaacggactcagaggacgggtgagaaagcagcacctcgctcaaagaaaaggaaaaaggacgaagaggagaaacaagctatgtactctagcactgacacgtttacccacttgaaacagcagaataatttaagtaatcctccaacaccccctgcctctcttcctcctacaccacctcctatggcttgtcagaagatggccaatggttttgcaacaactgaagaacttgctggaaaagccggagtgttagtgagccatgaagttaccaaaactctaggacctaaaccatttcagctgcccttcagaccccaggacgacttgttggcccgagctcttgctcagggccccaagacagttgatgtgccagcctccctcccaacaccacctcataacaatcaggaagaattaaggatacaggatcactgtggtgatcgagatactcctgacagttttgttccctcatcctctcctgagagtgtggttggggtagaagtgagcaggtatccagatctgtcattggtcaaggaggagcctccagaaccggtgccgtcccccatcattccaattcttcctagcactgctgggaaaagttcagaatcaagaaggaatgacatcaaaactgagccaggcactttatattttgcgtcaccttttggtccttccccaaatggtcccagatcaggtcttatatctgtagcaattactctgcatcctacagctgctgagaacattagcagtgttgtggctgcattttccgaccttcttcacgtccgaatccctaacagctatgaggttagcagtgctccagatgtcccatccatgggtttggtcagtagccacagaatcaacccgggtttggagtatcgacagcatttacttctccgtgggcctccgccaggatctgcaaaccctcccagattagtgagctcttaccggctgaagcagcctaatgtaccatttcctccaacaagcaatggtctttctggatataaggattctagtcatggtattgcagaaagcgcagcactcagaccacagtggtgttgtcattgtaaagtggttattcttggaagtggtgtgcggaaatctttcaaagatctgacccttttgaacaaggattcccgagaaagcaccaagagggtagagaaggacattgtcttctgtagtaataactgctttattctttattcatcaactgcacaagcgaaaaactcagaaaacaaggaatccattccttcattgccacaatcacctatgagagaaacgccttccaaagcatttcatcagtacagcaacaacatctccactttggatgtgcactgtctcccccagctcccagagaaagcttctccccctgcctcaccacccatcgccttccctcctgcttttgaagcagcccaagtcgaggccaagccagatgagctgaaggtgacagtcaagctgaagcctcggctaagagctgtccatggtgggtttgaagattgcaggccgctcaataaaaaatggagaggaatgaaatggaagaagtggagcattcatattgtaatccctaaggggacatttaaaccaccttgtgaggatgaaatagatgaatttctaaagaaattgggcacttcccttaaacctgatcctgtgcccaaagactatcggaaatgttgcttttgtcatgaagaaggtgatggattgacagatggaccagcaaggctactcaaccttgacttggatctgtgggtccacttgaactgcgctctgtggtccacggaggtctatgagactcaggctggtgccttaataaatgtggagctagctctgaggagaggcctacaaatgaaatgtgtcttctgtcacaagacgggtgccactagtggatgccacagatttcgatgcaccaacatttatcacttcacttgcgccattaaagcacaatgcatgttttttaaggacaaaactatgctttgccccatgcacaaaccaaagggaattcatgagcaagaattaagttactttgcagtcttcaggagggtctatgttcagcgtgatgaggtgcgacagattgctagcatcgtgcaacgaggagaacgggaccatacctttcgcgtgggtagcctcatcttccacacaattggtcagctgcttccacagcagatgcaagcattccattctcctaaagcactcttccctgtgggctatgaagccagccggctgtactggagcactcgctatgccaataggcgctgccgctacctgtgctccattgaggagaaggatgggcgcccagtgtttgtcatcaggattgtggaacaaggccatgaagacctggttctaagtgacatctcacctaaaggtgtctgggataagattttggagcctgtggcatgtgtgagaaaaaagtctgaaatgctccagcttttcccagcgtatttaaaaggagaggatctgtttggcctgaccgtctctgcagtggcacgcatagcggaatcacttcctggggttgaggcatgtgaaaattataccttccgatacggccgaaatcctctcatggaacttcctcttgccgttaaccccacaggttgtgcccgttctgaacctaaaatgagtgcccatgtcaagaggtttgtgttaaggcctcacaccttaaacagcaccagcacctcaaagtcatttcagagcacagtcactggagaactgaacgcaccttatagtaaacagtttgttcactccaagtcatcgcagtaccggaagatgaaaactgaatggaaatccaatgtgtatctggcacggtctcggattcaggggctgggcctgtatgctgctcgagacattgagaaacacaccatggtcattgagtacatcgggactatcattcgaaacgaagtagccaacaggaaagagaagctttatgagtctcagaaccgtggtgtgtacatgttccgcatggataacgaccatgtgattgacgcgacgctcacaggagggcccgcaaggtatatcaaccattcgtgtgcacctaattgtgtggctgaagtggtgacttttgagagaggacacaaaattatcatcagctccagtcggagaatccagaaaggagaagagctctgctatgactataagtttgactttgaagatgaccagcacaagattccgtgtcactgtggagctgtgaactgccggaagtggatgaactgaaatgcattccttgctagctcagcgggcggcttgtccctaggaagaggcgattcaacacaccattggaattttgcagacagaaagagatttttgttttctgttttatgactttttgaaaaagcttctgggagttctgatttcctcagtcctttaggttaaagcagcgccaggaggaagctgacagaagcagcgttcctgaagtggccgaggttaaacggaatcacagaatggtccagcacttttgcttttttttcttttccttttcttttttttttgtttgttttttgttttgtttttcccttgtgggtgggtttcattgttttggttttctagtctcactaaggagaaacttttactggggcaaagagccgatggctgccctgccccgggcaggggccttcctatgaatgtaagactgaaatcaccagcgagggggacagagagtgctggccacggccttattaaaaaggggcaggccctctaacttcaaaatgtttttaaataaagtagacaccactgaacaaggaatgtactgaaatgacttccttagggatagagctaagggataataacttgcactaaatacatttaaatacttgattccatgagtcagtttattgtagtttttgatttctgtaaaataagagaaacttttgtatttattattgaataagtgaatgaagctatttttaaataaagttagaagaaagccaagctgctgctgttacctgcagaactaacaaaccctgttactttgtacagatatgtaaatattttgagaaaaaatacagtataaaaatagttattgaccaaatgctaccaggctctgcagcagctcgggggcttataaaatgttcatagggatgttacaatataattttgtgttataaaatatgccattataattatgtaataaccaaaatttcaacctagagtgttgggggttttttggaaaccgcagtctattagtactcaatggttttatacaccttacttctgacagagcggggcgtatgctacgactacaacttttatagctgttttggtaatttaaactaattttttcatattatattgttgcatccctacttcttcagtcaggtttttttgtgcttacaatttgtgataactgtgaataactgcttaaaaatacacccaaatggaggctgaattttttcttcagcaaaagtagttttgattagaactttgtttcagccacagagaatcatgtaaacgtaataggatcatgtagcagaaacttaaatctaaccctttagccttctatttaacacaaaaatttgaaaaagttaaaaaaaaaaaggagatgtgattatgcttacagctgcaggactctggcaatagggtttttggaagatgtaattttaaaatgtgtttgtatgaactgtttgtttacatttctttaataaaaaaaacactgttttgtgtttgcttgtagaaacttaatcagcattttgaaccaggttagctttttattttgtacttaaaattctggtactgacacttcacaggctaagtataaaatgaagttttgtgtgcacaattcaagtggactgtaaactgttggtatattcagtgatgcagttctgaacttgtatatggcatgatgtatttttatcttacagaataaatcaattgtatatatttttctcttgataaatagctgtatgaaatttgtttcctgaatatttttcttctcttgtacaatatcctgacatcctaccagtatttgtcctaccgggtttttgttgttttctgttctgtataatagtatctaatgttggcaaaaattgaattttttgaagtatacagagtgttatgggttttggaatttgtggacacagatttagaagatcaccatttacaaataaaatattttacatctataag

SEQ ID NO: 7098 - protein, 4911 aa, Homo sapiens; identical to SEQ ID NO: 971

SEQ ID NO: 7099 - DNA, 2439 bp, Homo sapiens
ctgctcgctccatgttgccgcctctcccggtacctgctgctgctcccggggctgcgggaaatgcgagaggctgagccggggaggaggaacccgagcagcagcggcggcggcggcggccgcggcggcgggagccccccaggaggaggaccgggatccatgtgtctttcctggtgactaggatgtcgtcggaggaggacaagagcgtggagcagccgcagccgccgccaccaccccccgaggagcctggagccccggccccgagccccgcagccgcagacaaaagacctcggggccggcctcgcaaagatggcgcttcccctttccagagagccagaaagaaacctcgaagtagggggaaaactgcagtggaagatgaggacagcatggatgggctggagacaacagaaacagaaacgattgtggaaacagaaatcaaagaacaatctgcagaagaggatgctgaagcagaagtggataacagcaaacagctaattccaactcttcagcgatctgtgtctgaggaatcggcaaactccctggtctctgttggtgtagaagccaaaatcagtgaacagctctgcgctttttgttactgtggggaaaaaagttccttaggacaaggagacttaaaacaattcagaccgtgggcagctctgctatgactataagtttgactttgaagatgaccagcacaagattccgtgtcactgtggagctgtgaactgccggaagtggatgaactgaaatgcattccttgctagctcagcgggcggcttgtccctaggaagaggcgattcaacacaccattggaattttgcagacagaaagagatttttgttttctgttttatgactttttgaaaaagcttctgggagttctgatttcctcagtcctttaggttaaagcagcgccaggaggaagctgacagaagcagcgttcctgaagtggccgaggttaaacggaatcacagaatggtccagcacttttgcttttttttcttttccttttcttttttttttgtttgttttttgttttgtttttcccttgtgggtgggtttcattgttttggttttctagtctcactaaggagaaacttttactggggcaaagagccgatggctgccctgccccgggcaggggccttcctatgaatgtaagactgaaatcaccagcgagggggacagagagtgctggccacggccttattaaaaaggggcaggccctctaacttcaaaatgtttttaaataaagtagacaccactgaacaaggaatgtactgaaatgacttccttagggatagagctaagggataataacttgcactaaatacatttaaatacttgattccatgagtcagtttattgtagtttttgatttctgtaaaataagagaaacttttgtatttattattgaataagtgaatgaagctatttttaaataaagttagaagaaagccaagctgctgctgttacctgcagaactaacaaaccctgttactttgtacagatatgtaaatattttgagaaaaaatacagtataaaaatagttattgaccaaatgctaccaggctctgcagcagctcgggggcttataaaatgttcatagggatgttacaatataattttgtgttataaaatatgccattataattatgtaataaccaaaatttcaacctagagtgttgggggttttttggaaaccgcagtctattagtactcaatggttttatacaccttacttctgacagagcggggcgtatgctacgactacaacttttatagctgttttggtaatttaaactaattttttcatattatattgttgcatccctacttcttcagtcaggtttttttgtgcttacaatttgtgataactgtgaataactgcttaaaaatacacccaaatggaggctgaattttttcttcagcaaaagtagttttgattagaactttgtttcagccacagagaatcatgtaaacgtaataggatcatgtagcagaaacttaaatctaaccctttagccttctatttaacacaaaaatttgaaaaagttaaaaaaaaaaaggagatgtgattatgcttacagctgcaggactctggcaatagggtttttggaagatgtaattttaaaatgtgtttgtatgaactgtttgtttacatttctttaataaaaaaaacactgttttgtgtttgcttgtagaaacttaatcagcattttgaaccaggttagctttttattttgtacttaaaattctggtactgacacttcacaggctaagtataaaatgaagttttgtgtgcacaattcaagtggactgtaaactgttggtatattcagtgatgcagttctgaacttgtatatggcatgatgtatttttatcttacagaataaatcaattgtatatatttttctcttgataaatagctgtatgaaatttg

SEQ ID NO: 7100 - protein, 160 aa, Homo sapiens; identical to SEQ ID NO: 7096

SEQ ID NO: 7101 - DNA, 16611 bp, Homo sapiens
cctgctcgctccatgttgccgcctctcccggtacctgctgctgctcccggggctgcgggaaatgcgagaggctgagccggggaggaggaacccgagcagcagcggcggcggcggcggccgcggcggcgggagccccccaggaggaggaccgggatccatgtgtctttcctggtgactaggatgtcgtcggaggaggacaagagcgtggagcagccgcagccgccgccaccaccccccgaggagcctggagccccggccccgagccccgcagccgcagacaaaagacctcggggccggcctcgcaaagatggcgcttcccctttccagagagccagaaagaaacctcgaagtagggggaaaactgcagtggaagatgaggacagcatggatgggctggagacaacagaaacagaaacgattgtggaaacagaaatcaaagaacaatctgcagaagaggatgctgaagcagaagtggataacagcaaacagctaattccaactcttcagcgatctgtgtctgaggaatcggcaaactccctggtctctgttggtgtagaagccaaaatcagtgaacagctctgcgctttttgttactgtggggaaaaaagttccttaggacaaggagacttaaaacaattcagaataacgcctggatttatcttgccatggagaaaccaaccttctaacaagaaggacattgatgacaacagcaatggaacctatgagaaaatgcaaaactcagcaccacgaaaacaaagaggacagagaaaagaacgatctcctcagcagaatatagtatcttgtgtaagtgtaagcacccagacagcttcagatgatcaagctggtaaactgtgggatgaactcagtctggttgggcttccagatgccattgatatccaagccttatttgattctacaggcacttgttgggctcatcaccgttgtgtggagtggtcactaggagtatgccagatggaagaaccattgttagtgaacgtggacaaagctgttgtctcagggagcacagaacgatgtgcattttgtaagcaccttggagccactatcaaatgctgtgaagagaaatgtacccagatgtatcattatccttgtgctgcaggagccggcacctttcaggatttcagtcacatcttcctgctttgtccagaacacattgaccaagctcctgaaagatcgaaggaagatgcaaactgtgcagtgtgcgacagcccgggagacctcttagatcagttcttttgtactacttgtggtcagcactatcatggaatgtgcctggatatagcggttactccattaaaacgtgcaggttggcaatgtcctgagtgcaaagtgtgccagaactgcaaacaatcgggagaagatagcaagatgctagtgtgtgatacgtgtgacaaagggtatcatactttttgtcttcaaccagttatgaaatcagtaccaaccaatggctggaaatgcaaaaattgcagaatatgtatagagtgtggcacacggtctagttctcagtggcaccacaattgcctgatatgtgacaattgttaccaacagcaggataacttatgtcccttctgtgggaagtgttatcatccagaattgcagaaagacatgcttcattgtaatatgtgcaaaaggtgggttcacctagagtgtgacaaaccaacagatcatgaactggatactcagctcaaagaagagtatatctgcatgtattgtaaacacctgggagctgagatggatcgtttacagccaggtgaggaagtggagatagctgagctcactacagattataacaatgaaatggaagttgaaggccctgaagatcaaatggtattctcagagcaggcagctaataaagatgtcaacggtcaggagtccactcctggaattgttccagatgcggttcaagtccacactgaagagcaacagaagagtcatccctcagaaagtcttgacacagatagtcttcttattgctgtatcatcccaacatacagtgaatactgaattggaaaaacagatttctaatgaagttgatagtgaagacctgaaaatgtcttctgaagtgaagcatatttgtggcgaagatcaaattgaagataaaatggaagtgacagaaaacattgaagtcgttacacaccagatcactgtgcagcaagaacaactgcagttgttagaggaacctgaaacagtggtatccagagaagaatcaaggcctccaaaattagtcatggaatctgtcactcttccactagaaaccttagtgtccccacatgaggaaagtatttcattatgtcctgaggaacagttggttatagaaaggctacaaggagaaaaggaacagaaagaaaattctgaactttctactggattgatggactctgaaatgactcctacaattgagggttgtgtgaaagatgtttcataccaaggaggcaaatctataaagttatcatctgagacagagtcatcattttcatcatcagcagacataagcaaggcagatgtgtcttcctccccaacaccttcttcagacttgccttcgcatgacatgctgcataattacccttcagctcttagttcctctgctggaaacatcatgccaacaacttacatctcagtcactccaaaaattggcatgggtaaaccagctattactaagagaaaattttctcctggtagacctcggtccaaacagggggcttggagtacccataatacagtgagcccaccttcctggtccccagacatttcagaaggtcgggaaatttttaaacccaggcagcttcctggcagtgccatttggagcatcaaagtgggccgtgggtctggatttccaggaaagcggagacctcgaggtgcaggactgtcggggcgaggtggccgaggcaggtcaaagctgaaaagtggaatcggagctgttgtattacctggggtgtctactgcagatatttcatcaaataaggatgatgaagaaaactctatgcacaatacagttgtgttgttttctagcagtgacaagttcactttgaatcaggatatgtgtgtagtttgtggcagttttggccaaggagcagaaggaagattacttgcctgttctcagtgtggtcagtgttaccatccatactgtgtcagtattaagatcactaaagtggttcttagcaaaggttggaggtgtcttgagtgcactgtgtgtgaggcctgtgggaaggcaactgacccaggaagactcctgctgtgtgatgactgtgacataagttatcacacctactgcctagaccctccattgcagacagttcccaaaggaggctggaagtgcaaatggtgtgtttggtgcagacactgtggagcaacatctgcaggtctaagatgtgaatggcagaacaattacacacagtgcgctccttgtgcaagcttatcttcctgtccagtctgctatcgaaactatagagaagaagatcttattctgcaatgtagacaatgtgatagatggatgcatgcagtttgtcagaacttaaatactgaggaagaagtggaaaatgtagcagacattggttttgattgtagcatgtgcagaccctatatgcctgcgtctaatgtgccttcctcagactgctgtgaatcttcacttgtagcacaaattgtcacaaaagtaaaagagctagacccacccaagacttatacccaggatggtgtgtgtttgactgaatcagggatgactcagttacagagcctcacagttacagttccaagaagaaaacggtcaaaaccaaaattgaaattgaagattataaatcagaatagcgtggccgtccttcagacccctccagacatccaatcagagcattcaagggatggtgaaatggatgatagtcgagaaggagaacttatggattgtgatggaaaatcagaatctagtcctgagcgggaagctgtggatgatgaaactaagggagtggaaggaacagatggtgtcaaaaagagaaaaaggaaaccatacagaccaggtattggtggatttatggtgcggcaaagaagtcgaactgggcaagggaaaaccaaaagatctgtgatcagaaaagattcctcaggctctatttccgagcagttaccttgcagagatgatggctggagtgagcagttaccagatactttagttgatgaatctgtttctgttactgaaagcactgaaaaaataaagaagagataccgaaaaaggaaaaataagcttgaagaaactttccctgcctatttacaagaagctttctttggaaaagatcttctagatacaagtagacaaagcaagataagtttagataatctgtcagaagatggagctcagcttttatataaaacaaacatgaacacaggtttcttggatccttccttagatccactacttagttcatcctcggctccaacaaaatctggaactcacggtcctgctgatgacccattagctgatatttctgaagttttaaacacagatgatgacattcttggaataatttcagatgatctagcaaaatcagttgatcattcagatattggtcctgtcactgatgatccttcctctttgcctcagccaaatgtcaatcagagttcacgaccattaagtgaagaacagctagatgggatcctcagtcctgaactagacaaaatggtcacagatggagcaattcttggaaaattatataaaattccagagcttggcggaaaagatgttgaagacttatttacagctgtacttagtcctgcgaacactcagccaactccattgccacagcctcccccaccaacacagctgttgccaatacacaatcaggatgctttttcacggatgcctctcatgaatggccttattggatccagtcctcatctcccacataattctttgccacctggaagcggactgggaactttctctgcaattgcacaatcctcttatcctgatgccagggataaaaattcagcctttaatccaatggcaagtgatcctaacaactcttggacatcatcagctcccactgtggaaggagaaaatgacacaatgtcgaatgcccagagaagcacgcttaagtgggagaaagaggaggctctgggtgaaatggcaactgttgccccagttctctacaccaatattaatttccccaacttaaaggaagaattccctgattggactactagagtgaagcaaattgccaaattgtggagaaaagcaagctcacaagaaagagcaccatatgtgcaaaaagccagagataacagagctgctttacgcattaataaagtacagatgtcaaatgattccatgaaaaggcagcaacagcaagatagcattgatcccagctctcgtattgattcggagctttttaaagatcctttaaagcaaagagaatcagaacatgaacaggaatggaaatttagacagcaaatgcgtcagaaaagtaagcagcaagctaaaattgaagccacacagaaacttgaacaggtgaaaaatgagcagcagcagcagcaacaacagcaatttggttctcagcatcttctggtgcagtctggttcagatacaccaagtagtgggatacagagtcccttgacacctcagcctggcaatggaaatatgtctcctgcacagtcattccataaagaactgtttacaaaacagccacccagtacccctacgtctacatcttcagatgatgtgtttgtaaagccacaagctccacctcctcctccagccccatcccggattcccatccaggatagtctttctcaggctcagacttctcagccaccctcaccgcaagtgttttcacctgggtcctctaactcacgaccaccatctccaatggatccatatgcaaaaatggttggtacccctcgaccacctcctgtgggccatagtttttccagaagaaattctgctgcaccagtggaaaactgtacacctttatcatcggtatctaggccccttcaaatgaatgagacaacagcaaataggccatcccctgtcagagatttatgttcttcttccacgacaaataatgacccctatgcaaaacctccagacacacctaggcctgtgatgacagatcaatttcccaaatccttgggcctatcccggtctcctgtagtttcagaacaaactgcaaaaggccctatagcagctggaaccagtgatcactttactaaaccatctcctagggcagatgtgtttcaaagacaaaggatacctgactcatatgcacgacccttgttgacacctgcacctcttgatagtggtcctggaccttttaagactccaatgcaacctcctccatcctctcaggatccttatggatcagtgtcacaggcatcaaggcgattgtctgttgacccttatgaaaggcctgctttgacaccaagacctatagataatttttctcataatcagtcaaatgatccatatagtcagcctccccttaccccacatccagcagtgaatgaatcttttgcccatccttcaagggctttttcccagcctggaaccatatcaaggccaacatctcaggacccatactcccaacccccaggaactccacgacctgttgtagattcttattcccaatcttcaggaacagctaggtccaatacagacccttactctcaacctcctggaactccccggcctactactgttgacccatatagtcagcagccccaaaccccaagaccatctacacaaactgacttgtttgttacacctgtaacaaatcagaggcattctgatccatatgctcatcctcctggaacaccaagacctggaatttctgtcccttactctcagccaccagcaacaccaaggccaaggatttcagagggttttactaggtcctcaatgacaagaccagtcctcatgccaaatcaggatcctttcctgcaagcagcacaaaaccgaggaccagctttacctggcccgttggtaaggccacctgatacatgttcccagacacctaggccccctggacctggtctttcagacacatttagccgtgtttccccatctgctgcccgtgatccctatgatcagtctccaatgactccaagatctcagtctgactcttttggaacaagtcaaactgcccatgatgttgctgatcagccaaggcctggatcagaggggagcttctgtgcatcttcaaactctccaatgcactcccaaggccagcagttctctggtgtctcccaacttcctggacctgtgccaacttcaggagtaactgatacacagaatactgtaaatatggcccaagcagatacagagaaattgagacagcggcagaagttacgtgaaatcattctccagcagcaacagcagaagaagattgcaggtcgacaggagaaggggtcacaggactcacccgcagtgcctcatccagggcctcttcaacactggcaaccagagaatgttaaccaggctttcaccagacccccacctccctatcctgggaacattaggtctcctgttgcccctcctttaggacctagatatgctgttttcccaaaagatcagcgtggaccctatcctcctgatgttgctagtatggggatgagacctcatggatttagatttggatttccaggaggtagtcatggtaccatgccgagtcaagagcgcttccttgtgcctcctcagcaaatacagggatctggagtttctccacagctaagaagatcagtatctgtagatatgcctaggcctttaaataactcacaaatgaataatccagttggacttcctcagcatttttcaccacagagcttgccagttcagcagcacaacatactgggccaagcatatattgaactgagacatagggctcctgacggaaggcaacggctgcctttcagtgctccacctggcagcgttgtagaggcatcttctaatctgagacatggaaacttcattccccggccagactttccgggccctagacacacagaccccatgcgacgacctccccagggtctacctaatcagctacctgtgcacccagatttggaacaagtgccaccatctcaacaagagcaaggtcattctgtccattcatcttctatggtcatgaggactctgaaccatccactaggtggtgaattttcagaagctcctttgtcaacatctgtaccgtctgaaacaacgtctgataatttacagataaccacccagccttctgatggtctagaggaaaaacttgattctgatgacccttctgtgaaggaactggatgttaaagaccttgagggggttgaagtcaaagacttagatgatgaagatcttgaaaacttaaatttagatacagaggatggcaaggtagttgaattggatactttagataatttggaaactaatgatcccaacctggatgacctcttaaggtcaggagagtttgatatcattgcatatacagatccagaacttgacatgggagataagaaaagcatgtttaatgaggaactagaccttccaattgatgataagttagataatcagtgtgtatctgttgaaccaaaaaaaaaggaacaagaaaacaaaactctggttctctctgataaacattcaccacagaaaaaatccactgttaccaatgaggtaaaaacggaagtactgtctccaaattctaaggtggaatccaaatgtgaaactgaaaaaaatgatgagaataaagataatgttgacactccttgctcacaggcttctgctcactcagacctaaatgatggagaaaagacttctttgcatccttgtgatccagatctatttgagaaaagaaccaatcgagaaactgctggccccagtgcaaatgtcattcaggcatccactcaactacctgctcaagatgtaataaactcttgtggcataactggatcaactccagttctctcaagtttacttgctaatgagaaatctgataattcagacattaggccatcggggtctccaccaccaccaactctgccggcctccccatccaatcatgtgtcaagtttgcctcctttcatagcaccgcctggccgtgttttggataatgccatgaattctaatgtgacagtagtctctagggtaaaccatgttttttctcagggtgtgcaggtaaacccagggctcattccaggtcaatcaacagttaaccacagtctggggacaggaaaacctgcaactcaaactgggcctcaaacaagtcagtctggtaccagtagcatgtctggaccccaacagctaatgattcctcaaacattagcacagcagaatagagagaggccccttcttctagaagaacagcctctacttctacaggatcttttggatcaagaaaggcaagaacagcagcagcaaagacagatgcaagccatgattcgtcagcgatcagaaccgttcttccctaatattgattttgatgcaattacagatcctataatgaaagccaaaatggtggcccttaaaggtataaataaagtgatggcacaaaacaatctgggcatgccaccaatggtgatgagcaggttcccttttatgggccaggtggtaactggaacacagaacagtgaaggacagaaccttggaccacaggccattcctcaggatggcagtataacacatcagatttctaggcctaatcctccaaattttggtccaggctttgtcaatgattcacagcgtaagcagtatgaagagtggctccaggagacccaacagctgcttcaaatgcagcagaagtatcttgaagaacaaattggtgctcacagaaaatctaagaaggccctttcagctaaacaacgtactgccaagaaagctgggcgtgaatttccagaggaagatgcagaacaactcaagcatgttactgaacagcaaagcatggttcagaaacagctagaacagattcgtaaacaacagaaagaacatgctgaattgattgaagattatcggatcaaacagcagcagcaatgtgcaatggccccacctaccatgatgcccagtgtccagccccagccacccctaattccaggtgccactccacccaccatgagccaacccacctttcccatggtgccacagcagcttcagcaccagcagcacacaacagttatttctggccatactagccctgttagaatgcccagtttacctggatggcaacccaacagtgctcctgcccacctgcccctcaatcctcctagaattcagcccccaattgcccagttaccaataaaaacttgtacaccagccccagggacagtctcaaatgcaaatccacagagtggaccaccacctcgggtagaatttgatgacaacaatccctttagtgaaagttttcaagaacgggaacgtaaggaacgtttacgagaacagcaagagagacaacggatccaactcatgcaggaggtagatagacaaagagctttgcagcagaggatggaaatggagcagcatggtatggtgggctctgagataagtagtagtaggacatctgtgtcccagattcccttctacagttccgacttaccttgtgattttatgcaacctctaggaccccttcagcagtctccacaacaccaacagcaaatggggcaggttttacagcagcagaatatacaacaaggatcaattaattcaccctccacccaaactttcatgcagactaatgagcgaaggcaggtaggccctccttcatttgttcctgattcaccatcaatccctgttggaagcccaaatttttcttctgtgaagcagggacatggaaatctttctgggaccagcttccagcagtccccagtgaggccttcttttacacctgctttaccagcagcacctccagtagctaatagcagtctcccatgtggccaagattctactataacccatggacacagttatccgggatcaacccaatcgctcattcagttgtattctgatataatcccagaggaaaaagggaaaaagaaaagaacaagaaagaagaaaagagatgatgatgcagaatccaccaaggctccatcaactccccattcagatataactgccccaccgactccaggcatctcagaaactacctctactcctgcagtgagcacacccagtgagcttcctcaacaagccgaccaagagtcggtggaaccagtcggcccatccactcccaatatggcagcaggccagctatgtacagaattagagaacaaactgcccaatagtgatttctcacaagcaactccaaatcaacagacgtatgcaaattcagaagtagacaagctctccatggaaacccctgccaaaacagaagagataaaactggaaaaggctgagacagagtcctgcccaggccaagaggagcctaaattggaggaacagaatggtagtaaggtagaaggaaacgctgtagcctgtcctgtctcctcagcacagagtcctccccattctgctggggcccctgctgccaaaggagactcagggaatgaacttctgaaacacttgttgaaaaataaaaagtcatcttctcttttgaatcaaaaacctgagggcagtatttgttcagaagatgactgtacaaaggataataaactagttgagaagcagaacccagctgaaggactgcaaactttgggggctcaaatgcaaggtggttttggatgtggcaaccagttgccaaaaacagatggaggaagtgaaaccaagaaacagcgaagcaaacggactcagaggacgggtgagaaagcagcacctcgctcaaagaaaaggaaaaaggacgaagaggagaaacaagctatgtactctagcactgacacgtttacccacttgaaacagcagaataatttaagtaatcctccaacaccccctgcctctcttcctcctacaccacctcctatggcttgtcagaagatggccaatggttttgcaacaactgaagaacttgctggaaaagccggagtgttagtgagccatgaagttaccaaaactctaggacctaaaccatttcagctgcccttcagaccccaggacgacttgttggcccgagctcttgctcagggccccaagacagttgatgtgccagcctccctcccaacaccacctcataacaatcaggaagaattaaggatacaggatcactgtggtgatcgagatactcctgacagttttgttccctcatcctctcctgagagtgtggttggggtagaagtgagcaggtatccagatctgtcattggtcaaggaggagcctccagaaccggtgccgtcccccatcattccaattcttcctagcactgctgggaaaagttcagaatcaagaaggaatgacatcaaaactgagccaggcactttatattttgcgtcaccttttggtccttccccaaatggtcccagatcaggtcttatatctgtagcaattactctgcatcctacagctgctgagaacattagcagtgttgtggctgcattttccgaccttcttcacgtccgaatccctaacagctatgaggttagcagtgctccagatgtcccatccatgggtttggtcagtagccacagaatcaacccgggtttggagtatcgacagcatttacttctccgtgggcctccgccaggatctgcaaaccctcccagattagtgagctcttaccggctgaagcagcctaatgtaccatttcctccaacaagcaatggtctttctggatataaggattctagtcatggtattgcagaaagcgcagcactcagaccacagtggtgttgtcattgtaaagtggttattcttggaagtggtgtgcggaaatctttcaaagatctgacccttttgaacaaggattcccgagaaagcaccaagagggtagagaaggacattgtcttctgtagtaataactgctttattctttattcatcaactgcacaagcgaaaaactcagaaaacaaggaatccattccttcattgccacaatcacctatgagagaaacgccttccaaagcatttcatcagtacagcaacaacatctccactttggatgtgcactgtctcccccagctcccagagaaagcttctccccctgcctcaccacccatcgccttccctcctgcttttgaagcagcccaagtcgaggccaagccagatgagctgaaggtgacagtcaagctgaagcctcggctaagagctgtccatggtgggtttgaagattgcaggccgctcaataaaaaatggagaggaatgaaatggaagaagtggagcattcatattgtaatccctaaggggacatttaaaccaccttgtgaggatgaaatagatgaatttctaaagaaattgggcacttcccttaaacctgatcctgtgcccaaagactatcggaaatgttgcttttgtcatgaagaaggtgatggattgacagatggaccagcaaggctactcaaccttgacttggatctgtgggtccacttgaactgcgctctgtggtccacggaggtctatgagactcaggctggtgccttaataaatgtggagctagctctgaggagaggcctacaaatgaaatgtgtcttctgtcacaagacgggtgccactagtggatgccacagatttcgatgcaccaacatttatcacttcacttgcgccattaaagcacaatgcatgttttttaaggacaaaactatgctttgccccatgcacaaaccaaagggaattcatgagcaagaattaagttactttgcagtcttcaggagggtctatgttcagcgtgatgaggtgcgacagattgctagcatcgtgcaacgaggagaacgggaccatacctttcgcgtgggtagcctcatcttccacacaattggtcagctgcttccacagcagatgcaagcattccattctcctaaagcactcttccctgtgggctatgaagccagccggctgtactggagcactcgctatgccaataggcgctgccgctacctgtgctccattgaggagaaggatgggcgcccagtgtttgtcatcaggattgtggaacaaggccatgaagacctggttctaagtgacatctcacctaaaggtgtctgggataagattttggagcctgtggcatgtgtgagaaaaaagtctgaaatgctccagcttttcccagcgtatttaaaaggagaggatctgtttggcctgaccgtctctgcagtggcacgcatagcggaatcacttcctggggttgaggcatgtgaaaattataccttccgatacggccgaaatcctctcatggaacttcctcttgccgttaaccccacaggttgtgcccgttctgaacctaaaatgagtgcccatgtcaagaggtttgtgttaaggcctcacaccttaaacagcaccagcacctcaaagtcatttcagagcacagtcactggagaactgaacgcaccttatagtaaacagtttgttcactccaagtcatcgcagtaccggaagatgaaaactgaatggaaatccaatgtgtatctggcacggtctcggattcaggggctgggcctgtatgctgctcgagacattgagaaacacaccatggtcattgagtacatcgggactatcattcgaaacgaagtagccaacaggaaagagaagctttatgagtctcagaaccgtggtgtgtacatgttccgcatggataacgaccatgtgattgacgcgacgctcacaggagggcccgcaaggtatatcaaccattcgtgtgcacctaattgtgtggctgaagtggtgacttttgagagaggacacaaaattatcatcagctccagtcggagaatccagaaaggagaagagctctgctatgactataagtttgactttgaagatgaccagcacaagattccgtgtcactgtggagctgtgaactgccggaagtggatgaactgaaatgcattccttgctagctcagcgggcggcttgtccctaggaagaggcgattcaacacaccattggaattttgcagacagaaagagatttttgttttctgttttatgactttttgaaaaagcttctgggagttctgatttcctcagtcctttaggttaaagcagcgccaggaggaagctgacagaagcagcgttcctgaagtggccgaggttaaacggaatcacagaatggtccagcacttttgcttttttttcttttccttttcttttttttttgtttgttttttgttttgtttttcccttgtgggtgggtttcattgttttggttttctagtctcactaaggagaaacttttactggggcaaagagccgatggctgccctgccccgggcaggggccttcctatgaatgtaagactgaaatcaccagcgagggggacagagagtgctggccacggccttattaaaaaggggcaggccctctaacttcaaaatgtttttaaataaagtagacaccactgaacaaggaatgtactgaaatgacttccttagggatagagctaagggataataacttgcactaaatacatttaaatacttgattccatgagtcagtttattgtagtttttgatttctgtaaaataagagaaacttttgtatttattattgaataagtgaatgaagctatttttaaataaagttagaagaaagccaagctgctgctgttacctgcagaactaacaaaccctgttactttgtacagatatgtaaatattttgagaaaaaatacagtataaaaatagttattgaccaaatgctaccaggctctgcagcagctcgggggcttataaaatgttcatagggatgttacaatataattttgtgttataaaatatgccattataattatgtaataaccaaaatttcaacctagagtgttgggggttttttggaaaccgcagtctattagtactcaatggttttatacaccttacttctgacagagcggggcgtatgctacgactacaacttttatagctgttttggtaatttaaactaattttttcatattatattgttgcatccctacttcttcagtcaggtttttttgtgcttacaatttgtgataactgtgaataactgcttaaaaatacacccaaatggaggctgaattttttcttcagcaaaagtagttttgattagaactttgtttcagccacagagaatcatgtaaacgtaataggatcatgtagcagaaacttaaatctaaccctttagccttctatttaacacaaaaatttgaaaaagttaaaaaaaaaaaggagatgtgattatgcttacagctgcaggactctggcaatagggtttttggaagatgtaattttaaaatgtgtttgtatgaactgtttgtttacatttctttaataaaaaaaacactgttttgtgtttgcttgtagaaacttaatcagcattttgaaccaggttagctttttattttgtacttaaaattctggtactgacacttcacaggctaagtataaaatgaagttttgtgtgcacaattcaagtggactgtaaactgttggtatattcagtgatgcagttctgaacttgtatatggcatgatgtatttttatcttacagaataaatcaattgtatatatttttctcttgataaatagctgtatgaaatttg

SEQ ID NO: 7102 - protein, 4911 aa, Homo sapiens; identical to SEQ ID NO: 971

SEQ ID NO: 7103 - DNA, 997 bp, Homo sapiens
ctgctcgctccatgttgccgcctctcccggtacctgctgctgctcccggggctgcgggaaatgcgagaggctgagccggggaggaggaacccgagcagcagcggcggcggcggcggccgcggcggcgggagccccccaggaggaggaccgggatccatgtgtctttcctggtgactaggatgtcgtcggaggaggacaagagcgtggagcagccgcagccgccgccaccaccccccgaggagcctggagccccggccccgagccccgcagccgcagacaaaagacctcggggccggcctcgcaaagatggcgcttcccctttccagagagccagaaagaaacctcgaagtagggggaaaactgcagtggaagatgaggacagcatggatgggctggagacaacagaaacagaaacgattgtggaaacagaaatcaaagaacaatctgcagaagaggatgctgaagcagaagtggataacagcaaacagctaattccaactcttcagcgatctgtgtctgaggaatcggcaaactccctggtctctgttggtgtagaagccaaaatcaggttagagaatgaatgcagctggattggatattagtgacaggaataaagcagtgaaatgactatagagaaaattcaaggagtatgagtttaggatgaaaatctgggtgggattttatgatttagtagctaaatttgaagctgatacctctgtgtttagttgggatgagttacatctgtgggcttaggcaattgtagagcagggcagcacactacggttttactctagtcacctcaggccagtacagaatattaccaatgtgctgttcctggcagaagacataaatgtgagcatttagcatgaggattaatttttgatacttacctgtaaacttaagttgatagttttgttccttaccttctccccattcattaaaaaaggaaacacaggacattataacctattttttttctttctttttctcccccccc

SEQ ID NO: 7104 - protein, 140 aa, Homo sapiens
MSSEEDKSVEQPQPPPPPPEEPGAPAPSPAAADKRPRGRPRKDGASPFQRARKKPRSRGKTAVEDEDSMDGLETTETETIVETEIKEQSAEEDAEAEVDNSKQLIPTLQRSVSEESANSLVSVGVEAKIRLENECSWIGY

SEQ ID NO: 7105 - DNA, 403 bp, Homo sapiens
tgtagatttggaaagtattgagtaggagatgataatctataatcaggattctgagttggtaagattttatagatctgaaaaaagtaatttcttgaccttggcctcaataagaaagtcagaacttgacccttatttaccagcaccatcccccccaccacaatatttaaagtgtttaaatcatttattttgaaattcttatgtgatccaagaccactgtgcatttaagctagtttatttgtttattaaaacaaaagaagtagactgcagttacgttgtttctttttctgttgtttggtgtcaggagtagaatacagagaatcacttgaacccaggaggcggaggttgcagtgagccaagatggcgccactgcactccagcctgagtgacagagggagactgtctc

SEQ ID NO: 7106 - protein, 53 aa, Homo sapiens
MIIYNQDSELVRFYRSEKSNFLTLASIRKSELDPYLPAPSPPPQYLKCLNHLF

SEQ ID NO: 7107 - DNA, 869 bp, Homo sapiens
catgttggtcaggctggtctcgaactcctgacctagtggtccgcccgccttggcctcccagagagttgggattacaggcatgagccatcgcgtctggcctcatacattttctaaatgacttttgtaaatttttttttttttttgagacggagttttgctcttgtcacccggatccagcctggacaaagtgagaccctgtctccgaaaaaagaaattgttataatgaatgaatagatttacattgttagtttagttttgttttttttctcagaagtgtagagtttgttcttagtctgtccatctgtatacaagcatgaactgtacagtcaactgccttgtagaggggctggtttttggttatgtcttaaatcttaactccttttaattattctgaattttagtgggattcctatatcattgtagatttggaaagtattgagtaggagatgataatctataatcaggattctgagttggtaagattttatagatctgaaaaaagtaatttcttgaccttggcctcaataagaaagtcagaacttgacccttatttaccagcaccatcccccccaccacaatatttaaagtgtttaaatcatttattttgaaattcttatgtgatccaagaccactgtgcatttaagctagtttatttgtttattaaaacaaaagaagtagactgcagttacgttgtttctttttctgttgtttggtgtcaggagtagaatacatttggccagcttcatgagaggattagaaagttggagaaggaaaaatagaattgtttacggagccaggagaataattgtctataattatagatgcttgttttgaggtttggaaaaggtggtttaaaaaacttttaagaa

SEQ ID NO: 7108 - protein, 39 aa, Homo sapiens
MTFVNFFFFLRRSFALVTRIQPGQSETLSPKKEIVIMNE

SEQ ID NO: 7109 - DNA, 1030 bp, Homo sapiens
aaaaagctgggattacaggcgcatgccaccacacccagctaatttttgtgtttttagtagagatggatggtgaaaccccgtctctactaaaactacaaaaattagccagtcatggtggcaggcgcctgtaatcccagctactcgggaggctgaggcaggagaattgcttgaacctgggtggcagagtttgcagtgagctgaaatcgtgccattgcactccagcctgggcgacagagtgagactctgtctcaaaaacaaaacaaaacaaaacaaaaaaaaactctggggagtatattctttcagtatacatttatgcatttaaaaaaagaaaaaagcttaatacttcagaaatggtaaatcatttgacaaatgagaaaaccaaattctgggggcatcactgattatagagcctagaccttctggattcaagtctaggttgtactacatattagctgtttgaccttgggcaagttacttaaattttttgtgctatggttgcctcacctgtagagaggacgtaataatacacctaatttaggattgttatgaatttatatatatgtgtagaatttagaacagtttctggcatagactaagtcctattaagaggtgctgttgtaaggatttaactactgttgttactgtcattgccactaatcatcaattatcaatcagttgcctgttataaactatttagagacagaagtgattagaaaccaaactcactccaaaaatgccatgatataaggctgggtatgttggctcacacctgtaatcccagtgctttgggaagcaaaggtgggaggattgcttaagtctaggcgttagagaccagcctgggcaacatagtgagatccccatctctacaaaaaattaaaaatagctggatgcggtggtatgcacttgtagctccagttacttgggaggctgagatgggaggattgcttgagcccaggagttggaggctacagtgagctgtgatcatgccactgcactccagcctgggtgacagagcgagaccctatctccc

SEQ ID NO: 7110 - protein, 41 aa, Homo sapiens
AEIVPLHSSLGDRVRLCLKNKTKQNKKKLWGVYSFSIHLCI

SEQ ID NO: 7111 - DNA, 996 bp, Homo sapiens
cgcgaggagcaaatgtgcgcccgcacggcgagggcagcccgggcttcgctggttctcgccgaggtctttcctcgtagcgcccacactacggggaggaaaaggaatggagtcaacttcgttcgaatccaacgccagcaagtcatctttgcactcataaccacatcttttatggaacatcaagcctactctgaggtacaggctttcagaagcctgaatttggaggaccatgcctgaaccaaatggagtctccagaatcaaaactgctcaaaataatcattcatggttctcagaccaaataagatctacttagaaacatttctcgacagcacgctgccatgccgacgcagaccccactctgcacgccagcccccctgcacccaccatggccacagttcagcagctagaaggaagatggcgcctggtggacaacaaaggctttgatgaatacatgaaggagctaggagtgggaatagctttgtgaaaaatgggcgcaatggccaagccagattgtatcatcacttgtgatagcaaaaacctcaccataaaaactgagagcactttgaaaacaacacagttttctggtaccctgggagagaagtttgaagaaaacacagctgatggcagaagaactcagactgtttgcaactttacagatggtgcattggttcagcatcaggagtgggatgggaaggaaagcacaataacaagaaaactgaaagatgggaaattagtggtggagcgtgtcatgaaccatgtcgcctgtactcggatctatgaaaaagcacaataaagattccatcatcactttggacaggagttaaccaagagaatgaccaagctcagttcaatgaacaaatctccatactgtttctttcttttttttttcattactgtgttcaattatctttatcacaaacattttacatgcagctatttcaaagtgtgttggattcattaggatcatccctttggttaataaataaatgagtttctgct

SEQ ID NO: 7112 - protein, 73 aa, Homo sapiens
MCARTARAARASLVLAEVFPRSAHTTGRKRNGVNFVRIQRQQVIFALITTSFMEHQAYSEVQAFRSLNLEDHA

SEQ ID NO: 7113 - DNA, 2036 bp, Homo sapiens
agttcctttacagaatcaaccctggggtggctttaggactgggctctttggagctcatccttggacccacagtggagcgctggtctgtgctaacatcttcagataccaatcaatgggcatttggctccttgcttccactgacctcttgagtactttcaacgatcggtgtcaagggtgcccctgctgctgtttctagagcatctctgcaacccacggtggcctctcctctttctgcgggccatggacagcacagtcccttcagccctggagctgccccagcggctggcactgaacccaagggagagcccaaggagtccggaagaggaggagccccacctgctgagcagcttggctgcagtccagaccctggccaatgtcatccggccttgctatggcccccatggccggcagaagttcctggtgaccatgaaaggagaaacagtgtgcacggggtgtgccactgccatcctcagggccctggagctggagcacccagcggcatggctcctccgggaagcagcccaaacccaagcagagaatagtggggatggcacagccttcgtggttctgctgacggaagccttgctggaacaggcagagcagctgctgaagttcggcctgcctcgcccgcagctccgggaggcctacgccacagccactgcagaggtcctggccacactgccctccctggccatccaatctctggggcctttggaagatccgtcctgggccctccattctgtgatgaatacccacaccctgccccccatgaaccacttgaccaagctggtggcccacgcctgctgggctatcaaggagctagacggcagcttcaagcctgagcgtgttggggtgtgcacgctgcacggggggacactggaggattcctgcctcctccaggggttagcaatatctgggaagctctgtgggcaaatggccgcagtgttaagtggtgccagggtggctctctttgcttgcccctttggtcctgcccatccaaatgcaccagcaacggcctgtctttctagtcctgctgatctagctcaatttagtaaaggaagtgaccaattactagaaaagcaagtaggccagctggcagccgcgggaattaatgtggcagtggtgttgggggaggtcgacgaggagaccctcacactggcggacaagtatggcatcgtggtgattcaggctaggtctcggatggagatcatttacctgagtgaggtgttggacacaccgctgctgcctcgtctgctccctccccagaggccaggcaagtgccagagggtttacaggcaggagctgggagatggtttggctgtggtatttgaatgggaatgtacaggcacacctgccctcaccgtggttctcaggggagccaccacccaggggctgcggagtgcagagcaggccgtctaccacagcattgatgcctatttccagccatgtcaagatcccagactgatcccaggagctggggccacagaaatggctttggcaaaaatgctctctgataaaggaagcagattggaagggcccaatgggcctgcattcctagcatttgcccgggccctgaagtatcttcctaaaaccttggcagagaatgcaggcttagctgtctcagacgtggttgcagaaatgagtggagtgcaccaaggtgggaacctcctaatgggtgtgggagctgaagggataataaatgtggcccaggaaggggtgtgggacaccctaatagtcaaagcccaaggatttcgagcagtggctgaggtggtgctacagctcgtgactgtagatgaaatcgtagtggccaagaaaagtcccacacatcagcagatctggaatcctgactctaagaagacaaagaaacgcccacctcctgtggaaaaaaaaaaaatccttggaatgaataactagtgataccctcaataaaacagggattgccaagaagggaacaatcaccccaaaaatgaatgtttgcctttattccatgtttggtacttgattcagtttctttaaataaaaacatgaaggaacat

SEQ ID NO: 7114 - protein, 557 aa, Homo sapiens; identical to SEQ ID NO: 974

SEQ ID NO: 7115 - DNA, 3067 bp, Homo sapiens
tttgactggccgtagagtctgcgcagttggtgaatggcgttggtggcgggaaagttgagtctctcctgcgccgagccttcggggcgatgtgtagtgccttccatagggctgagtctgggaccgagctccttgcccgacttgaaggtagaagttccttgaaagaaatagaaccaaatctgtttgctgatgaagattcacctgtgcatggtgatattcttgaatttcatggcccagaaggaacaggaaaaacagaaatgctttatcacctaacagcacgatgtatacttcccaaatcagaaggtggcctggaagtagaagtcttatttattgatacagattaccactttgatatgctccggctagttacaattcttgagcacagactatcccaaagctctgaagaaataatcaaatactgcctgggaagattttttttggtgtactgcagtagtagcacccacttacttcttacactttactcactagaaagtatgttttgtagtcacccatctctctgccttttgattttggatagcctgtcagctttttactggatagaccgcgtcaatggaggagaaagtgtgaacttacaggagtctactctgaggaaatgttctcagtgcttagagaagcttgtaaatgactatcgcctggttctttttgcaacgacacaaactataatgcagaaagcctcgagctcatcagaagaaccttctcatgcctctcgacgactgtgtgatgtggacatagactacagaccttatctctgtaaggcatggcagcaactggtgaagcacaggatgtttttctccaaacaagatgattctcaaagcagcaaccaattttcattagtttcacgttgtttaaaaagtaacagtttaaaaaaacatttttttattattggagaaagtggggttgaattttgttgatatacatcataaaatagtcttttgcagggtactacgcaagccttaaaatttttcttaagacagagtcttgctctgtctcccaggctggagtgcagtggcacaatcatggctcactgcagccttgaactcctggcctcaagggatcctcctatgtgtgcctcctagagtgcagggattacaggcgtgagccactgctcgtggccaaaagttttctttttttttttttttctttttgaaacagtcttactctgtctcccaggctgctggagtgcagtggcacaatctcggcccgctgcagcctctgcctcttgggttcaagtgattcttccacctcagcctcccaggtagctgggattacaggcacccaccaccacgcctggctaatttttgtatttttaatagagacggggtttcaccatgttggccaggctggtctcgaactcctgacctcaagtgatccacccacctcggcctcccaaagtgctaggattacaggcccgtgcccagccctaaagttttaaactctaggggaattaacagtatttctttacagaatggatttgttaaactagcacagtaaaagtaaagactattctgtttctaggctgttgaatcaaagtgattttagcaattaaactttgtattaatttaccaccaatatttcttcacaaaggaacttttaaaagattatctcagaaagtaaatctgagaggtaagaagtaataatgagtaaatggtaagtacttgagtaaatctaaagaaatattgatagtaaggcaatcctaagcaaaaagaacaaagctggaggcatcacgctacccagcttcaaactatactacaaggctacagtaaccaaaacagcatagtactggcacaaaaacacacgtagactgatggaacagaatagagaatttagaaatgagaccacacacctataatttttttgatcttcgatgaacctgacaaaaacaagcaatgggcaatggattctctattcaataaatcgtgctgggataactggccagccatatggaaaagattgaaaatggacgccttccttatgccatatacaaaaattaactcaagatggattaaagacttaatgtaaaacccaaaacagtaaaaatcctggaagacaacccaggcagtaccattcaggacataggcacaggcaaagatttcatgacgaagacgccaaaaacaattgcaacagaagcaaaaattcacaaatgggatctaattaaactaaagagctgcacagcaaaagaaactatcaagagagtaaacagacagcttacagaatgggagaaaattgttgcaaactatgcatctgagaaaggtctgaaatccagcatctatacgtaatttaaacaaatttagaagaaaaaaccaccccattaaaaagtgggcaaaggacatgaacagacacttttcaaaagaagacatctgtggccaacaatcctatggaaaaaagcccagcatcactgatcattagagaaatgcaaatcgaaacaacaacgagataccatctcacaccagtccaaatggctattataaaaatgtcagaaaataacagatgctggtgaggttgtggagaaaaagatatgcttatacactgttggtggaaatgtaaattaaattagttcagccattgtggaagacagtgtggggataaagacagagataccattcaacccagcaatctcattactgggtatatacccaaaggaatagaaatcattgttataaagacacatgcacgcgtatgttcgttgcagcactgcccatcagtgacagactggattaaaaaaatgtggtacatacacaccagggaatactatacagccataaaaaggaacaagactgactgggcgtggtggctcatgcctgtgatcctagcactttgcgaggccgaggtgggtggattgcccgcgctcaggaggtcaagaccagcctgggcaacacggtgaaaccccatctctattaaaatacaaaaaattagctgggcatggtggtgcgtgcctgtagtgccagctactcaggaggccgaggcaggagaattgctggaacccaggaggtggaggttgcagtgagctgagatcgcgccattgcactcccgcctgggcgactccatctct

SEQ ID NO: 7116 - protein, 280 aa, Homo sapiens; identical to SEQ ID NO: 978

SEQ ID NO: 7117 - DNA, 1581 bp, Homo sapiens
actggccgtagagtctgcgcagttggtgaatggcgttggtggcgggaaagttgagtctctcctgcgccgagccttcggggcgatgtgtagtgccttccatagggctgagtctgggaccgagctccttgcccgacttgaaggtagaagttccttgaaagaaatagaaccaaatctgtttgctgatgaagattcacctgtgcatggtgatattcttgaatttcatggcccagaaggaacaggaaaaacagaaatgctttatcacctaacagcacgatgtatacttcccaaatcagaaggtggcctggaagtagaagtcttatttattgatacagattaccactttgatatgctccggctagttacaattcttgagcacagactatcccaaagctctgaagaaataatcaaatactgcctgggaagattttttttggtgtactgcagtagtagcacccacttacttcttacactttactcactagaaagtatgttttgtagtcacccatctctctgccttttgattttggatagcctgtcagctttttactggatagaccgcgtcaatggaggagaaagtgtgaacttacaggagtctactctgaggaaatgttctcagtgcttagagaagcttgtaaatgactatcgcctggttctttttgcaacgacacaaactataatgcagaaagcctcgagctcatcagaagaaccttctcatgcctctcgacgactgtgtgatgtggacatagactacagaccttatctctgtaaggcatggcagcaactggtgaagcacaggatgtttttctccaaacaagatgattctcaaagcagcaaccaattttcattagtttcacgttgtttaaaaagtaacagtttaaaaaaacatttttttattattggagaaagtggggttgaattttgttgatatacatcataaaatagtcttttgcagggtactacgcaagccttaaaatttttcttaagacagagtcttgctctgtctcccaggctggagtgcagtggcacaatcatggctcactgcagccttgaactcctggcctcaagggatcctcctatgtgtgcctcctagagtgcagggattacaggcgtgagccactgctcgtggccaaaagttttctttttttttttttttctttttgaaacagtcttactctgtctcccaggctgctggagtgcagtggcacaatctcggcccgctgcagcctctgcctcttgggttcaagtgattcttccacctcagcctcccaggtagctgggattacaggcacccaccaccacgcctggctaatttttgtatttttaatagagacggggtttcaccatgttggccaggctggtctcgaactcctgacctcaagtgatccacccacctcggcctcccaaagtgctaggattacaggcccgtgcccagccctaaagttttaaactctaggggaattaacagtatttctttacagaatggatttgttaaactagcacagtaaaagtaaagactattctgtttctaggctgttgaatcaaagtgattttagcaattaaactttgtattaatttaccacc

SEQ ID NO: 7118 - protein, 280 aa, Homo sapiens; identical to SEQ ID NO: 978

SEQ ID NO: 7119 - DNA, 3772 bp, Homo sapiens
gctgggcagtgcttctgggccctctgctgctcctgcttgtcggttgctaggcgctgggacgcgcctcccgaagggtgcggggcacaggtggcctcttcggggtggaccgcgcctggccggggccgaggacaccgcggccgcccgggcctgcgggaagcgatggagcccgggaagagaagaaccaaagatgatacctggaaagcagatgacctcagaaaacatctctgggccatacagtcaggtggttccaaggaagaaagaaagcacagagagaagaagctgcgtaaggagtctgagatggaccttcctgaacataaggagccgaggtgcagggatcccgaccaggatgccaggagcagagacagggtggccgaagtccacaccgctaaggagagtcctcgtggggagagggacagagacagacagagggagaggagaagagacgcaaaagaccgggagaaagaaaagctgaaggagaaacatcgagaggcagaaaagtctcacagcagaggaaaggacagggaaaaagaaaaagacagaagggcccggaaggaagagctccggcagaccgtggcccaccacaacctgctgggccaggagacacgcgaccggcagctcctggagcgggcggagaggaaaggccgctcagtaagtaaagtaagaagtgaagagaaagatgaagactctgaaagaggagatgaagatagagaaagaagataccgagaaagaaagctgcagtacggagacagcaaggacaaccctctcaagtactggctttataaagaagaaggcgagaggagacacaggaagcccagagagccagatcgagacaacaaacaccgagaaaaaagcagcacaagggaaaaaagagagaaatattccaaagagaaaagtaattcattctctgacaaaggggaagaaagacataaagaaaagcgacacaaagaaggttttcattttgatgatgagaggcaccaaagcaacgtggatagaaaagagaaatcggcaaaagatgagcccaggaaaagggaatcccagaatggtgaacacagaaatcgaggtgcaagctcaaaaagagatgggaccagcagccagcatgctgagaatttagtaaggaatcatggaaaagataaagattcaagacggaagcatggccacgaggaaggctcttctgtgtggtggaagctggaccagaggccgggaggcgaggaaaccgtggaaattgaaaaggaagaaactgatttagaaaatgctagagctgatgcatatacagccagttgtgaagatgattttgaagactatgaagatgactttgaggtttgtgatggtgatgatgatgaaagcagtaatgaacctgagtcaagagaaaaactggaagaacttcctctagctcaaaaaaaggaaatacaagaaattcaaagagctattaatgcagaaaatgaaaggattggcgagttatctttgaaactgtttcagaagcgaggtagaacagaatttgaaaaggagcccaggacagatacaaacagttccccttccagagcctctgtttgtggaatttttgtggattttgcctcagcttcacaccgtcaaaagagtcggactcaggcccttaagcaaaagatgcgaagtacaaaactgcttcggctcattgacttagatttttcatttactttctctctcttggatctaccaccagtaaatgaatatgacatgtatatcagaaactttgggaaaaaaaataccaagcaggcatatgttcagtgtaacgaagataatgttgaaagagacattcaaacggaggaaatagagaccagggaagtgtggacccagcacccgggagaaagtactgttgtatctggaggcagtgaacaaagagatacctctgatgctgtagttatgccaaagattgatactccaaggttatgtagctttctgcgggctgcttgtcaggtgatggccgttttgctggaagaggatcgcttggcagctgaacccagctggaatcttagggctcaagacagggccctgtattttagtgacagctcatctcagctgaacaccagtctaccattccttcaaaatcgaaaagtatcctccttgcacacctcccgagttcagaggcagatggtggtctccgttcacgacttacccgagaagagctttgtgcccctgctggacagcaaatacgtcctctgtgtgtgggatatttggcagccttcagggccacagaaagttctgatatgtgagtcccaggtcacgtgttgctgcttgagccctttgaaagcatttttactgtttgccggaacagcgcacggctcagttgtcgtctgggatttgagagaagactcaaggctgcattactctgtgacgctgagcgatggcttctggacgttccggaccgccacgttttccaccgatggaatccttacctcagtaaaccaccgaagccctcttcaagcagtagaacctatctcaacgtccgtccacaaaaagcagagctttgtgctttcacccttttctactcaagaagaaatgtcaggtttgtccttccacatcgcttccttggatgagagtggggttctcaatgtatgggtggttgttgaattaccaaaggcagacatcgcaggttcaataagtgatttaggtctgatgcctggagggagggtcaagctggtacatagtgctctgatccagttgggtgacagtctttcccataaaggtaatgaattttggggcactacacaaacactgaatgttaaatttctgccttcagatcctaatcactttattattggcacagacatgggtctcataagccatggcacaagacaagatttgagagtggctcccaaactattcaaacctcagcaacatggtataagaccagtgaaagttaatgtcattgatttttcaccatttggagaaccaatatttttggccggctgttcggacggaagcatcaggctgcaccagctgagctccgcgtttccgctcctgcagtgggacagcagcacggacagccatgcggtcaccggcctgcagtggtccccaaccaggcctgccgtgttcctggtgcaggacgacacatccaacatctacatctgggacctcctccagagcgatctgggtcctgtcgccaaacagcaggtctcccccaacaggctggtggccatggctgcggtgggtgagcctgagaaggctggtggcagcttcctggccctggtgctggccagggcgtctggctccatcgacatccagcacctgaagaggcggtgggcggccccggaggtggacgagtgcaacaggctgcgtctgcttttgcaggaagccctgtggccagagggaaaactgcacaagtagcgggtgtggctgagaggaccgcgtttctgtaatgacccagatttaaaagacataaggtggataattctacatttgtgtgcaagtatatttatgtatatagactatgtatattctgtatataatttattttacatgaatatgtctttggtattcccagtaaatagatgactacttttgagtggaaacaaagaacattctagcatttacaaaacttccaggggaatgtagagccacgtccagggtgctcttttctgagagtatttcgagttatttttagaacagtttaaatattgtcacattactgctagattttaaacagcctaccatgaaaatgtatcttaatgaactattttcttatgcataaagtatgtgaacacatgtctaaattaaaaggaattactccaccgaaatg

SEQ ID NO: 7120 - protein, 1066 aa, Homo sapiens
MEPGKRRTKDDTWKADDLRKHLWAIQSGGSKEERKHREKKLRKESEMDLPEHKEPRCRDPDQDARSRDRVAEVHTAKESPRGERDRDRQRERRRDAKDREKEKLKEKHREAEKSHSRGKDREKEKDRRARKEELRQTVAHHNLLGQETRDRQLLERAERKGRSVSKVRSEEKDEDSERGDEDRERRYRERKLQYGDSKDNPLKYWLYKEEGERRHRKPREPDRDNKHREKSSTREKREKYSKEKSNSFSDKGEERHKEKRHKEGFHFDDERHQSNVDRKEKSAKDEPRKRESQNGEHRNRGASSKRDGTSSQHAENLVRNHGKDKDSRRKHGHEEGSSVWWKLDQRPGGEETVEIEKEETDLENARADAYTASCEDDFEDYEDDFEVCDGDDDESSNEPESREKLEELPLAQKKEIQEIQRAINAENERIGELSLKLFQKRGRTEFEKEPRTDTNSSPSRASVCGIFVDFASASHRQKSRTQALKQKMRSTKLLRLIDLDFSFTFSLLDLPPVNEYDMYIRNFGKKNTKQAYVQCNEDNVERDIQTEEIETREVWTQHPGESTVVSGGSEQRDTSDAVVMPKIDTPRLCSFLRAACQVMAVLLEEDRLAAEPSWNLRAQDRALYFSDSSSQLNTSLPFLQNRKVSSLHTSRVQRQMVVSVHDLPEKSFVPLLDSKYVLCVWDIWQPSGPQKVLICESQVTCCCLSPLKAFLLFAGTAHGSVVVWDLREDSRLHYSVTLSDGFWTFRTATFSTDGILTSVNHRSPLQAVEPISTSVHKKQSFVLSPFSTQEEMSGLSFHIASLDESGVLNVWVVVELPKADIAGSISDLGLMPGGRVKLVHSALIQLGDSLSHKGNEFWGTTQTLNVKFLPSDPNHFIIGTDMGLISHGTRQDLRVAPKLFKPQQHGIRPVKVNVIDFSPFGEPIFLAGCSDGSIRLHQLSSAFPLLQWDSSTDSHAVTGLQWSPTRPAVFLVQDDTSNIYIWDLLQSDLGPVAKQQVSPNRLVAMAAVGEPEKAGGSFLALVLARASGSIDIQHLKRRWAAPEVDECNRLRLLLQEALWPEGKLHK

SEQ ID NO: 7121 - DNA, 485 bp, Homo sapiens
gcatgctgagaatttagtaaggaatcatggaaaagataaagattcaagacggaagcatggccacgaggaaggctcttctgtgtggtggaagctggaccagaggccgggaggcgaggaaaccgtggaaattgaaaaggaagaaactgatttagaaaatgctagagctgatgcatatacagccagttgtgaagatgattttgaagactatgaagatgactttgaggtttgtgatggtgatgatgatgaaagcagtaatgaacctgagtcaagagaaaaactggaagaacttcctctagctcaaaaaaaggaaatacaagaaattcaaagagctattaatgcagaaaatgaaaggattggcgagttatctttgaaactgtttcagaagcgaggtagaacagaatttgaaaaggagcccaggacagagtctcactatgtctcccgtgctggagtacagtggcatgatctcggctcactgcaaccttcat

SEQ ID NO: 7122 - protein, 46 aa, Homo sapiens [sequence omitted]

SEQ ID NO: 7123 - DNA, 1266 bp, Homo sapiens
atgtcatttctgaaaacactggagcagttgaccagcatacaggaagataagatgttgagtatgaccctgaactctgaactacctgttttgtatctcttggagaaaataagactttcccactcgagcaggagtgtttactcccaggctcactcgaacagaagactttcccactcgagcaggaggcgcctttccaaggtgtttgtaaattgcccccaaacgtcaggtctgcagttggcatctcaccacttatgcctgcgcttcactgaggtccgcagggctatggaggctgagctgaaagcacttccaagtgattccccaaggaacgtcctcacaggagcgttcagaggggcccagccagtgctcttgctgctgaaggagcatcccagggagtgtgtgaagccaagataccgaacaagtcggcaagagacaaaaacggggagatgccaggacgagcatccgttctgctccgcagtggcccgggggccggtgttcccgcagacaccagcagctgatccgcgcacagaacaggaccccggccacggtgaggaagagagaacgcgcacgcttcagatctctggtcggagcgctgttatggagttggcggtggacctcacgagtgccgagtgcatttgctccccggggaggctcgatgctcagggactccaggcctcggcgtctgcagcagataatcacagaggcttgccaggtggcctccgtcgtggagagcaaggtgggacccaggccggcagcagcagcagcgaaatagatcaacagacaacagggtgttcaggacccagttcagggctggagaggacagagatcaacaaagaacttggtcatcgccaaggagcccgatgccggcctcagcaccacgctgtctccgctgccgctttaactgtggacgtggtgaccagcagccttccagaggtggcccctccaggaacggtggcatcagctctgtgcagggaggacagctgctcccagacgaagggaggaggcctgggtccccacacagtccctgattcagggtcgtgctggacacgtattctgcacggggcagattatgcggattttagccttgtggatcctacagccgcagccacagaaagatggagacaagggcacgtggctgtgtcccaggaaaactctctctacagctgccggccacttctggccgcctcccggtctagacgctcacatgagagaaaaacagatttaaaaaatcatttaagccattgcctcaaggccatttcacaaatccaatga

SEQ ID NO: 7124 - protein, 421 aa, Homo sapiens [sequence omitted]

SEQ ID NO: 7125 - DNA, 495 bp, Homo sapiens
atggcaccgcggccacacttctcagctctcagcactgtccccgcgacggaggagccgccccagcacagctctaagcgctgtccccccgacagaggagctgccccagtctcactctcagcgctgtccccgacaacggaggagccgtcccagtctcagctctcagcgctgtccccgacgacggaggagctgccccagtctcactctcagcgctgtccccccgacagaggagctaccccagtctcagctctcagcgctgtccccgacaacggaggagccgtcccagtctcagctctcagcgctgtcccccacgacggaggagccgccccacactgtcccccacgacggaggagccgccccagtctcagctctcagcgctgtccccgacgacggaggagccgccccagcacatccagcgacatggcaggggcaccatcctgggaggctccggacacaggagttacctggacccagcaggggaaacacagctgctgctaa

SEQ ID NO: 7126 - protein, 164 aa, Homo sapiens
MAPRPHFSALSTVPATEEPPQHSSKRCPPDRGAAPVSLSALSPTTEEPSQSQLSALSPTTEELPQSHSQRCPPDRGATPVSALSAVPDNGGAVPVSALSAVPHDGGAAPHCPPRRRSRPSLSSQRCPRRRRSRPSTSSDMAGAPSWEAPDTGVTWTQQGKHSCC

SEQ ID NO: 7127 - DNA, 711 bp, Homo sapiens
cctaagagggcaagcgggtggtactttctgtattttaatattgtgttagaatctgggacatctgattgctgaaatgagatgttagttggtacagggaggggtttccaggacccgcacgcccttgcggagtgcctgctggagggagccggtgtgtccaggacacccttgcggagtgtctgctggagggagccagtgtgtcagtgagatggctatgcccctgggctgctgtgtcccaggtttcctcagtctctaaccctttgttctcacaggggatggactcttgcttcttttcccaactccaccaagagggaccgtcccaggacgtccttccccgggcatctggccctacagctgcctgaggtctccatcaccgttggcgccatcagtctgctgtgcagccagctgttggtttggagagcctgaagaactgcagttcacgtctcatctaaaggagctgaaatgatattgcagctttttcttttggttgcgtgcagtgagaatctgggagctgaacctgttatctgcatggtcttcagaaatcaggcaaatgatgaagtcccaaaagaccagaaatatatttcagaagatgccagttactactttaaatgtcaaaccaacatttcagaaataactttcaatgattatttcctgccaagaaggtgaacgctggagaccttaatggtggaagatggagggcgtctttccttctgt

SEQ ID NO: 7128 - protein, 67 aa, Homo sapiens
MILQLFLLVACSENLGAEPVICMVFRNQANDEVPKDQKYISEDASYYFKCQTNISEITFNDYFLPRR

SEQ ID NO: 7129 - DNA, 3824 bp, Homo sapiens
atgagatgttagttggtacagggaggggtttccaggacccgcacgcccttgcggagtgcctgctggagggagccggtgtgtccaggacacccttgcggagtgtctgctggagggagccagtgtgtcagtgagatggctatgcccctgggctgctgtgtcccaggtttcctcagtctctaaccctttgttctcacaggggatggactcttgcttcttttcccaactccaccaagagggaccgtcccaggacgtccttccccgggcatctggccctacagctgcctgaggtctccatcaccgttggcgccatcagtctgctgtgcagccagctgttggtttggagagcctgaagaactgcagttcacgtctcatctaaaggagctgaaatgatattgcagctttttcttttggttgcgtgcagtgagaatctgggagctgaacctgttatctgcatggtcttcagaaatcaggcaaactcggaaaatgccaacgccaaaaatgctgatgggtgacaaagtgtcacaggtgtgatgcattacaaatctcaggacttttgttcactggatttgaaaggtcaagcttcacaggaaaatgatgaagtcccaaaagaccagaaatatatttcagaagatgccagttactactttaaatgtcaaaccaacatttcagaaataactttcaatgattatttcctgccaagaaggtgaacgctggagaccttaatggtggaagatggagggcgtctttccttctgttaagctgacaacttggcttccatcttgtgaggacctcaccctacctggtggcagaggacgtctgacgccctcaatcattgccgttacacttcccagcctggtggtcagtctcctggggtctgtgtgttaacaaaccatcgactggacaatcgcagttttccttatgaaggcttactttaaaaaggctctggattttcagaagcgaagtcgctttcatccccgattcagacccatcctagtggaggaaaaatcctaccagaagaagggctgaccataggaacttgccatttccttgaccccatcatatctgaggaaaaaacaacagaaaaggtcaaaacccacgtgtacgcccaacgtcctgattgacgactttgcctgcagcttctgctttcctgaaattcgctgctgcctttagaacccttgtctgcagccagtggggagttcaggacttaggcggagctgccccaccctcctgcttggcaccctgcaaatacatgccctcccttccatcgctgcagacctcagagtgggcgtccggtctcctgtgcgggatgagaatacacaccctcccttccatcgctgcagaccttagagtggatgtccggtctcctgtatgggatgagaatacacgccttcccttccatcgctgcagagtggacgtctggtctcctgtgtgggataatacacgccctcctttcaatcgctgcagacctcagagtggacgtccggtctcctgtgtgggataatacacgccctcctttcaatcgctgcggacctcagagtggatgtccggtctcctgtatgggatgagatacactccttcccttccactgctgcagacctcagagtggacgtccggtctcctgtgtgggatgagatacactccttcccttccactgctgcagacctcagagtggacgtccggtctcctttgtgggatgagaatacactccttcccttccatcactgcagacctcagagtggacgtccggtctcctgtgcgggacaagaatacactccttcccttccatcactgcagacctcagagtggacgtccagtctcctgtgcgggatgagatacactccttcccttccatcgctgcagacctcagagtggacgtccagtctctctgtgcgggccaagtgtacacagttttgttccgtcacaacttccacgacaggccagtgtgaggtttttgagctggtgctgactgaaaactgtcagctgcccaaggacctgggagctctgctccccactcctggtgtgcggtcttgcgcctggcctccctgcctaggttacatgcagtggtcatcccggtcgctcccacacccgtgtgggctctgggatcccctcttccagccagcccaggggacatctggctgtctcaggacccagccatctgtaaaaattaggcaggtcccttcagtatgctcctggtcaacaaagaaaaacttcaattttgagaatggcatctgtattccgaagtgttctctcagatgtttgagttccactaagtagattttcttagtctgctgtatcaatgacacagagagacgtgcattaaaacctcaaccatgtggatctatttcttttcagttaattttgcttcatgtatcttgaagctctgttatcaggtgcatgcacatttgggattgttatgctttcctgatgaactgaccttctttcattatgcaaggggaagaagatgctgcatacaggatggaatatccaggggaagacgtctaaggagagatgcccagctgggagtcctatgcaaggggaagaagatgctgcatacaggatgggatatccaggggaagatttctaagaagagatgcccagctgggagtcctatgcaaggggaagaagatgctgcatacaggatgggatatccaggggaagatttctaaggagagacacccggctggaagtcaagatatgtcagttgtttccattataataaaaccactcatgttagatgagctgaactttcccttttccccagttcttacgatcaaaaagtggctgtcctaaatttcatcactcaatatccttgctagagtcttcctttgtcagccaggctggagtgcaatgtgcaatggcacaatcttggctcactgcaacctctgtctcctgggctcaagcaattcttctgcctcagcctcctgagtagctgggattacaggtatgcaccaccatgcccaactaatttttgtatttcagtagagacgaggtttcaccatgttggccaggctggtctcgatctcctgacctcaggtaatctgcccaccttggcctctcaaagtgctgggattacagacatgagccatcatgcctggacataagtgagttttatattgtattataagactatgatacagtaaaaccatgaaatccaaatttataatatcacactacataatacaactgtaacctcaccgccctatcctgggatgtgtgtcatttttatagccaattatggcccccagctttagttttcttttgcttattggagagtgtaattctcccttattctttttgctttctacagtcttgtgtacatcagttatctgtttttgtccttttgccagtgttcaaagtgttatttttcgtatttacttaagctcctgcagggagattagaatttcttcccctaagaagaaataagtaatagcggagacctgctgggcactggtggcgccaggcttggctctggggctgcccatccatcctcacagcatggcgactggagggtcttgccctgaggtcccgtgtgcggagcagggcttggcattcactcctaggcactgctgactcagtctgtcctggtggtgctgggaggccgaaacccgtcatgcatgtaaaccgcggggccccgtctggcatggtgcacctgtgctgggagtgcctatagagtaggaaaagtattcctggacctttaaaaaacttaggccaaaaaagtgttttggttgaatctttggccaaattggaactgcaaactctgtattatctccccttttgtgaaattctatggaaaattcgagcaaataaatatgcatttcccagtg

SEQ ID NO: 7130 - protein, 148 aa, Homo sapiens
MRYTPSLPSLQTSEWTSSLSVRAKCTQFCSVTTSTTGQCEVFELVLTENCQLPKDLGALLPTPGVRSCAWPPCLGYMQWSSRSLPHPCGLWDPLFQPAQGTSGCLRTQPSVKIRQVPSVCSWSTKKNFNFENGICIPKCSLRCLSSTK

SEQ ID NO: 7131 - DNA, 4013 bp, Homo sapiens
atgagatgttagttggtacagggaggggtttccaggacccgcacgcccttgcggagtgcctgctggagggagccggtgtgtccaggacacccttgcggagtgtctgctggagggagccagtgtgtcagtgagatggctatgcccctgggctgctgtgtcccaggtttcctcagtctctaaccctttgttctcacaggggatggactcttgcttcttttcccaactccaccaagagggaccgtcccaggacgtccttccccgggcatctggccctacagctgcctgaggtctccatcaccgttggcgccatcagtctgctgtgcagccagctgttggtttggagagcctgaagaactgcagttcacgtctcatctaaaggagctgaaatgatattgcagctttttcttttggttgcgtgcagtgagaatctgggagctgaacctgttatctgcatggtcttcagaaatcaggcaaactcggaaaatgccaacgccaaaaatgctgatgggtgacaaagtgtcacaggtgtgatgcattacaaatctcaggacttttgttcactggatttgaaaggtcaagcttcacaggaaaatgatgaagtcccaaaagaccagaaatatatttcagaagatgccagttactactttaaatgtcaaaccaacatttcagaaataactttcaatgattatttcctgccaagaaggtgaacgctggagaccttaatggtggaagatggagggcgtctttccttctgttaagctgacaacttggcttccatcttgtgaggacctcaccctacctggtggcagaggacgtctgacgccctcaatcattgccgttacacttcccagcctggtggtcagtctcctggggtctgtgtgttaacaaaccatcgactggacaatcgcagttttccttatgaaggcttactttaaaaaggctctggattttcagaagcgaagtcgctttcatccccgattcagacccatcctagtggaggaaaaatcctaccagaagaagggctgaccataggaacttgccatttccttgaccccatcatatctgaggaaaaaacaacagaaaaggtcaaaacccacgtgtacgcccaacgtcctgattgacgactttgcctgcagcttctgctttcctgaaattcgctgctgcctttagaacccttgtctgcagccagtggggagttcaggacttaggcggagctgccccaccctcctgcttggcaccctgcaaatacatgccctcccttccatcgctgcagacctcagagtgggcgtccggtctcctgtgcgggatgagaatacacaccctcccttccatcgctgcagaccttagagtggatgtccggtctcctgtatgggatgagaatacacgccttcccttccatcgctgcagagtggacgtctggtctcctgtgtgggataatacacgccctcctttcaatcgctgcagacctcagagtggacgtccggtctcctgtgtgggataatacacgccctcctttcaatcgctgcggacctcagagtggatgtccggtctcctgtatgggatgagatacactccttcccttccactgctgcagacctcagagtggacgtccggtctcctgtgtgggatgagatacactccttcccttccactgctgcagacctcagagtggacgtccggtctcctttgtgggatgagaatacactccttcccttccatcactgcagacctcagagtggacgtccggtctcctgtgcgggacaagaatacactccttcccttccatcactgcagacctcagagtggacgtccagtctcctgtgcgggatgagatacactccttcccttccatcgctgcagacctcagagtggacgtccagtctctctgtgcgggccaagtgtacacagttttgttccgtcacaacttccacgacaggccagtgtgaggtttttgagctggtgctgactgaaaactgtcagctgcccaaggacctgggagctctgctccccactcctggtgtgcggtcttgcgcctggcctccctgcctaggttacatgcagtggtcatcccggtcgctcccacacccgtgtgggctctgggatcccctcttccagccagcccaggggacatctggctgtctcaggacccagccatctgtaaaaattaggcaggtcccttcagtatgctcctggtcaacaaagaaaaacttcaattttgagaatggcatctgtattccgaagtgttctctcagatgtttgagttccactaagtagattttcttagtctgctgtatcaatgacacagagagacgtgcattaaaacctcaaccatgtggatctatttcttttcagttaattttgcttcatgtatcttgaagctctgttatcaggtgcatgcacatttgggattgttatgctttcctgatgaactgaccttctttcattatgcaaggggaagaagatgctgcatacaggatggaatatccaggggaagacgtctaaggagagatgcccagctgggagtcctatgcaaggggaagaagatgctgcatacaggatgggatatccaggggaagatttctaagaagagatgcccagctgggagtcctatgcaaggggaagaagatgctgcatacaggatgggatatccaggggaagatttctaaggagagacacccggctggaagtcaagatatgtcagttgtttccattataataaaaccactcatgttagatgagctgaactttcccttttccccagttcttacgatcaaaaagtggctgtcctaaatttcatcactcaatatccttgctagagtcttcctttgtcagccaggctggagtgcaatgtgcaatggcacaatcttggctcactgcaacctctgtctcctgggctcaagcaattcttctgcctcagcctcctgagtagctgggattacagggcgctgggtgcccttccagggtgacctcacgggtgcccactgcagttcctgcttctccccacgggaactgagcgtgccgctgggaacacagcactcactgtgcacagttctgcacatggacttatgtggacaccacctgcttgcattcatcccctcctcctcatctctcccttgctgagaggcagcgtgcctgccgaacgcttcgtgctgtttctgcaatgctcacttgcggtcacatagttagacatccggatgatggatagatgaggagacacagtgcagactgggcgtggctgaccaccacacgtgcccctggagccatgggccgccggcttcatttccagggtggtgttacaatcaaaagaatgaacacatcaagagtgatttcaagtccaaccccttccctgtgttttctgcacagcttggaggccgtgcccaggtcctggatgttcctggtgacctttcctctttgccctttgctctcccacttggagctccatgctactccctcctgttgtactgaacctggccctcgttgccccttacgagggaagtccttgtcctctcatggcttccttcttgtccccttccctcagactcttcgtaataattatacaatactaattccaaatggaaactggaggcatggagcctatgccggcgtctccagcttctccagaggtaggaatggacactcaggtctccactgcatgctggtggatttgggagagtgtgatccatccaagccatgcgaaaatctgcacgactgagtcatgggacagtggagctttgtgatatcgcgtgcttttaaatccgaaaggacagtcatgatttaaggatttgaaagtcacacatttaacatctggattcacagtcataggtcttaaaccatgatagcttgtgcttctgaggtgcactgaattcatgcgtggctttcctagactttatcccatggaaccttcacgtgtcaggctatgtagagccctgaatctcaaagggagagcttggtcccagcaggtctcattattttgtattatattttaatagtttattttccctcttgcttcttca

SEQ ID NO: 7132 - protein, 168 aa, Homo sapiens [sequence omitted]

SEQ ID NO: 7133 - DNA, 4678 bp, Homo sapiens
ggcctccctgcctaggttacatgcagtggtcatcccggtcgctcccacacccgtgtgggctctgggatcccctcttccagccagcccaggggacatctggctgtctcaggacccagccatctgtaaaaattaggcaggtcccttcagtatgctcctggtcaacaaagaaaaacttcaattttgagaatggcatctgtattccgaagtgttctctcagatgtttgagttccactaagtaggggaagaagatgctgcatacaggatggaatatccaggggaagacgtctaaggagagatgcccagctgggagtcctatgcaaggggaagaagatgctgcatacaggatgggatatccaggggaagatttctaagaagagatgcccagctgggagtcctatgcaaggggaagaagatgctgcatacaggatgggatatccaggggaagatttctaaggagagacacccggctggaagtcaagatatgtcagttgtttccattataataaaaccactcatgttagatgagctgaactttcccttttccccagttcttacgatcaaaaagtggctgtcctaaatttcatcactcaatatccttgctagagtcttcctttgtcagccaggctggagtgcaatgtgcaatggcacaatcttggctcactgcaacctctgtctcctgggctcaagcaattcttctgcctcagcctcctgagtagctgggattacagttccaggtactgaatagaagctttacaaaagatcccggtaccggtaatagccctggggcgcccacttcacggggcctgcaggaagtcctgggaagggactgtttccacaagtggaacaagtgggccccccactgccctcgctgcctgcccctctctcctcattaaaccttcagagaacacaaaggagccgagagccccttttctctccatcttccaaagaagacttttcagtataaaaggtgccctaaatcctttgtgatgccgcccacaagcagcgtgcgctgacacaaagcaacgccgccggccactgctgcctgcagacaagaggccgactcttgtcctcgtctcgggtcccaagaacgggagtaagtttgtggactggcacgcagacttgtgtgcggggcagcccctggagacacaggcagctgcgatgtgagtgtgtcaggcagaggttcagctttacgtcagtgttaaagaaaaaaacctgtgaagaaactattcaagacatgcaaaaggaagtgtttcccacgcacccagggcaggatgctcggtgaggggtggtggagccgtagagcaaacatccttcgagagccaaatgtgcgtgacctttgacctttccccttcaggagtgtacagtgagggaatactcgggtaagcacagaaacacctgcaaaaacaactcacacattcgccagcagggagtcggtcaaaccaaccaggcccaggctgtggaatgttaggcggcggttaaaagtcacgagatacgcaccttcagatgggaaagatggacaccacctgtctcagcgggagaaagacagctgcagaagcttcacacaatttagcccgattcccacgaataaacagaagaaagggcagacaagtttgtaccgacggaggaaggcactgggaccccgcttcagtcgggcacgagtttcccccagagaggggaggaggcaggcagaggacttcactttctatgtaatctttgcctacagagtttgacgttttgtaactgtcctgtataatttgtcatctgaaagcctgaaaaaaatagccaattaaaaagctgccattggtgatgagaaagaacgaagctattgccacgggtggaggaggggcttctgcagatcggcccccggccctgcaccttctgcctcccatcagggctgagtctcctcaggcggctgaatatttcccacctcaggcaaatggacactaagctcctgagtcagacaaaacagtgactccctggagggctgtgtgcccagccccttctcccccttcccacctgctttgctcttaggaaagtcaccaaaggctggttggtgtggctcattctaggtttgactccttaggaatgtggcttttaccagcgtgctgtatccctcctgacaacacagccatctggtggagcgtggagttcattggaaatgcattttatttgcttgtagcatacatgtggctaaggctcagcacacacggagattcgcatatgtgtgcacacgccccacgcacacacccacacacgcatgtgcatcacatgaacgcgcgtgcacacacacactcctgcactcagtcctgctctattaacaggttcttgggctctgcagagctgacagaggccgtgttgggtgcggcaggacaaggctgggcgtgcaggcgcctcctccacagggcactgctcatgcgtcacagctgccagacggaggctccccaatggcgacgctctgacaggggtccgtgactctcctcagggagaggtggctgtttccaatgtcctccctggtgccctgtggctggcaggaccctgcccaccctctccctccccgtccaagctctgttttcatctgaatgcagcagccacgactaacacgccaagtgtgtcctccatgctccagagcctcagatctggtcagagcaagttcttactcagcatgcagatgtgaagtcaggctttattgaagtatttacacagctcattcccgccacgtggaggagtctgcgacattccacacacaatgacagttaaagacacctgctgaccactgggtcctgcttcccctgctcaccaggcatctgtcaggaaacagccggcccctctaccaggagaaaccagtcagctccgctgaacagtggcacatgtgcggttgaggggagattgtcccctgagcacacctgatgactgatgactgcccacacccaaccaccgaccatcaacaaccagtgcctggtaaccacctgacacgtccactcacgcccacttcctcagcgtcccctctgggtcacagctcagtgtcggcacctggccactgacccaacaccttcagttaccacaaatctttgtttcctcaaaaacctgagagtaggtgggggatgctcccttttgtcctttgaaagctgggcaaggctgggggtgggtctgtccaaaccctacaggggaggaacagccgaggggccgcactgaacctggggtctgcagcgtccacctgcctccctctcgctccacatgctcagccgtcctttcctgggcacctggcctgggccgtttactccccagtatccgtctgtgatggatcctctgcggcccccagaaatggtgggttgttctgtagatccgaccgcctcacctgtctccccaaaccaacctcgggttcattctcccagaagtccagggatgagcttgttgcagcagaggggtgtggccggcgtggcccagggtgtgcaggacagggtgcggacctttggggattgaggggtctctggacactgctgctttgctgtcctaacagcccctctgtccggcctcattttaccggggatatgggttttgcaaaccaaggtgacactgacaggatgtgtgagcttccctgtggctgcctcccggcacagctgtcccgacctttgacatcgcgccccagctggggtctgtgatgccaccaatgcacaggaacaagacattcatttttaagggaaaagtggagtcaaatgtgctcagaacaactgagtcccacagtcggggcacctgggccagggctgggcagcttgctgaggtccatcgagcgctgtgggggccagggcttggcacacacatggagactgtgccctgatatccccacccttctgcagctggctcagcaacgtccccagacaccctccccacatctgcaaaccacccttcgcctgaaggagcagccgctagggctgctgagcgccagctctggggaggagggcttgaaacagttttatatgttgttaaaataattcttatcctaagattatttttgttaaaaagagaataggtttccggttcccactcagctgtatcccgcaccccacgtaaccccatcaccaggggcccgcaggcctggccgcagctggcctggggctgagcgtcaggctctgcggctcccacagggcggcaggtgacctcctgaggcagagccagagctgctgagggtcccacggaacacctgtgtggagaggtcccctccttcatgaccttgctctcctgatctggttgtctcctcagcccgccttccgtggggaggcaaaacagccctgtggagttgggtggggcagggctcagccgggccgggtgggcgccccaagagagaggacgggctgccctcctgttgatttctcctggtcctaacgtcaggggggccctgactggcttccctctgtcctgcagatgagggggctacccttatgggacctgggaggccgccctgatgtgggacggatgtcacccggtggtcgcccaggctcgtgctgggccacacaactgcgtttccacatttcctccttggctcccctattctcttgggccgggcgcagtggctcacgccttaatcccagcactttgggaggccgaggcgggcccatcacgaggtcaggagatcgagaccatcctggctaacatggtgaaaccctgtctctactaaaaatac

SEQ ID NO: 7134 - protein, 128 aa, Homo sapiens
MWLLPACCIPPDNTAIWWSVEFIGNAFYLLVAYMWLRLSTHGDSHMCAHAPRTHPHTHVHHMNARAHTHSCTQSCSINRFLGSAELTEAVLGAAGQGWACRRLLHRALLMRHSCQTEAPQWRRSDRGP

SEQ ID NO: 7135 - DNA, 1417 bp, Homo sapiens
ggcttttaccagcgtgctgtatccctcctgacaacacagccatctggtggagcgtggagttcattggaaatgcattttatttgcttgtagcatacatgtggctaaggctcagcacacacggagattcgcatatgtgtgcacacgccccacgcacacacccacacacgcatgtgcatcacatgaacgcgcgtgcacacacacactcctgcactcagtcctgctctattaacaggttcttgggctctgcagagctgacagaggccgtgttgggtgcggcaggacaaggctgggcgtgcaggcgcctcctccacagggcactgctcatgcgtcacagctgccagacggaggctccccaatggcgacgctctgacaggggtccgtgactctcctcagggagaggtggctgtttccaatgtcctccctggtgccctgtggctggcaggaccctgcccaccctctccctccccgtccaagctctgttttcatctgaatgcagcagccacgactaacacgccaagtgtgtcctccatgctccagagcctcagatctggtcagagcaagttcttactcagcatgcagatgtgaagtcaggctttattgaagtatttacacagctcattcccgccacgtggaggagtctgcgacattccacacacaatgacagttaaagacacctgctgaccactgggtcctgcttcccctgctcaccaggcatctgtcaggaaacagccggcccctctaccaggagaaaccagtcagctccgctgaacagtggcacatgtgcggttgaggggagattgtcccctgagcacacctgatgactgatgactgcccacacccaaccaccgaccatcaacaaccagtgcctggtaaccacctgacacgtccactcacgcccacttcctcagcgtcccctctgggtcacagctcagtggcggcaggtgacctcctgaggcagagccagagctgctgagggtcccacggaacacctgtgtggagaggtcccctccttcatgaccttgctctcctgatctggttgtctcctcagcccgccttccgtggggaggcaaaacagccctgtggagttgggtggggcagggctcagccgggccgggtgggcgccccaagagagaggacgggctgccctcctgttgatttctcctggtcctaacgtcaggggggccctgactggcttccctctgtcctgcagatgagggggctacccttatgggacctgggaggccgccctgatgtgggacggatgtcacccggtggtcgcccaggctcgtgctgggccacacaactgcgtttccacatttcctccttggctcccctattctcttgggccgggcgcagtggctcacgccttaatcccagcactttgggaggccgaggcgggcccatcacgaggtcagga

SEQ ID NO: 7136 - protein, 51 aa, Homo sapiens
MTDDCPHPTTDHQQPVPGNHLTRPLTPTSSASPLGHSSVAAGDLLRQSQSC

SEQ ID NO: 7137 - DNA, 3943 bp, Homo sapiens
gtgcattgagcgcgctccagctgccgggacggagggggcggcccccgcgctcgggcgctcggctacagctgcggggcccgaggtctccgcgcactcgctcccggcccatgctggaggcggcggaaccgcggggacctaggacggaggcggcgggcgctgggcggcccccggcacgctgagctcgggatgcggacgctgctgcctcccgcgctgctgacctgctggctgctcgcccccgtgaacagcattcacccagaatgccgatttcatctggaaatacaggaggaagaaacaaaatgtgcagagcttctgaggtctcaaacagaaaaacacaaagcctgcagtggcgtctgggacaacatcacgtgctggcggcctgccaatgtgggagagaccgtcacggtgccctgcccaaaagtcttcagcaatttttacagcaaagcaggaaacataagcaaaaactgtacgagtgacggatggtcagagacgttcccagatttcgtcgatgcctgtggctacagcgacccggaggatgagagcaagatcacgttttatattctggtgaaggccatttatacactgggctacagtgtctctctgatgtctcttgcaacaggaagcataattctgtgcctcttcaggaagctgcactgcaccaggaattacatccacctgaacctgttcctgtccttcatcctgagagccatctcagtgctggtcaaggacgacgttctctactccagctctggcacgttgcactgccctgaccagccatcctcctgggtgggctgcaagctgagcctggtcttcctgcagtactgcatcatggccaacttcttctggctgctggtggaggggctctacctccacaccctcctggtggccatgctcccccctagaaggtgcttcctggcctacctcctgatcggatggggcctccccaccgtctgcatcggtgcatggactgcggccaggctctacttagaagacaccggttgctgggatacaaacgaccacagtgtgccctggtgggtcatacgaataccgattttaatttccatcatcgtcaattttgtccttttcattagtattatacgaattttgctgcagaagttaacatccccagatgtcggcggcaacgaccagtctcagtacaagaggctggccaagtccacgctcctgcttatcccgctgttcggcgtccactacatggtgtttgccgtgtttcccatcagcatctcctccaaataccagatactgtttgagctgtgcctcgggtcgttccagggcctggtggtggccgtcctctactgtttcctgaacagtgaggtgcagtgcgagctgaagcgaaaatggcgaagccggtgcccgaccccgtccgcgagccgggattacagggtctgcggttcctccttctcccgcaacggctcggagggcgccctgcagttccaccgcggctcccgcgcccagtccttcctgcaaacggagacctcggtcatctagccccacccctgcctgtcggacgcggcgggaggcccacggttcggggcttctgcggggctgagacgccggcttcctccttccagatgcccgagcaccgtgtcgggcaggtcagcgcggtcctgactccgtcaagctggttgtccactaaaccccatacctggaattggagtcgtgttgtcattgactcgatttaaactccagcatttagataatcttgtgcaaaatgtgtttcagccgtatagtggatccacttttttttttttttttttttttgagacggagtctcgctctgtcgcccaggctggactgcagtggcctgatctctgctccctgcaagctccgcctcccgggttcacgccattctcctgcctcagcctcccatagctgggactacaggcgcccgccaacacgcctggctaattttttgtatttttagtagagacagggtttcaccatgttagccaggatggtctcgatctcctgacctcgtgatgggcccgcctcggcctcccaaagtgctgggattaaggcgtgagccactgcgcccggcccaagagaataggggagccaaggaggaaatgtggaaacgcagttgtgtggcccagcacgagcctgggcgaccaccgggtgacatccgtcccacatcagggcggcctcccaggtcccataagggtagccccctcatctgcaggacagagggaagccagtcagggcccccctgacgttaggaccaggagaaatcaacaggagggcagcccgtcctctctcttggggcgcccacccggcccggctgagccctgccccacccaactccacagggctgttttgcctccccacggaaggcgggctgaggagacaaccagatcaggagagcaaggtcatgaaggaggggacctctccacacaggtgttccgtgggaccctcagcagctctggctctgcctcaggaggtcacctgccgccctgtgggagccgcagagcctgacgctcagccccaggccagctgcggccaggcctgcgggcccctggtgatggggttacgtggggtgcgggatacagctgagtgggaaccggaaacctattctctttttaacaaaaataatcttaggataagaattattttaacaacatataaaactgtttcaagccctcctccccagagctggcgctcagcagccctagcggctgctccttcaggcgaagggtggtttgcagatgtggggagggtgtctggggacgttgctgagccagctgcagaagggtggggatatcagggcacagtctccatgtgtgtgccaagccctggcccccacagcgctcgatggacctcagcaagctgcccagccctggcccaggtgccccgactgtgggactcagttgttctgagcacatttgactccacttttcccttaaaaatgaatgtcttgttcctgtgcattggtggcatcacagaccccagctggggcgcgatgtcaaaggtcgggacagctgtgccgggaggcagccacagggaagctcacacatcctgtcagtgtcaccttggtttgcaaaacccatatccccggtaaaatgaggccggacagaggggctgttaggacagcaaagcagcagtgtccagagacccctcaatccccaaaggtccgcaccctgtcctgcacaccctgggccacgccggccacacccctctgctgcaacaagctcatccctggacttctgggagaatgaacccgaggttggtttggggagacaggtgaggcggtcggatctacagaacaacccaccatttctgggggccgcagaggatccatcacagacggatactggggagtaaacggcccaggccaggtgcccaggaaaggacggctgagcatgtggagcgagagggaggcaggtggacgctgcagaccccaggttcagtgcggcccctcggctgttcctcccctgtagggtttggacagacccacccccagccttgcccagctttcaaaggacaaaagggagcatcccccacctactctcaggtttttgaggaaacaaagatttgtggtaactgaaggtgttgggtcagtggccaggtgccgacactgagctgtgacccagaggggacgctgaggaagtgggcgtgagtggacgtgtcaggtggttaccaggcactggttgttgatggtcggtggttgggtgtgggcagtcatcagtcatcaggtgtgctcaggggacaatctcccctcaaccgcacatgtgccactgttcagcggagctgactggtttctcctggtagaggggccggctgtttcctgacagatgcctggtgagcaggggaagcaggacccagtggtcagcaggtgtctttaactgtcattgtgtgtggaatgtcgcagactcctccacgtggcgggaatgagctgtgtaaatacttcaataaagcctgacttcacatctgc

SEQ ID NO: 7138 - protein, 438 aa, Homo sapiens; identical to SEQ ID NO: 984

SEQ ID NO: 7139 - DNA, 438 bp, Homo sapiens
agacagaatctgtttttccccatggtcggcgtctcgctcctgaccatagcttgtgcagtgcgagctgaagcgaaaatggcgaagccggtgcccgaccccgtccgcgagccgggattacagggtctgcggttcctccttctcccgcaacggctcggagggcgccctgcagttccaccgcggctcccgcgcccagtccttcctgcaaacggagacctcggtcatctagccccacccctgcctgtcggacgcggcgggaggcccacggttcggggcttctgcggggctgagacgccggcttcctccttccagatgcccgagcaccgtgtcgggcaggtcagcgcggtcctgactccgtcaagctggttgtccactaaaccccatacctggaattggagtcgtgttgtcattgactcgatttaaactccagcatttagataa

SEQ ID NO: 7140 - protein, 132 aa, Homo sapiens
MVGVSLLTIACAVRAEAKMAKPVPDPVREPGLQGLRFLLLPQRLGGRPAVPPRLPRPVLPANGDLGHLAPPLPVGRGGRPTVRGFCGAETPASSFQMPEHRVGQVSAVLTPSSWLSTKPHTWNWSRVVIDSI

SEQ ID NO: 7141 - DNA, 1640 bp, Homo sapiens
cgggacggagggggcggcccccgcgctcgggcgctcggctacagctgcggggcccgaggtctccgcgcactcgctcccggcccatgctggaggcggcggaaccgcggggacctaggacggaggcggcgggcgctgggcggcccccggcacgctgagctcgggatgcggacgctgctgcctcccgcgctgctgacctgctggctgctcgcccccgtgaacagcattcacccagaatgccgatttcatctggaaatacaggaggaagaaacaaaatgtgcagagcttctgaggtctcaaacagaaaaacacaaagcctgcagtggcgtctgggacaacatcacgtgctggcggcctgccaatgtgggagagaccgtcacggtgccctgcccaaaagtcttcagcaatttttacagcaaagcaggaaacataagcaaaaactgtacgagtgacggatggtcagagacgttcccagatttcgtcgatgcctgtggctacagcgacccggaggatgagagcaagatcacgttttatattctggtgaaggccatttatacactgggctacagtgtctctctgatgtctcttgcaacaggaagcataattctgtgcctcttcaggaagctgcactgcaccaggaattacatccacctgaacctgttcctgtccttcatcctgagagccatctcagtgctggtcaaggacgacgttctctactccagctctggcacgttgcactgccctgaccagccatcctcctgggtgggctgcaagctgagcctggtcttcctgcagtactgcatcatggccaacttcttctggctgctggtggaggggctctacctccacaccctcctggtggccatgctcccccctagaaggtgcttcctggcctacctcctgatcggatggggcctccccaccgtctgcatcggtgcatggactgcggccaggctctacttagaagacaccggttgctgggatacaaacgaccacagtgtgccctggtgggtcatacgaataccgattttaatttccatcatcgtcaattttgtccttttcattagtattatacgaattttgctgcagaagttaacatccccagatgtcggcggcaacgaccagtctcagtacaagaggctggccaagtccacgctcctgcttatcccgctgttcggcgtccactacatggtgtttgccgtgtttcccatcagcatctcctccaaataccagatactgtttgagctgtgcctcgggtcgttccagggcctggtggtggccgtcctctactgtttcctgaacagtgaggtgcagtgcgagctgaagcgaaaatggcgaagccggtgcccgaccccgtccgcgagccgggattacagggtctgcggttcctccttctcccgcaacggctcggagggcgccctgcagttccaccgcggctcccgcgcccagtccttcctgcaaacggagacctcggtcatctagccccacccctgcctgtcggacgcggcgggaggcccacggttcggggcttctgcggggctgagacgccggcttcctccttccagatgcccgagcaccgtgtcgggcaggtcagcgcggtcctgactccgtcaagctggttgtccactaaaccccatacctgg

SEQ ID NO: 7142 - protein, 438 aa, Homo sapiens; identical to SEQ ID NO: 984

SEQ ID NO: 7143 - DNA, 405 bp, Homo sapiens
aaagcgccagcaaccgcagcgtggggcgggagggtcaggggtcaggggacggggccaggccgttggagcagcccggagacagcctccctggctgggaatgaacgcagggcagagctcggctccgggcttcctccccagggactcacaggacgctgtgcagccccaccccccagaagagtgggtttgcctgtgtcgttgtgggttctctgatggggacacagaactgtggggtcccgggcagtaactcgagcccgcggaagacaggcatgtgtgggggctgcggcaccaggctgggcagcatctcaggaagcaagtgagtacctgtgcttggttccaaggcggccatgaacttacctcactgttcaggaaacagtagaggacggccaccaccaggccctgcaatga

SEQ ID NO: 7144 - protein, 48 aa, Homo sapiens
MNAGQSSAPGFLPRDSQDAVQPHPPEEWVCLCRCGFSDGDTELWGPGQ

SEQ ID NO: 7145 - DNA, 527 bp, Homo sapiens
ccatgctggaggcggcggaaccgcggggacctaggacggaggcggcgggcgctgggcggcccccggcacgctgagctcgggatgcggacgctgctgcctcccgcgctgctgacctgctggctgctcgcccccgtgaacagcattcacccagaatgccgatttcatctggaaatacaggaggaagaaacaaaatgtgcagagcttctgaggtctcaaacagaaaaacacaaaggccatacaaagggattcatcctcattcacgccggaggtttaaagaggatcctggacccacatacctacccattggctccatgaccagtgcttttataattacaaaatcattgagaaattaagtcacaggaagcctcgtgtgtggtatacactggtgataaagcaagtcccatgcagtctgagatggcaagggaccttctagggaaagggcagtgacccagaagcccgactgctcggctggctcccgcactccgtcctgtggtcagagtgtgtttcctcccctctgtgaacctggt

SEQ ID NO: 7146 - protein, 77 aa, Homo sapiens
MRTLLPPALLTCWLLAPVNSIHPECRFHLEIQEEETKCAELLRSQTEKHKGHTKGFILIHAGGLKRILDPHTYPLAP

SEQ ID NO: 7147 - DNA, 748 bp, Homo sapiens
ctggaggcggcggaaccgcggggacctaggacggaggcggcgggcgctgggcggcccccggcacgctgagctcgggatgcggacgctgctgcctcccgcgctgctgacctgctggctgctcgcccccgtgagtgcgcccgcgacccccgccccacggcgcctcggacccggttctccccttccgagaagagcgctcctcccgccggtcttcgccttcctcccgggtgctggagcgcgggcggggtccgggagagggagcggggtcgcccggggtccggagcttcctcccggagagcgtgaagcgctgagctccggtcccgccgggttgcgggactcgggttgggaggctgcctgcgcccttccccgcgccccaccgtccggggtttgctggaaacgggatcgtttcttcctggacgcgtcaacgatgagctcgttcggggccgtcccgggagctgggagctgcgggcgcctgcgcgggctgcgcgtttcacggggagatcggggttggcgttggccgcagatgcctctcggtccctccctgtacttactggtgaacagcattcacccagaatgccgatttcatctggaaatacaggaggaagaaacaaaatgtgcagagcttctgaggtctcaaacagaaaaacacaaagctgccctgcgatgctgccctctgctgcgggagctggagctctggtgggagctcgctgttcgtggtcctcagcagatattcaaggcagacctgttctaa

SEQ ID NO: 7148 - protein, 223 aa, Homo sapiens
MRTLLPPALLTCWLLAPVSAPATPAPRRLGPGSPLPRRALLPPVFAFLPGAGARAGSGRGSGVARGPELPPGEREALSSGPAGLRDSGWEAACALPRAPPSGVCWKRDRFFLDASTMSSFGAVPGAGSCGRLRGLRVSRGDRGWRWPQMPLGPSLYLLVNSIHPECRFHLEIQEEETKCAELLRSQTEKHKAALRCCPLLRELELWWELAVRGPQQIFKADLF

SEQ ID NO: 7149 - DNA, 270 bp, Homo sapiens
ggttttgggaggtttggccagcttctttactgcatcctgttttatctgcggagtctgctgaactcctatctcacagcatttgcctctgagtacagcagatgtcaacaaggttttgaactgtttgctctcagttccatattcttcctgtccccccaggattcattatattctcacctgggcttcagtaaacgaattttgcatggagagtttcagatgatgttcagtgacaaatttgtacctcagacaacttgggattcagaagaatatttt

SEQ ID NO: 7150 - DNA, 592 bp, Homo sapiens
ccctttctgggggcaactcctataaacagatttagcctaagactcgcgtgttgaaattgacttgccccattcctgccagttaagaggattagcgatacaggtggtgaaaaagaaacgatgacacccctaagacctgagccccttctgggccccacactccacctgtagaactctgatggggccttgtgcggccgaaccacaatccaagagaggtgttcacatcatgtgtcgctagccacagccatctcaaggggaaatgccccaaatgtagaagtatctgacaccaggactgggggttggagcactggatgaacagcgtgtgtgccactctttcactgtgcaccgtcctaagaaagaagcctgtttccctttgaagagcctagtgctgactgcccaattcaatcggaccacgcagggcagtctgaggattaaaagatgctacctttaattccttcggctaattcagaagtatgtgaaacacaacatactcattaacatggaagaactggatgtgtgtgcatgtgggtgtgtattatttatttttcagagacaaggtttcaccatgttgcccaggctggtcttgaactcctgg

SEQ ID NO: 7151 - protein, 31 aa, Homo sapiens
MEELDVCACGCVLFIFQRQGFTMLPRLVLNS

SEQ ID NO: 7152 - DNA, 513 bp, Homo sapiens
cggaaggagcgctgggagttatgtgaacctcagcgttaaaatgtgttagggtttggagatcctgactccctttctgggggcaactcctataaacagatttagcctaagactcgcgtgttgaaattgacttgccccattcctgccagttaagaggattagcgatacaggtggtgaaaaagaaacgatgacacccctaagacctgagccccttctgggccccacactccacctgtagaactctgatggggccttgtgcggccgaaccacaatccaagagaggtgttcacatcatgtgtcgctagccacagccatctcaaggggaaatgccccaaatgtagaagtatctgacaccaggactgggggttggagcactggatgaacagcgtgtgtgccactctttcactgtgcaccgtcctaagaaagaagcctgtttccctttgaagagcctagtgctgactgcccaattcaatcggaccacgcagggcagtctgaggattaaaagatgctaccttt

SEQ ID NO: 7153 - protein, 57 aa, Homo sapiens
KYLTPGLGVGALDEQRVCHSFTVHRPKKEACFPLKSLVLTAQFNRTTQGSLRIKRCY

SEQ ID NO: 7154 - DNA, 5766 bp, Homo sapiens
atgtgggccccggggcgtgggttgagctcggtcttcccctgaggccgcgcggagctgggcgactggggcgaggactcgcgcacaggtaattaaccagaacaggatcgacacgtgttctctacagcccgtccatggatcctttccgaccatcgttcaggggccagtctcctatccacccatcccagtgccaggctgtacggatgccaggctgttggccacaagcttctaaacctttggacccagctctgggcaggggagcacctgcaggcagaggccatgtatttggaaagccagaggaaccaagcacacagagggggccagcacaaagggagtctgtgggtttggtctccatgttccgaggcctgggcattgaaacagtttctaagacccctctgaaacgggaaatgcttccatcaggtagaggcattttaggtcgaggcttgtctgctaatctggtacgcaaggacagggaggaactctctcccactttttgggatccaaaagtgttggcggctggggacagcaagatggcagagacctccgttggttggagtaggacgcttggaagagggagttcagatgcgtctttattaccactgggaagagcagcaggtggtatcagcagagaagtggacaagcctccctgtaccttcagcacaccgtcccggggtcccccgcagctgtcatcaccaccagctctgccccagtctcccctgcactctccagatcgccctctggtcctgactgtggaacacaaggaaaaagagcttattgtgaagcaaggatcaaaaggaacacctcagtctttgggactgaacctcgtcaaaatacagtgtcataatgaagcagtttatcaatatcatgtgactttcagccccaatgtggagtgcaaaagcatgaggttcggcatgttgaaggaccatcaagctgtcaccggcaacgtcactgcgtttgatggatctattctctatctgcctgttaagcttcaacaagttcttgagttaaaaagtcaaaggaaaacagacagtgctgaaatcagcattaagattcagatgacaaagatcctggagccctgctctgacctgtgcattcccttctacaatgttgttttccgtcgggtaatgaaacttttagatatgaagcttgtggggagaaacttttatgaccctacaagtgctatggtactacagcaacacagattgcagatctggccaggctatgcagctagcatccgaaggacagatggagggctcttcctgctagctgatgtctcccataaggtcattcggaatgactgtgtgctggatgtcatgcatgccatttatcagcagaataaagaacacttccaggatgagtgtactaagcttctggttggcaatattgttatcacccgatataacaatcgtacctatcgtattgatgatgtggattggaataagactccaaaggatagcttcacgatgtctgatgggaaagagatcacattcttggaatactacagcaaaaattatgggatcacagttaaggaagaggaccagccattgctgattcacaggcccagtgagagacaggataatcatgggatgctgctaaaaggggaaatcctgctgctgcctgagctttcttttatgaccggaatcccagagaagatgaagaaggacttcagagccatgaaggatttggctcagcaaatcaatctgagccccaagcaacaccatagtgctttggaatgcttgctgcaaagaattgcaaagaacgaggcagccaccaatgaactgatgcgttgggggctccgtctgcaaaaggatgtacataagattgaaggacgtgttctgccaatggaaagaattaacttaaaaaatacttcgtttatcacatctcaggaactaaactgggttaaggaagtaaccagagacccttccatcttgactatccccatgcatttctgggcacttttttacccaaagagagcaatggaccaggctcgagaactggtcaacatgttggagaagatagccggccccattggcatgcgtatgagcccaccggcctgggttgaactaaaggatgaccgaatagagacttatgtcagaaccattcaatccacgttaggagctgaggggaagatacagatggttgtttgcatcatcatgggcccacgtgatgatctctatggggccatcaagaagctgtgctgtgtgcagtccccagtgccctcccaggttgtcaatgttcgaaccattggtcagcccaccaggcttcggagtgtggcccagaagattttacttcagattaactgtaaattgggtggtgagctctggggagtggatattcctctgaaacagttaatggtgatcgggatggatgtttaccatgaccccagtagaggcatgcgctccgtggttggcttcgtggcaagcatcaatctcaccctcacaaaatggtattcccgggtggtgttccagatgccgcatcaggagattgtggacagcctgaagctatgcctcgtgggctccttaaaaaagttttatgaggtgaaccactgtctaccagagaagattgtggtgtaccgtgatggagtgtctgatggccaactgaagacagttgccaactatgagattcctcaactacagaagtgttttgaagcttttgagaattatcagcccaagatggtggtgtttgtagttcagaagaaaatcagtactaatctatatctggctgctcctcagaactttgtaactcccactcctggaactgtggtagatcatacaataacaagctgtgagtgggtggatttctatcttcttgcccatcatgtacggcagggctgtggcattcctacgcattatgtctgtgttctcaacaccgcaaacctgagccctgatcatatgcagaggctgactttcaaactgtgccacatgtactggaattggcctggcaccatcagagttccagctccttgcaagtatgcccacaagctagctttcctgtcaggacacatcttgcatcatgaaccagccatccagctgtgcgagaacctgttcttcctgtgactgcacagcttggagatgggctggtgagaagaaaggcggcctcagaactcagctgtgactcttgcagaatcaacagagactgaagtgggcttttgtgttataattttccctttctccaaccctgtagaataagatttctttcttgtcttttaaacctaatatcaccaagaagcaagtttctgagtaacagctgaaaatggccttgttgcctgtgtagagcaagttacggtggtactgccactctgcaggtggagcgggtgactctgggggaccattaagacctccagaccgggtgcggtggttcacacctgtaatccaagcactttgggaggccgaggcgggtggatcatgaggtcaggagatcaagaccatcctggccaacatggtgaaaccccgtctctactaaaatacaaaaaaattagccgggtgtggcggtgcacgcctgtagtcccagctactcaggaggctaaggcaggagaatcgcttgaacccgggaggtggaggttgcagtgagccgagatcacgccactgcactccagcctgttgacaaagcaagactctgtctcaaaaaaaaaaaaaaaaagccaacatgagctgcagaaaccagcagaagcagccattatacttctaagctgtgccaactaagtggttcccatttctggagccagagatgataattaagtcattgcaagttgcctgaagagaattactcaggcaactgggaaaggcagtggaaggtctgtgaagcaaagttttcaagtagatattgctattactggcaggtgtgcaaggcgtgtagtaaaatcagtttgtggcataggtcggcccttgctgactaaatcctctctggggattgaattgatgacgactgtgacttgagttggattcgaaaatggcttcccttggcctcttgaaagagtgcagatgaagccttttccgtggatttcagtaactttccagcataccatgacgatttcttccccaaatatacacatgctcttttgctctttgtgcctgatcttcagtaatttttagttttttaacaggcagaaaaaatctagcagctaggaaagttcaagttggggtgggagtttttagtgaacttttctcccaggtgtgtggcctttatttctatttatatatgtttgtaaatggaattaccccctttctcttgcaaaataaccgcttcctggctgttggctcactttgctggaatttttctgaatccaggttaagatttccagaagtcagctttggaaaacgtgacactcctaccaaagtccagatggttagaaagttatcacataccatgggtttcagtgtttttggaaacccgtttttttctggttttttttcccccctctccattttagaatcttctcccagtcccttcgggcctagttctgtctcatcttgctttattgggttttaaaaaccggtcttatttaagcttttctaatttgtatttatgtacttatttattttttggtatgatggcagggaggggacaaagcagaaataccccttttatatgacaatgtgtgagaaaagaaactttagcttaaaactccgtaaaatgtgctcacttcagcagcacatatactaaaattaaaatgatatagagaagattagcatatagaaaaaaagaaaaaagatttccttaaaacaagaaaaccaagaatgtttttggtttgttgcggtgcccagccgaggttgaggagggatgggtattgttggtgcactgctggtttcatttggagtgtgggacattagggtgagacaaggacctggaatttaaaaaccacagaatcaaacactgtgaaccactggtctctggctaagcagatcagttttctgattttccttggaagcgttttgaatttttctgttgaagttggatttcctaatactttttttctcttagataatcagaacaaatggttgaatacattataatacaaaaatttcttcactttttattcttggttttcttgcctcgtttttcggttttaatgccaaatgattgggtcatggggtgggaaataaaaacaactttgtataaatttgtagttgtgtttgaaataatgttgtttatttattattatattgatgtaactctttttcttcagagagctgcagcacttcctagaaacactcattactctgcttgtaagttgcaactccagtgttagtagccaggtaatttcatcatcagctgggtaagaagacttattgaaaaaaacagtagccacctcacttctcagacagatgaggcactttgtgtgtgtgtgtgtgtgtgtgtgtgtgtgtgtgtgtgtgtgtctgtgtgtggtttttagctctctttctcccatcagacaatttcttttaccctaagtgagagccagagtgtgtccacttgcaagggcagcctccccaccgctccactattttaacgcttgcccttttttacatatacctcacggggtgtctgtcaccattgaaataccttccctgggtacaaaaatcccattagaaggaataagatctagtagttcagtggcacagtagagcaactatagttaacaaaaatttattgtacatttcaaaatagaggagtggaattggaatgttcctaacacaaagaaatgataaatgagccgggtgccgtggctcacacctataatcccagcactttgggaggctgaggtaggtggatcatttgagctcagga

SEQ ID NO: 7155 - protein, 973 aa, Homo sapiens; identical to SEQ ID NO: 986

SEQ ID NO: 7156 - DNA, 3392 bp, Homo sapiens
agaagctttttttccctgccctctaggcacagtagctttggcactaactgcaaaaggatctgccatgattccaggctacacaatgcgagtgggcctctcactgactgtggtccgtagcctgagggctctgtgagtcaccacatcctcgctgtcatttcaggtgaaccactgtctaccagagaagattgtggtgtaccgtgatggagtgtctgatggccaactgaagacagttgccaactatgagattcctcaactacagaagtgttttgaagcttttgagaattatcagcccaagatggtggtgtttgtagttcagaagaaaatcagtactaatctatatctggctgctcctcagaactttgtaactcccactcctggaactgtggtagatcatacaataacaagctgtgagtgggtggatttctatcttcttgcccatcatgtacggcagggctgtggcattcctacgcattatgtctgtgttctcaacaccgcaaacctgagccctgatcatatgcagaggctgactttcaaactgtgccacatgtactggaattggcctggcaccatcagagttccagctccttgcaagtatgcccacaagctagctttcctgtcaggacacatcttgcatcatgaaccagccatccagctgtgcgagaacctgttcttcctgtgactgcacagcttggagatgggctggtgagaagaaaggcggcctcagaactcagctgtgactcttgcagaatcaacagagactgaagtgggcttttgtgttataattttccctttctccaaccctgtagaataagatttctttcttgtcttttaaacctaatatcaccaagaagcaagtttctgagtaacagctgaaaatggccttgttgcctgtgtagagcaagttacggtggtactgccactctgcaggtggagcgggtgactctgggggaccattaagacctccagaccgggtgcggtggttcacacctgtaatccaagcactttgggaggccgaggcgggtggatcatgaggtcaggagatcaagaccatcctggccaacatggtgaaaccccgtctctactaaaatacaaaaaaattagccgggtgtggcggtgcacgcctgtagtcccagctactcaggaggctaaggcaggagaatcgcttgaacccgggaggtggaggttgcagtgagccgagatcacgccactgcactccagcctgttgacaaagcaagactctgtctcaaaaaaaaaaaaaaaaagccaacatgagctgcagaaaccagcagaagcagccattatacttctaagctgtgccaactaagtggttcccatttctggagccagagatgataattaagtcattgcaagttgcctgaagagaattactcaggcaactgggaaaggcagtggaaggtctgtgaagcaaagttttcaagtagatattgctattactggcaggtgtgcaaggcgtgtagtaaaatcagtttgtggcataggtcggcccttgctgactaaatcctctctggggattgaattgatgacgactgtgacttgagttggattcgaaaatggcttcccttggcctcttgaaagagtgcagatgaagccttttccgtggatttcagtaactttccagcataccatgacgatttcttccccaaatatacacatgctcttttgctctttgtgcctgatcttcagtaatttttagttttttaacaggcagaaaaaatctagcagctaggaaagttcaagttggggtgggagtttttagtgaacttttctcccaggtgtgtggcctttatttctatttatatatgtttgtaaatggaattaccccctttctcttgcaaaataaccgcttcctggctgttggctcactttgctggaatttttctgaatccaggttaagatttccagaagtcagctttggaaaacgtgacactcctaccaaagtccagatggttagaaagttatcacataccatgggtttcagtgtttttggaaacccgtttttttctggttttttttcccccctctccattttagaatcttctcccagtcccttcgggcctagttctgtctcatcttgctttattgggttttaaaaaccggtcttatttaagcttttctaatttgtatttatgtacttatttattttttggtatgatggcagggaggggacaaagcagaaataccccttttatatgacaatgtgtgagaaaagaaactttagcttaaaactccgtaaaatgtgctcacttcagcagcacatatactaaaattaaaatgatatagagaagattagcatatagaaaaaaagaaaaaagatttccttaaaacaagaaaaccaagaatgtttttggtttgttgcggtgcccagccgaggttgaggagggatgggtattgttggtgcactgctggtttcatttggagtgtgggacattagggtgagacaaggacctggaatttaaaaaccacagaatcaaacactgtgaaccactggtctctggctaagcagatcagttttctgattttccttggaagcgttttgaatttttctgttgaagttggatttcctaatactttttttctcttagataatcagaacaaatggttgaatacattataatacaaaaatttcttcactttttattcttggttttcttgcctcgtttttcggttttaatgccaaatgattgggtcatggggtgggaaataaaaacaactttgtataaatttgtagttgtgtttgaaataatgttgtttatttattattatattgatgtaactctttttcttcagagagctgcagcacttcctagaaacactcattactctgcttgtaagttgcaactccagtgttagtagccaggtaatttcatcatcagctgggtaagaagacttattgaaaaaaacagtagccacctcacttctcagacagatgaggcactttgtgtgtgtgtgtgtgtgtgtgtgtgtgtgtgtgtgtgtgtgtctgtgtgtggtttttagctctctttctcccatcagacaatttcttttaccctaagtgagagccagagtgtgtccacttgcaagggcagcctccccaccgctccactattttaacgcttgcccttttttacatatacctcacggggtgtctgtcaccattgaaataccttccctgggtacaaaaatcccattagaaggaataagatctagtagttcagtggcacagtagagcaactatagttaacaaaaatttattgtacatttcaaaatagaggagtggaattggaatgttcctaacacaaagaaatgataaatgagccgggtgccgtggctcacacctataatcccagcactttgggaggctgaggtaggtggatcatttgagctcagga

SEQ ID NO: 7157 - protein, 127 aa, Homo sapiens
MVVFVVQKKISTNLYLAAPQNFVTPTPGTVVDHTITSCEWVDFYLLAHHVRQGCGIPTHYVCVLNTANLSPDHMQRLTFKLCHMYWNWPGTIRVPAPCKYAHKLAFLSGHILHHEPAIQLCENLFFL

SEQ ID NO: 7158 - DNA, 4659 bp, Homo sapiens
atgggagcgggcgccgaccacagccagggccgcgaggcgcaggagggcgcaggctggccagtgaggggggtcggcgcgcgtgtctacgcggacgcaccggctaagctgcttctgccgccgccggccgcctgggaccttgcggtgaggctgcgcggggccgaggccgcctccgagcgccaggtttattcagtcaccatgaagctgctgctgctgcacccggccttccagagctgcctcctgctgaccctgcttggcttatggagaaccacccctgaggctcacgcttcatccctgggtgcaccagctatcagcgctgcctccttcctgcaggatctaatacatcggtatggcgagggtgacagcctcactctgcagcagctgaaggccctactcaaccacctggatgtgggagtgggccggggtaatgtcacccagcacgtgcaaggacacaggaacctctccacgtgctttagttctggagacctcttcactgcccacaatttcagcgagcagtcgcggattgggagcagcgagctccaggagttctgccccaccatcctccagcagctggattcccgggcctgcacctcggagaaccaggaaaacgaggagaatgagcagacggaggaggggcggccaagcgctgttgaagtgtggggatacggtctcctctgtgtgaccgtcatctccctctgctccctcctgggggccagcgtggtgcccttcatgaagaagaccttttacaagaggctgctgctctacttcatagctctggcgattggaaccctctactccaacgccctcttccagctcatcccggaggcatttggtttcaaccctctggaagattattatgtctccaagtctgcagtggtgtttgggggcttttatcttttctttttcacagagaagatcttgaagattcttcttaagcagaaaaatgagcatcatcatggacacagccattatgcctctgagtcgcttccctccaagaaggaccaggaggagggggtgatggagaagctgcagaacggggacctggaccacatgattcctcagcactgcagcagtgagctggacggcaaggcgcccatggtggacgagaaggtcattgtgggctcgctctctgtgcaggacctgcaggcttcccagagtgcttgctactggctgaaaggtgtccgctactctgatatcggcactctggcctggatgatcactctgagcgacggcctccataatttcatcgatggcctggccatcggtgcttccttcactgtgtcagttttccaaggcatcagcacctcggtggccatcctctgtgaggagttcccacatgagctaggagactttgtcatcctgctcaacgctgggatgagcatccaacaagctctcttcttcaacttcctttctgcctgctgctgctacctgggtctggcctttggcatcctggccggcagccacttctctgccaactggatttttgcgctagctggaggaatgttcttgtatatttctctggctgatatgttccctgagatgaatgaggtctgtcaagaggatgaaaggaagggcagcatcttgattccatttatcatccagaacctgggcctcctgactggattcaccatcatggtggtcctcaccatgtattcaggacagatccagattgggtagggctctgccaagagcctgtgggactggaagtcgggccctgggctgcccgatcgccagcccgaggacttaccatccacaatgcaccacggaagaggccgttctatgaaaaactgacacagactgtattcctgcattcaaatgtcagccgtttgtaaaatgctgtatcctaggaataagctgccctggtaaccagtctctagctagtgcctcttgccctctcctcacctccttttctctcagtgactctggaacctgaatgcagcttacaagacaagcctgacttttttctctgattaccttggcctcctcttggaaccagtgctgaaaggttttgaatcctttacccaacaatgcaaaaatagagccaatggttataacttggctagaaatatcaagagttgaatccatagtgtggggcccatgactctagctgggcaccttggacctccagctggccaatagaagagacaggagacaggaagccttcccattttttcaaagtctgtttaattgcctattacttctctcaaagagaacctgaagtcagaacacatgagcagggtgagaggtgaggcaaggttcatcctgaatgggagaggaagtcgaaccactgctgtgtgtcttgtcaggatgctcacttgttcctactgagatgctggatattgattttgtaacagcacctggtgtttcacggctgtccgagtgagctaacgtggcggtgtggctgcctggacctcctctttcaggttaacgctgacagaatggaggctcaggctgtctgcaagaaaacagttggtttggctgtgattttgacctcctcttccccactgccatcttctaagagactttgtagctgcctcctagaagcacattctgagcacatttgagacctctgtgttagaggggagactgcacaaactatcctcccccaggttgagacgtctgcagagtggcaagctgacttgtagaaatggggtgccatttatgctctacttagacaagggtaatcagaaatggaatcagtgcaggcaaaatttaggatttgccgcttccataaatcaaagcatgactaatagggggtctctgaaatgtaagggcacaaacttcacttagggcatcgcagatgtttgcagaatggttggcctaatgattatgctacagatgggttttaaatgacccgtctaggttactgcttccttgcaaaaaaagtcgaatcctgcattgaattgaatatgaatttctctaactctctccagaaaatggatggagataacttgtctttaaaactgtaggccagccttagccactgtggagcccttgcctccgagctctggcttcaaggggagctcttctccaggttcactaggtgaattgatttattattatcatattgataatgtgagattctttagccactttggggagcctgtctctccagaagcctttcttagtggtgcccacagttggagcccaggggccatgtttgcaaactgattcatgtgcatggctgacaggagtactggttcactaccaatgcctgagcttttctcttacatagaaaaactgtccgctctcagtaatcacaagcagcatccgttttgttttctcttcttgggagacatctgtcaaaccaggaatattcttgaaaagaacgtgagcaggaaaaactgctggtgatactttttttaagttttgtttttatcttgcctgttggcttcaatacatttgagaatacgctgaagagggaaaatttcagtgatggagattctagattaaatatcaggactgatttcctggtgggattatggtccagttttaccaaagaaccaattccttgaatgttggaatctaactttttatattgtcattattattgttgtttttaaacggttctttgtcttttctgttttatttttctcaagctgctttcaggagctagcagaaaataactcaaagttgaagactctggaagattttgctttaacctaactcgcattgatgtattaaatttataattttagcattcccaatagatcctatcattccttaaacataataccctttgtcttggagtagaatactaagttagagttagtggatttctagtttaggagaggagctcaaaactataatctttaacaaattgaaaaatgaaatagggtgttttccctttttgtgcacacctatattaccttaagaaatttccttccatagacagctgcctcaaagggaaatcctctttaaaccgtagttggcgcagaggtcagtcctagtcggagcttaggaggggcggagacgctcacatcgtctgacttgagtcgccactgattgtggcaacagctttgcctcatgagtcaaaaattggcaatttcttttgatttttagttgttgaatttgctgtttcaagcatttgtacatattagaagtctaaggagtagcaagtcagtgggaggactttttcacccctggcattagcagcttcgacctcattttccagatgcaccagctcctattaataagttagcaaggaaagtgtatgtcacgtgcaggaacagtgaggcagggacaggggttctgctccttctcacttcaccaccggcacacagcttgcccctgtctttgcccccaaaggtattttgtgtctagtgtcaaattggagctattcttcactggtccttaaccttgggttttaaaaagaaggcttctctgtttgggtagcgtaagagctgagtatagtaagtcctcttccaaagagatggcaatatgctgggcatctactttaaaacaaagttgtctgatttttgcaagagaggttaggattttattgttcttatttccctttacagttctgcagttccatcacagtatttttttaaataactcaggtgtatgagaagaaattagaaaagaaaattaacttatgtggactgtaaatgttttatttgtaagattctataaataaagctatattctgtaattgttgag

SEQ ID NO: 7159 - protein, 557 aa, Homo sapiens
MGAGADHSQGREAQEGAGWPVRGVGARVYADAPAKLLLPPPAAWDLAVRLRGAEAASERQVYSVTMKLLLLHPAFQSCLLLTLLGLWRTTPEAHASSLGAPAISAASFLQDLIHRYGEGDSLTLQQLKALLNHLDVGVGRGNVTQHVQGHRNLSTCFSSGDLFTAHNFSEQSRIGSSELQEFCPTILQQLDSRACTSENQENEENEQTEEGRPSAVEVWGYGLLCVTVISLCSLLGASVVPFMKKTFYKRLLLYFIALAIGTLYSNALFQLIPEAFGFNPLEDYYVSKSAVVFGGFYLFFFTEKILKILLKQKNEHHHGHSHYASESLPSKKDQEEGVMEKLQNGDLDHMIPQHCSSELDGKAPMVDEKVIVGSLSVQDLQASQSACYWLKGVRYSDIGTLAWMITLSDGLHNFIDGLAIGASFTVSVFQGISTSVAILCEEFPHELGDFVILLNAGMSIQQALFFNFLSACCCYLGLAFGILAGSHFSANWIFALAGGMFLYISLADMFPEMNEVCQEDERKGSILIPFIIQNLGLLTGFTIMVVLTMYSGQIQIG

SEQ ID NO: 7160 - DNA, 4710 bp, Homo sapiens
atgggagcgggcgccgaccacagccagggccgcgaggcgcaggagggcgcaggctggccagtgaggggggtcggcgcgcgtgtctacgcggacgcaccggctaagctgcttctgccgccgccggccgcctgggaccttgcggtgaggctgcgcggggccgaggccgcctccgagcgccaggtttattcagtcaccatgaagctgctgctgctgcacccggccttccagagctgcctcctgctgaccctgcttggcttatggagaaccacccctgaggctcacgcttcatccctgggtgcaccagctatcagcgctgcctccttcctgcaggatctaatacatcggtatggcgagggtgacagcctcactctgcagcagctgaaggccctactcaaccacctggatgtgggagtgggccggggtaatgtcacccagcacgtgcaaggacacaggaacctctccacgtgctttagttctggagacctcttcactgcccacaatttcagcgagcagtcgcggattgggagcagcgagctccaggagttctgccccaccatcctccagcagctggattcccgggcctgcacctcggagaaccaggaaaacgaggagaatgagcagacggaggaggggcggccaagcgctgttgaagtgtggggatacggtctcctctgtgtgaccgtcatctccctctgctccctcctgggggccagcgtggtgcccttcatgaagaagaccttttacaagaggctgctgctctacttcatagctctggcgattggaaccctctactccaacgccctcttccagctcatcccggaggcatttggtttcaaccctctggaagattattatgtctccaagtctgcagtggtgtttgggggcttttatcttttctttttcacagagaagatcttgaagattcttcttaagcagaaaaatgagcatcatcatggacacagccattatgcctctgagtcgcttccctccaagaaggaccaggaggagggggtgatggagaagctgcagaacggggacctggaccacatgattcctcagcactgcagcagtgagctggacggcaaggcgcccatggtggacgagaaggtcattgtgggctcgctctctgtgcaggacctgcaggcttcccagagtgcttgctactggctgaaaggtgtccgctactctgatatcggcactctggcctggatgatcactctgagcgacggcctccataatttcatcgatggcctggccatcggtgcttccttcactgtgtcagttttccaaggcatcagcacctcggtggccatcctctgtgaggagttcccacatgagctaggagactttgtcatcctgctcaacgctgggatgagcatccaacaagctctcttcttcaacttcctttctgcctgctgctgctacctgggtctggcctttggcatcctggccggcagccacttctctgccaactggatttttgcgctagctggaggaatgttcttgtatatttctctggctgatatgttccctgagatgaatgaggtctgtcaagaggatgaaaggaagggcagcatcttgattccatttatcatccagaacctgggcctcctgactggattcaccatcatggtggtcctcaccatgtattcaggacagatccagattgggtagggctctgccaagagcctgtgggactggaagtcgggccctgggctgcccgatcgccagcccgaggacttaccatccacaatgcaccacggaagaggccgttctatgaaaaactgacacagactgtattcctgcattcaaatgtcagccgtttgtaaaatgctgtatcctaggaataagctgccctggtaaccagtctctagctagtgcctcttgccctctcctcacctccttttctctcagtgactctggaacctgaatgcagcttacaagacaagcctgacttttttctctgattaccttggcctcctcttggaaccagtgctgaaaggttttgaatcctttacccaacaatgcaaaaatagagccaatggttataacttggctagaaatatcaagagttgaatccatagtgtggggcccatgactctagctgggcaccttggacctccagctggccaatagaagagacaggagacaggaagccttcccattttttcaaagtctgtttaattgcctattacttctctcaaagagaacctgaagtcagaacacatgagcagggtgagaggtgaggcaaggttcatcctgaatgggagaggaagtcgaaccactgctgtgtgtcttgtcaggatgctcacttgttcctactgagatgctggatattgattttgtaacagcacctggtgtttcacggctgtccgagtgagctaacgtggcggtgtggctgcctggacctcctctttcaggttaacgctgacagaatggaggctcaggctgtctgcaagaaaacagttggtttggctgtgattttgacctcctcttccccactgccatcttctaagagactttgtagctgcctcctagaagcacattctgagcacatttgagacctctgtgttagaggggagactgcacaaactatcctcccccaggttgagacgtctgcagagtggcaagctgacttgtagaaatggggtgccatttatgctctacttagacaagggtaatcagaaatggaatcagtgcaggcaaaatttaggatttgccgcttccataaatcaaagcatgactaatagggggtctctgaaatgtaagggcacaaacttcacttagggcatcgcagatgtttgcagaatggttggcctaatgattatgctacagatgggttttaaatgacccgtctaggttactgcttccttgcaaaaaaagtcgaatcctgcattgaattgaatatgaatttctctaactctctccagaaaatggatggagataacttgtctttaaaactgtaggccagccttagccactgtggagcccttgcctccgagctctggcttcaaggggagctcttctccaggttcactaggtgaattgatttattattatcatattgataatgtgagattctttagccactttggggagcctgtctctccagaagcctttcttagtggtgcccacagttggagcccaggggccatgtttgcaaactgattcatgtgcatggctgacaggagtactggttcactaccaatgcctgagcttttctcttacatagaaaaactgtccgctctcagtaatcacaagcagcatccgttttgttttctcttcttgggagacatctgtcaaaccaggaatattcttgaaaagaacgtgagcaggaaaaactgctggtgatactttttttaagttttgtttttatcttgcctgttggcttcaatacatttgagaatacgctgaagagggaaaatttcagtgatggagattctagattaaatatcaggactgatttcctggtgggattatggtccagttttaccaaagaaccaattccttgaatgttggaatctaactttttatattgtcattattattgttgtttttaaacggttctttgtcttttctgttttatttttctcaagctgctttcaggagctagcagaaaataactcaaagttgaagactctggaagattttgctttaacctaactcgcattgatgtattaaatttataattttagcattcccaatagatcctatcattccttaaacataataccctttgtcttggagtagaatactaagttagagttagtggatttctagtttaggagaggagctcaaaactataatctttaacaaattgaaaaatgaaatagggtgttttccctttttgtgcacacctatattaccttaagaaatttccttccatagacagctgcctcaaagggaaatcctctttaaaccgtagttggcgcagaggtcagtcctagtcggagcttaggaggggcggagacgctcacatcgtctgacttgagtcgccactgattgtggcaacagctttgcctcatgagtcaaaaattggcaatttcttttgatttttagttgttgaatttgctgtttcaagcatttgtacatattagaagtctaaggagtagcaagtcagtgggaggactttttcacccctggcattagcagcttcgacctcattttccagatgcaccagctcctattaataagttagcaaggaaagtgtatgtcacgtgcaggaacagtgaggcagggacaggggttctgctccttctcacttcaccaccggcacacagcttgcccctgtctttgcccccaaaggtattttgtgtctagtgtcaaattggagctattcttcactggtccttaaccttgggttttaaaaagaaggcttctctgtttgggtagcgtaagagctgagtatagtaagtcctcttccaaagagatggcaatatgctgggcatctactttaaaacaaagttgtctgatttttgcaagagaggttaggattttattgttcttatttccctttacagttctgcagttccatcacagtatttttttaaataactcaggtgtatgagaagaaattagaaaagaaaattaacttatgtggactgtaaatgttttatttgtaagattctataaataaagctatattctgtaattgttgagaatcccacgggtgatcatttgcaataaatgtggatgtaatgaaggctgttg

SEQ ID NO: 7161 - protein, 557 aa, Homo sapiens; identical to SEQ ID NO: 7159

SEQ ID NO: 7162 - DNA, 1705 bp, Homo sapiens
gcagtgaggggggtcggcgcgcgtgtctacgcggacgcaccggctaagctgcttctgccgccgccggccgcctgggaccttgcggtgaggctgcgcggggccgaggccgcctccgagcgccaggtttattcagtcaccatgaagctgctgctgctgcacccggccttccagagctgcctcctgctgaccctgcttggcttatggagaaccacccctgaggctcacgcttcatccctgggtgcaccagctatcagcgctgcctccttcctgcaggatctaatacatcggtatggcgagggtgacagcctcactctgcagcagctgaaggccctactcaaccacctggatgtgggagtgggccggggtaatgtcacccagcacgtgcaaggacacaggaacctctccacgtgctttagttctggagacctcttcactgcccacaatttcagcgagcagtcgcggattgggagcagcgagctccaggagttctgccccaccatcctccagcagctggattcccgggcctgcacctcggagaaccaggaaaacgaggagaatgagcagacggaggaggggcggccaagcgctgttgaagtgtggggatacggtctcctctgtgtgaccgtcatctccctctgctccctcctgggggccagcgtggtgcccttcatgaagaagaccttttacaagaggctgctgctctacttcatagctctggcgattggaaccctctactccaacgccctcttccagctcatcccggaggcatttggtttcaaccctctggaagattattatgtctccaagtctgcagtggtgtttgggggcttttatcttttctttttcacagagaagatcttgaagattcttcttaagcagaaaaatgagcatcatcatggacacagccattatgcctctgagtcgcttccctccaagaaggaccaggaggagggggtgatggagaagctgcagaacggggacctggaccacatgattcctcagcactgcagcagtgagctggacggcaaggcgcccatggtggacgagaaggtcattgtgggctcgctctctgtgcaggacctgcaggcttcccagagtgcttgctactggctgaaaggtgtccgctactctgatatcggcactctggcctggatgatcactctgagcgacggcctccataatttcatcgatggcctggccatcggtgcttccttcactgtgtcagttttccaaggcatcagcacctcggtggccatcctctgtgaggagttcccacatgagctaggagactttgtcatcctgctcaacgctgggatgagcatccaacaagctctcttcttcaacttcctttctgcctgctgctgctacctgggtctggcctttggcatcctggccggcagccacttctctgccaactggatttttgcgctagctggaggaatgttcttgtatatttctctggctgatatgatggagttttgctctgttgcccaggctggagtgcaatggtgccatctcagctcactgcaacctctgccgcttgggttgaagcgattatcctgtctaagcctcccgagtaactgagccagccatgtttgttaataaaaatggggacaatactgtatatatatggttatattttagctttttcacttttcagtatctcctgaggcttttctcatgtcattaaatatttttctaattt

SEQ ID NO: 7163 - protein, 481 aa, Homo sapiens
MKLLLLHPAFQSCLLLTLLGLWRTTPEAHASSLGAPAISAASFLQDLIHRYGEGDSLTLQQLKALLNHLDVGVGRGNVTQHVQGHRNLSTCFSSGDLFTAHNFSEQSRIGSSELQEFCPTILQQLDSRACTSENQENEENEQTEEGRPSAVEVWGYGLLCVTVISLCSLLGASVVPFMKKTFYKRLLLYFIALAIGTLYSNALFQLIPEAFGFNPLEDYYVSKSAVVFGGFYLFFFTEKILKILLKQKNEHHHGHSHYASESLPSKKDQEEGVMEKLQNGDLDHMIPQHCSSELDGKAPMVDEKVIVGSLSVQDLQASQSACYWLKGVRYSDIGTLAWMITLSDGLHNFIDGLAIGASFTVSVFQGISTSVAILCEEFPHELGDFVILLNAGMSIQQALFFNFLSACCCYLGLAFGILAGSHFSANWIFALAGGMFLYISLADMMEFCSVAQAGVQWCHLSSLQPLPLGLKRLSCLSLPSN

SEQ ID NO: 7164 - DNA, 1762 bp, Homo sapiens
ttctcaacaattacagaatatagctttatttatagaatcttacaaataaaacatttacagtccacataagttaattttcttttctaatttcttctcatacacctgagttatttaaaaaaatactgtgatggaactgcagaactgtaaagggaaataagaacaataaaatcctaacctctcttgcaaaaatcagacaactttgttttaaagtagatgcccagcatattgccatctctttggaagaggacttactatactcagctcttacgctacccaaacagagaagccttctttttaaaacccaaggttaaggaccagtgaagaatagctccaatttgacactagacacaaaatacctttgggggcaaagacaggggcaagctgtgtgccggtggtgaagtgagaaggagcagaacccctgtccctgcctcactgttcctgcacgtgacatacactttccttgctaacttattaataggagctggtgcatctggaaaatgaggtcgaagctgctaatgccaggggtgaaaaagtcctcccactgacttgctactccttagacttctaatatgtacaaatgcttgaaacagcaaattcaacaactaaaaatcaaaagaaattgccaatttttgaggtttaaagaggatttccctttgaggcagctgtctatggaaggaaatttcttaaggtaatataggtgtgcacaaaaagggaaaacaccctatttcatttttcaatttgttaaagattatagttttgagctcctctcctaaactagaaatccactaactctaacttagtattctactccaagacaaagggtattatgtttaaggaatgataggatctattgggaatgctaaaattataaatttaatacatcaatgcgagttaggttaaagcaaaatcttccagagtcttcaactttgagttattttctgctagctcctgaaagcagcttgagaaaaataaaacagaaaagacaaagaaccgtttaaaaacaacaataataatgacaatataaaaagttagattccaacattcaaggaattggttctttggtaaaactggaccataatcccaccaggaaatcagtcctgatatttaatctagaatctccatcactgaaattttccctcttcagcgtattctcaaatgtattgaagccaacaggcaagataaaaacaaaacttaaaaaaagtatcaccagcagtttttcctgctcacgttcttttcaagaatattcctggtttgacagatgtctcccaagaagagaaaacaaaacggatgctgcttgtgattactgagagcggacagtttttctatgtaagagaaaagctcaggcattggtagtgaaccagtactcctgtcagccatgcacatgaatcagtttgcaaacatggcccctgggctccaactgtgggcaccactaagaaaggcttctggagagacaggctccccaaagtggctaaagaatctcacattatcaatatgataataataaatcaattcacctagtgaacctggagaagagctccccttgaagccagagctcggaggcaagggctccacagtggctaaggctggcctacagttttaaagacaagttatctccatccattttctggagagagttagagaaattcatattcaattcaatgcaggattcgactttttttgcaaggaagcagtaacctagacgggtcatttaaaacccatctgtagcataatcattaggccaaccattctgcaaacatctgcg

SEQ ID NO: 7165 - protein, 40 aa, Homo sapiens
MYKCLKQQIQQLKIKRNCQFLRFKEDFPLRQLSMEGNFLR

SEQ ID NO: 7166 - DNA, 1598 bp, Homo sapiens
gttccgggcccgggtaggggctggcaggagagaaggggccggctgcggggagggctggctgagaagaagcgaaaatgggcggttagcagcagggacccggagccggaggagccgagagcagcgcgtgcgccgagctctactgcctcgcgggaaggcggaagggtggggagggcggcgctcggggcgggaggcccggccgggtccgctaggacagcggggccgctgggaagttgtgagagcggcgctcgggggcgcgcttgcgtgcacgagggcccgggccgcgagcagccgcggccgtcccggtcgccacccttagcagcggtcgcggtcggtgccgaagcggtgttccccgccttagccgctggcgcctcccaagagagcggccggtgggccctcgtcctgtcagtggcgtcggaggccggcgctgcggtggccgcgcccttctggtgctcggacaccgctgaggagccggggccgggcacggctggctgacggctccgggcagctaaggctgcccgaggagaaggcggcggccgcggcgtaggcgcacgtccggcgggctcctggagcctggaggaggccgaggggaccatgtccgggaggcgcttccacctctccaccaccgaccgcgtcatcaaagctgtcccctttcctccaacccaacggcttactttcaaggaagtatttgagaatgggaaacctaaagttgatgttttaaaaaaccatttggtaaaggaaggacgactggaagaggaagtagccttaaagataatcaatgatggggctgccatcctgaggcaagagaagactatgatagaagtagatgctccaatcacagtatgtggtgatattcatggacaattctttgacctaatgaagttatttgaagttggaggatcacctagtaacacacgctacctctttctgggtgactatgtggacagaggctatttcagtatagagtgtgtgctgtatttatggagtttaaagattaatcatcccaaaacattgtttctgcttcggggaaatcatgaatgcaggcatcttacagactatttcaccttcaaacaggaatgtcgaatcaaatattcggaacaggtgtatgatgcctgtatggagacatttgactgtcttcctcttgctgccctcttaaaccagcagtttctctgtgtacatggaggaatgtcacctgaaattacttctttagatgacattaggaaattagacaggtttacggaacctcccgcctttggacctgtgtgtgacctgctttggtctgatccctcagaggattatggcaatgagaagaccttggagcactatacccacaacactgtccgagggtgctcttatttctacagttaccctgcagtttgtgaatttttgcagaacaataatttactatcaattatcagagcccatgaagcccaagatgctgggtatcgaatgtacaggaagagccaagccacaggctttccatcacttattacaattttctctgcccccaattacctagatgtctataacaataaaggtaaaggaatccagcaatatttgagtttgaatttatgagtaaacgtgagctctggtttaattgt

SEQ ID NO: 7167 - protein, 326 aa, Homo sapiens
MSGRRFHLSTTDRVIKAVPFPPTQRLTFKEVFENGKPKVDVLKNHLVKEGRLEEEVALKIINDGAAILRQEKTMIEVDAPITVCGDIHGQFFDLMKLFEVGGSPSNTRYLFLGDYVDRGYFSIECVLYLWSLKINHPKTLFLLRGNHECRHLTDYFTFKQECRIKYSEQVYDACMETFDCLPLAALLNQQFLCVHGGMSPEITSLDDIRKLDRFTEPPAFGPVCDLLWSDPSEDYGNEKTLEHYTHNTVRGCSYFYSYPAVCEFLQNNNLLSIIRAHEAQDAGYRMYRKSQATGFPSLITIFSAPNYLDVYNNKGKGIQQYLSLNL

SEQ ID NO: 7168 - DNA, 987 bp, Homo sapiens
gagggcggcgctcggggcgggaggcccggccgggtccgctaggacagcggggccgctgggaagttgtgagagcggcgctcgggggcgcgcttgcgtgcacgagggcccgggccgcgagcagccgcggccgtcccggtcgccacccttagcagcggtcgcggtcggtgccgaagcggtgttccccgccttagccgctggcgcctcccaagagagcggccggtgggccctcgtcctgtcagtggcgtcggaggccggcgctgcggtggccgcgcccttctggtgctcggacaccgctgaggagccggggccgggcacggctggctgacggctccgggcagctaaggctgcccgaggagaaggcggcggccgcggcgtaggcgcacgtccggcgggctcctggagcctggaggaggccgaggggaccatgtccgggaggcgcttccacctctccaccaccgaccgcgtcatcaaagctgtcccctttcctccaacccaacggcttactttcaaggaagtatttgagaatgggaaacctaaagttgatgttttaaaaaaccatttggtaaaggaaggacgactggaagaggaagtagccttaaagataatcaatgatggggctgccatcctgaggcaagagaagactatgatagaagtagatgctccaatcacagtatgtggtgatattcatggacaattctttgacctaatgaagttatttgaagttggaggatcacctagtaacacacgctacctctttctgggtgactatgtggacagaggctatttcagtatagagagatggggtcctgccatgttgcctaggctggagtgcagtggctatacacaggtgcgatcatttcgtacctcagcctccaactcctggattcaagccatcctcctgcctcagcttcctgagtatatggaactatagatgcacaccactgtgcctggctagtcattgtatttaataaaacaacttttaaaata

SEQ ID NO: 7169 - protein, 168 aa, Homo sapiens
MSGRRFHLSTTDRVIKAVPFPPTQRLTFKEVFENGKPKVDVLKNHLVKEGRLEEEVALKIINDGAAILRQEKTMIEVDAPITVCGDIHGQFFDLMKLFEVGGSPSNTRYLFLGDYVDRGYFSIERWGPAMLPRLECSGYTQVRSFRTSASNSWIQAILLPQLPEYMEL

SEQ ID NO: 7170 - DNA, 2275 bp, Homo sapiens
gagggcggcgctcggggcgggaggcccggccgggtccgctaggacagcggggccgctgggaagttgtgagagcggcgctcgggggcgcgcttgcgtgcacgagggcccgggccgcgagcagccgcggccgtcccggtcgccacccttagcagcggtcgcggtcggtgccgaagcggtgttccccgccttagccgctggcgcctcccaagagagcggccggtgggccctcgtcctgtcagtggcgtcggaggccggcgctgcggtggccgcgcccttctggtgctcggacaccgctgaggagccggggccgggcacggctggctgacggctccgggcagctaaggctgcccgaggagaaggcggcggccgcggcgtaggcgcacgtccggcgggctcctggagcctggaggaggccgaggggaccatgtccgggaggcgcttccacctctccaccaccgaccgcgtcatcaaagctgtcccctttcctccaacccaacggcttactttcaaggaagtatttgagaatgggaaacctaaagttgatgttttaaaaaaccatttggtaaaggaaggacgactggaagaggaagtagccttaaagataatcaatgatggggctgccatcctgaggcaagagaagactatgatagaagtagatgctccaatcacagtatgtggtgatattcatggacaattctttgacctaatgaagttatttgaagttggaggatcacctagtaacacacgctacctctttctgggtgactatgtggacagaggctatttcagtatagagtgtgtgctgtatttatggagtttaaagattaatcatcccaaaacattgtttctgcttcggggaaatcatgaatgcaggcatcttacagactatttcaccttcaaacaggaatgtcgaatcaaatattcggaacaggtgtatgatgcctgtatggagacatttgactgtcttcctcttgctgccctcttaaaccagcagtttctctgtgtacatggaggaatgtcacctgaaattacttctttagatgacattaggaaattagacaggtttacggaacctcccgcctttggacctgtgtgtgacctgctttggtctgatccctcagaggattatggcaatgagaagaccttggagcactatacccacaacactgtccgagggtgctcttatttctacagttaccctgcagtttgtgaatttttgcagaacaataatttactatcaattatcagagcccatgaagcccaagatgctgggtatcgaatgtacaggaagagccaagccacaggctttccatcacttattacaattttctctgcccccaattacctagatgtctataacaataaagctgctgtgttgaaatatgaaaacaatgtcatgaatatcaggcagtttaactgttctccacacccctactggcttccaaactttatggatgttttcacatggtctttgccttttgttggggaaaaagtcacagagatgctggtaaatgtgctcaacatatgctctgatgacgaactgatttctgatgatgaagcagaaggaagcactacagttcgtaaggagatcatcaggaataagatcagagccattgggaagatggcacgggtcttttcaattcttcggcaagaaagtgagagtgtgctgactctcaagggcctgactcccacaggcacactccctctgggcgtcctctcaggaggcaagcagactatcgagacagccatcagagggttctcgcttcagcacaagatccggagttttgaagaagcgcgaggtctggaccgaattaatgagcgaatgccaccccgaaaggatagcatacacgctggtgggccaatgaaatctgtaacctcagcacactcacatgctgcgcacaggagcgaccaagggaagaaagcccattcatgacttagagtcctgccgtggctcaggtggatctaaaactcaagaacaaattctatttatttattattggaaaatgaaaagcaactcaaaacaacttcaacgtggaggtgcatttataattcagtctgcatttattctgtaaaaaggtggctgttttataaattcttttaatttatgttcaatatatataaaaagtgcatctgttttgtttttcccttttttctccataattttaagaaatgaatctgattgttgtcaacacatttgtgaagtcttgtgctataaaggggaacttcccctaataaaagggccttggaaacctcaaacctgggtttctgacttgaa

SEQ ID NO: 7171 - protein, 502 aa, Homo sapiens
MSGRRFHLSTTDRVIKAVPFPPTQRLTFKEVFENGKPKVDVLKNHLVKEGRLEEEVALKIINDGAAILRQEKTMIEVDAPITVCGDIHGQFFDLMKLFEVGGSPSNTRYLFLGDYVDRGYFSIECVLYLWSLKINHPKTLFLLRGNHECRHLTDYFTFKQECRIKYSEQVYDACMETFDCLPLAALLNQQFLCVHGGMSPEITSLDDIRKLDRFTEPPAFGPVCDLLWSDPSEDYGNEKTLEHYTHNTVRGCSYFYSYPAVCEFLQNNNLLSIIRAHEAQDAGYRMYRKSQATGFPSLITIFSAPNYLDVYNNKAAVLKYENNVMNIRQFNCSPHPYWLPNFMDVFTWSLPFVGEKVTEMLVNVLNICSDDELISDDEAEGSTTVRKEIIRNKIRAIGKMARVFSILRQESESVLTLKGLTPTGTLPLGVLSGGKQTIETAIRGFSLQHKIRSFEEARGLDRINERMPPRKDSIHAGGPMKSVTSAHSHAAHRSDQGKKAHS

SEQ ID NO: 7172 - DNA, 2305 bp, Homo sapiens
gagggcggcgctcggggcgggaggcccggccgggtccgctaggacagcggggccgctgggaagttgtgagagcggcgctcgggggcgcgcttgcgtgcacgagggcccgggccgcgagcagccgcggccgtcccggtcgccacccttagcagcggtcgcggtcggtgccgaagcggtgttccccgccttagccgctggcgcctcccaagagagcggccggtgggccctcgtcctgtcagtggcgtcggaggccggcgctgcggtggccgcgcccttctggtgctcggacaccgctgaggagccggggccgggcacggctggctgacggctccgggcagctaaggctgcccgaggagaaggcggcggccgcggcgtaggcgcacgtccggcgggctcctggagcctggaggaggccgaggggaccatgtccgggaggcgcttccacctctccaccaccgaccgcgtcatcaaagctgtcccctttcctccaacccaacggcttactttcaaggaagtatttgagaatgggaaacctaaagttgatgttttaaaaaaccatttggtaaaggaaggacgactggaagaggaagtagccttaaagataatcaatgatggggctgccatcctgaggcaagagaagactatgatagaagtagatgctccaatcacagtatgtggtgatattcatggacaattctttgacctaatgaagttatttgaagttggaggatcacctagtaacacacgctacctctttctgggtgactatgtggacagaggctatttcagtatagagtgtgtgctgtatttatggagtttaaagattaatcatcccaaaacattgtttctgcttcggggaaatcatgaatgcaggcatcttacagactatttcaccttcaaacaggaatgtcgaatcaaatattcggaacaggtgtatgatgcctgtatggagacatttgactgtcttcctcttgctgccctcttaaaccagcagtttctctgtgtacatggaggaatgtcacctgaaattacttctttagatgacattaggaaattagacaggtttacggaacctcccgcctttggacctgtgtgtgacctgctttggtctgatccctcagaggattatggcaatgagaagaccttggagcactatacccacaacactgtccgagggtgctcttatttctacagttaccctgcagtttgtgaatttttgcagaacaataatttactatcaattatcagagcccatgaagcccaagatgctgggtatcgaatgtacaggaagagccaagccacaggctttccatcacttattacaattttctctgcccccaattacctagatgtctataacaataaagctgctgtgttgaaatatgaaaacaatgtcatgaatatcaggcagtttaactgttctccacacccctactggcttccaaactttatggatgttttcacatggtctttgccttttgttggggaaaaagtcacagagatgctggtaaatgtgctcaacatatgctctgatgacgaactgatttctgatgatgaagcagaaggaagcactacagttcgtaaggagatcatcaggaataagatcagagccattgggaagatggcacgggtcttttcaattcttcggcaagaaagtgagagtgtgctgactctcaagggcctgactcccacaggcacactccctctgggcgtcctctcaggaggcaagcagactatcgagacagccacagtagaagcggtagaggcccgggaagccatcagagggttctcgcttcagcacaagatccggagttttgaagaagcgcgaggtctggaccgaattaatgagcgaatgccaccccgaaaggatagcatacacgctggtgggccaatgaaatctgtaacctcagcacactcacatgctgcgcacaggagcgaccaagggaagaaagcccattcatgacttagagtcctgccgtggctcaggtggatctaaaactcaagaacaaattctatttatttattattggaaaatgaaaagcaactcaaaacaacttcaacgtggaggtgcatttataattcagtctgcatttattctgtaaaaaggtggctgttttataaattcttttaatttatgttcaatatatataaaaagtgcatctgttttgtttttcccttttttctccataattttaagaaatgaatctgattgttgtcaacacatttgtgaagtcttgtgctataaaggggaacttcccctaataaaagggccttggaaacctcaaacctgggtttctgacttgaa

SEQ ID NO: 7173 - protein, 512 aa, Homo sapiens; identical to SEQ ID NO: 990

SEQ ID NO: 7174 - DNA, 478 bp, Homo sapiens
gcggccgcggcgtaggcgcacgtccggcgggctcctggagcctggaggaggccgaggggaccatgtccgggaggcgcttccacctctccaccaccgaccgcgtcatcaaagctgtcccctttcctccaacccaacggcttactttcaaggaagtatttgagaatgggaaacctaaagttgatgttttaaaaaaccatttggtaaaggaaggacgactggaagaggaagtagccttaaagataatcaatgatggggctgccatcctgaggcaagagaagactatgatagaagtagatgctccaatcacagtatgtggtgatattcatggacaattctttgacctaatgaagttatttgaagttggaggatcacctagtaacacacgctacctctttctgggtgactatgtggacagaggctatttcagtatagaggtaaaaattaaactggatatgttgggactattatattgtctttc

SEQ ID NO: 7175 - protein, 137 aa, Homo sapiens
MSGRRFHLSTTDRVIKAVPFPPTQRLTFKEVFENGKPKVDVLKNHLVKEGRLEEEVALKIINDGAAILRQEKTMIEVDAPITVCGDIHGQFFDLMKLFEVGGSPSNTRYLFLGDYVDRGYFSIEVKIKLDMLGLLYC

SEQ ID NO: 7176 - DNA, 631 bp, Homo sapiens
gggttcccccttgtttataaaataaataattcgggatatttggaaagcacagagaagtctaaagaagataaaagtgtccataatcaggttgcagtgagccaagatcacgccactctactccagcctgggcgacaaagcaagattccatctcaaaaaataaaataaaataaaagtgtccataatcatgccacttagaggtaatcactgttatcacactatttgaaatatggtcttccattcttttttattattatgaaatagttcaggtatacatatatctgtatatattttacaaataaaattgggctcatatgtactgtttaatacatttctgtttcacctaatgtagtagcattttttccatatcattaagtatttttgacaacatggtttgtaagtgttattttagtttttttaaagtattccatcttacgaacacacaatcatatatgtagccaatttagtaacaatcataggatatttaggttgtttctaactgtgactactgctgtaatagtaaaaataagtttaatataaaagtagaattattggccgggtgcgccaccatgcccggcccttccatgaaccatttttttaaatgtatagttaaatagcttactgacaagttcca

SEQ ID NO: 7177 - protein, 54 aa, Homo sapiens
GFPLVYKINNSGYLESTEKSKEDKSVHNQVAVSQDHATLLQPGRQSKIPSQKIK

SEQ ID NO: 7178 - DNA, 655 bp, Homo sapiens
taaaaacttcatatttctgtaactattttgttgtttataaagtatgactataaattaataggactttgaaaataaacatgccagaacaaacatatccaaatgagtattgtcccttcaaagtagttaccttgggaggctacacacctattccaacaatgctgtccttgttcaaaaacatttttggaactcctcttttggcattgccttcagagtctgcgacacattcttttgattatcctcaatgatgggaaatcttcgtcctttgagggtggatttgatttttggacagccaaaagtcattcggagtcaagactgataaataagctgctgtgttgaaatatgaaaacaatgtcatgaatatcaggcagtttaactgttctccacacccctactggcttccaaactttatggatgttttcacatggtctttgccttttgttggggaaaaaggtaagagaactaaagcacatgtctcatcagttgtttggtgactgagcataccttatatttgcatgagcccctccatgattcagaaatgttttctaattttgtttgttctctacatagattttttttttttttttctgagatggagtctcgctctgtcacccaggctggagtgcagtggcacgatctcagctaactacaacctccg

SEQ ID NO: 7179 - protein, 55 aa, Homo sapiens [sequence omitted]

SEQ ID NO: 7180 - DNA, 248 bp, Homo sapiens
ctttcttcctctacacacatctgctctgacagctttcctccaggcgtctcatcacagcaatactgaaagggactgtggcaagccagttttgggacccgtcctccaggaaaaagaagtgggaggtgagtctcaacagtgaatgactggaaacaagagcttataaaactgcttttgggtgtgttcccagtggacagaagaaaacaagaataagaatctttaaaaatcatgattaaaggtctttcgtgtaa

SEQ ID NO: 7181 - protein, 45 aa, Homo sapiens
FLPLHTSALTAFLQASHHSNTERDCGKPVLGPVLQEKEVGGESQQ

SEQ ID NO: 7182 - DNA, 600 bp, Homo sapiens
agaaatttctgatacagcctctagaaaggctgtaccactttacattttgcaggatgcatagtcacagtgctgtctccaatactgtttatgatacttgttatagtctggtgttactaagtttttaattaaatttttagtttatatttttatgagactaatggacaattttttcttgtgtttgttggcaatgtttatctctcttttgtgacttgtcaattcatatcttctatcctttttttgagacagagtcgagactcatctcaaaaaaaaaaaaaaaaaaaaaaaaaaaggaagaacaattatatcccctgaaagagaagctatagaatccattaaacaaaaaaacatactattcctgtgaagagatttgtaaactgttctgtcctccgtttttgttccttgtttttggcatcatttattctgcaaataatatctttgtttaatgttattttcatgatctgtggggttagaaaatattggatgctcatagatgtgaattaatgtaaaaccataaacttttaagaaatggaagaaactactgacaaaataaatttgcaatttaatgttgtatcatgattccaaggatatctcttatgagct

SEQ ID NO: 7183 - protein, 60 aa, Homo sapiens
IFSLYFYETNGQFFLVFVGNVYLSFVTCQFISSILFLRQSRDSSQKKKKKKKKRKNNYIP

SEQ ID NO: 7184 - DNA, 4577 bp, Homo sapiens
gtaatataggctccctctttcacactctgtcaatggcacaaagccctattgttaatacagttctctactcacactcaagataagagtaaacaacactgtccttcgactacacaactttcttcctctacacacatctgctctgacagctttcctccaggcgtctcatcacagcaatactgaaagggactgtggcaagccagttttgggacccgtcctccagacggagtctcgctctgtcgcccaggccggactgcggactgcagtggcgcaatctcggctcactgcaacctccaactccctggttcaagcaattctcctgcctcagcctccccagtagctgggattacacgcatgtgccaccacacccagctaatttttgttatttttagtagagatgggctttcaccatgttggccaggatggtctcgatctcctgacgttgtgatccaccggcctcagcctcccaaagtgctgggattacaggtgcgagccaccgcgcccagcttggatgaaaattcttaaaagggtaaactttatagatatggtacagttgaaaattttggagatcagctaccatatttacataaaatagggcagggtagagggagcagattttagctttactcattctgaggctggagagactcctgaataatgaccatgaacagcaagtccagctgtgtctcatgcaggcatggcttataatatttttcctatagagatcagctgtgcctcaaaccgtgtgtttttaaagcactcagagggaagaggatctaagggacaatgccaaaaggcaaaaaaggccccgaaattatccaatttttaaaaatcttcccttgctccttaatgacattcaataatagtctattgacaaaacaaataagggtttctctgttcctattttgaacaatgtcaggaaatcatccctaagttatcaggatggcaaagaaagctaatcttaagaaggcaaatctttgctattgagagaaacttgcttcattgaattgttcatggaagaaccaaaaaaggcaatgaaagacataaaaaatactgatgttcctggagaggctgagtcttttactcctaggcaaggagcagtatcaagctcatcagagtgtgataagcaattcttaccttgccaatcaatatccagtcacaaaagaccagcaaatcagcaatgcctctacttgtaaccaaagtgtcaccttgagagtttaaggaaaacggaggctatttttgttttatcattctattaaagaaacacacacacacacacacacacacacacacacacacacacccccttggcttattgttttgcttttgctctaaacattcagaacacggaaataaaaaaaggatatatgttttgaacttacattagatgagttttcaaatttgtaaaagaaataatcatctgatcgatttaaatgtcctgtgatatgtatgtcactaaaagtgagaaacctggtccatgtgaagcatcattttcaaaatggcatttcagaaaagtttacaaaggagtcctgacatgcctgaggaattgttttgtttttgttttcctaaatgggagaagttgcagaaaaagaaggtccctgtgggccttccacaaggaaggtcctgtgaaggaaaacacaatgtaactgtttccagtatctttagcacacacagggggaaacattcaataaaacagaagagactttgaaaacaccaaaactgcagaactttgacagcaattaaaatgtctgtttaatcatggccctagacaggaaaagtagtcttcgagcaaacccagggcagggtccagccatcttggaagttgttgtttacattaaaacagctacagaacggaagggataactttatctttagaattcaaccgaattttcaaacttaacctcctctaagagttagtgctgctctaaaacttactcaggttttcttgaaccaggaccacctacctctctactctggctgattcctccacagctcagagggaaccagtgaaatactgtatataattttgtgatggttctgtcaaggaaacttgctttatcattctgctttttgagacaatagtgaagccattcctaaataatcatccgtaataaaatattattttttgcttataaggatttacagtaactatttctactactgcctgcttatggaggcccctaagagtggtttctacctgtggattgtatatatgtaacagccttaatgaaaaggagaaaagggataaggtactagcagctctgcagtctgtcacatggaatgactttcatcagtgaaatttccaaagacaggatcttttctaatcctgggattggaaaagaaaggagcataaggatatctaggtgcttaatacccgatttgagttcaacaacaatcaggaaaagacagttactagagacttttccccccttctttcacaggttttactcacaacccattcagagatcctttatctccttcctatctttttattaatggagcaatctatgcaggcagattccattccctaagagtgccttgatttctgccataaacaaatcagaaactgttagaaaaaaaggtataggaaaacagagatagatgggctaagtcttcattcttctaatgagaagtatggttttttggggaaaaaaaaaaacaccaccaaaattatgttgttctttgtttttctggtttcctggaaactcccaatatgaagtattactgtctgaaatacttgctttagtgctagactgccgcatcacaaatgacactaaggaatgccataaatgtgcacgttccatgctctgatgtaatgttcccaggcatgtacattcactgcagagctgaccaatgactattatgacacggctcctgcgatgaggctagttaaaatgggagcctaagtagccccaaaatttccttcactagttggttgtgacttgaaaatcaaactaagggaagataattcacacactacatctgaacacttgcttttcgcattccaaaatatgctaatgaaggctgaaataccattcaacctaaagagtaactgatatagaagacaggaaatcctcacttatccaatgttctttagcaagaccttcaattcacaaggggaccattgaactcttgtcagtttctactaccccagctggtttcagtaatactgacagggaacaacagaaggatgatgggaaggcacatgcgagagctgatgccaacagcctagaagggcatatatacatcttgttgtagaaggtgctgctgagggcatttatcaaatatttagaaagtgacttcctttacagaagtcacctggggttcaaaaatgaaagtaaaataatctggcaattgtgaaagctttctgaaaatctttctcctccaaagtcctaaggaaatttaaaccaatcatgcccatggtcagatgaacagattttaagtaaatctaagaacatcccttattattttttattttgtttactagaacatatttaaacgaactgagagtccagagaaagtaggttattatagaaaacatttcccttcgcccttaaaatcactggatttgggttattcactttgaagttctactatgatccagtttcccatcaaaagggaagcacttttagccactgaaatctaagaggactttcttcaatggcacccagcagaaaaggaaaaaaatgaaaaggaaaaaaatcttcttgcatttgaaacgttattagtcttacatgaaagacattaccttccaaaaaacaataatgaagactgactagttcaagtcagaaacccaggtttgaggtttccaaggcccttttattaggggaagttcccctttatagcacaagacttcacaaatgtgttgacaacaatcagattcatttcttaaaattatggagaaaaaagggaaaaacaaaacagatgcactttttatatatattgaacataaattaaaagaatttataaaacagccacctttttacagaataaatgcagactgaattataaatgcacctccacgttgaagttgttttgagttgcttttcattttccaataataaataaatagaatttgttcttgagttttagatccacctgagccacggcaggactctaagtcatgaatgggctttcttcccttggtcgctcctgtgcgcagcatgtgagtgtgctgaggttacagatttcattggcccaccagcgtgtatgctatcctttcggggtggcattcgctcattaattcggtccagacctcgcgcttcttcaaaactccggatcttgtgctgaagcgagaaccctctgatggctacagaaaaacaggaagcaggtggagagagctcaattaggcagcaaagcaacaggcttaaaaaaagtttcttagcacacagcaacctcctagagaaacacacagaaaggtggctatggagcacacgtctagtgaaagtcatgggcaatgtctgactgaatcagtcttggctgcagctactgcttccttaaagcccaaagggcagctgaaattgtgaaagtaattttcataaaagctctatatgcataatcatggtagacatatacctaac

SEQ ID NO: 7185 - protein, 71 aa, Homo sapiens
MTFISEISKDRIFSNPGIGKERSIRISRCLIPDLSSTTIRKRQLLETFPPFFHRFYSQPIQRSFISFLSFY

SEQ ID NO: 7186 - DNA, 503 bp, Homo sapiens
atgattatttcttttacaaatttgaaaactcatctaatttgttatagtaacagtggaacccaagtttctcctaaagcattacccagctttccttgcccaggcagaaaagatggcagagggagggtgaacccagggcccatctgtgggtatgggctccaatttcctaaattgtttgtggttataaccatggcttccaccttgtctggcaccgggtccacatcttttctgagacctgctagaagctgacagccacttgtttgtttcatctttcctgagaactaagagaggttcacccagctcagttcttctcaaagacaccccgtctgtgcattgtgcttgtttgctcatccatgaaaagaggaagagagaacagccgtggatgtgatgtcagtatcaaaacttccttgaggacaggcgggataaattgggcaaacggctgagttctcccgcagcctttgggagattggccctgagaacccagaatagatgcccattatacatca

SEQ ID NO: 7187 - protein, 81 aa, Homo sapiens
MIISFTNLKTHLICYSNSGTQVSPKALPSFPCPGRKDGRGRVNPGPICGYGLQFPKLFVVITMASTLSGTGSTSFLRPARS

SEQ ID NO: 7188 - DNA, 703 bp, Homo sapiens
aggcagaaaagatggcagagggagggtgaacccagggcccatctgtgggtatgggctccaatttcctaaattgtttgtggttataaccatggcttccaccttgtctggcaccgggtccacatcttttctgagacctgctagaaggtcagagccctagagaataagagaagcttgctgctggtgagggggtatggccaggattcctggagtcggaagagcttcagcttcaccatcttgggagaagaaggaagaaagtgaaagcgatgtggtccttcttagtcccaaggaccctgacagaggacacgcagaggagcagctggcttgcccggagtcctcccaccttgacccaagcatgcagggcccaccccgcagcctccgcgctgggctcagcctggacgacttcatccctggccacctccagtcccacatagggtcttcctcccgggggacacggttccacgaccccgcgcccaggactgtgtgcaatgggggctacacaccaagacgagatgcttcccagcacccggaccctgcgtggtatcagacctggccaggccctgggagcaagccctctgcaagcacaaagatccctgcctcccagcacacccagaactggtcagccacgtggaccaaggacagcaagcgtcgggacaagcgctgggtcaagtacgagggaatcgggcccgtggacgagagcggcatg

SEQ ID NO: 7189 - protein, 170 aa, Homo sapiens
MARIPGVGRASASPSWEKKEESESDVVLLSPKDPDRGHAEEQLACPESSHLDPSMQGPPRSLRAGLSLDDFIPGHLQSHIGSSSRGTRFHDPAPRTVCNGGYTPRRDASQHPDPAWYQTWPGPGSKPSASTKIPASQHTQNWSATWTKDSKRRDKRWVKYEGIGPVDESG

SEQ ID NO: 7190 - DNA, 469 bp, Homo sapiens
gatggcagagggagggtgaacccagggcccatctgtgggtatgggctccaatttcctaaattgtttgtggttataaccatggcttccaccttgtctggcaccgggtccacatcttttctgagacctgctagaagagtgtgaaagagggagcctatattacattggggtttgggacctgacctgcctatatctagccagcgagagtgaatggggtcagtgttagctgccttcatctatgcagtcacaaaggtggcttaagattaagaagtgaggacatggaggcggactgtccctctgagcagctctgaagtagggccaagcacactgccttccagtaagttcttgcccacattccttcactcccttgacgtagatgtctccaaatactcttaacatgaaatgcatgtaatgaggagcaggcctgtcatagatcttgatttggggcaataaagatgtgtttttgtcacag

SEQ ID NO: 7191 - protein, 33 aa, Homo sapiens
DLLEECERGSLYYIGVWDLTCLYLASESEWGQC

SEQ ID NO: 7192 - DNA, 376 bp, Homo sapiens
ttgtgcttgtttgctcatccatgaaaagaggaagagagaacagccgtggatgtgatgagcaggaatcaacagaggacccaggagaaagggatggagcccagggcatgaaacatagtccagattcctgctggtcagagccctagagaataagagaagcttgctgctggtgagggggtatggccaggattcctggagtcggaagagcttcagcttcaccatcttgggagaagaaggaagaaagtgaaagcgatgtggtccttcttagtcccaaggaccctgacagctttcacatgtgatgtttcaaggcaacggggagagcttctttaccagaacgagggagaagataagactaaagcagtaatggtggtagggactg

SEQ ID NO: 7193 - protein, 41 aa, Homo sapiens
MWSFLVPRTLTAFTCDVSRQRGELLYQNEGEDKTKAVMVVG

SEQ ID NO: 7194 - DNA, 3165 bp, Homo sapiens
cgcgcgcgccccgacggacggagagcactcgcacgtccctcctctccggcccagccccggcccgcagtccagatccgagacccaaactccgcccgccccgccgcgcgactctcacggtccggcctccggcgcgcgccccttcggcctccctcttcctgcgccggcgcccggcccggcccggcccgtcctgacccggtcacgagggccgcgacggcccgcgcttctccttgcccttcctcctcgagcgcccgcgccaggcagcagccgggcagggatgctcctgcgctcccgggcggcctcgggcccagccacctgctcgccggggaagaggacacgcagaggagcagctggcttgcccggagtcctcccaccttgacccaagcatgcagggcccaccccgcagcctccgcgctgggctcagcctggacgacttcatccctggccacctccagtcccacatagggtcttcctcccgggggacacgggtgcccgtgatccggaatggtggctccaacacccttaatttccagttccacgaccccgcgcccaggactgtgtgcaatgggggctacacaccaagacgagatgcttcccagcacccggaccctgcgtggtatcagacctggccaggccctgggagcaagccctctgcaagcacaaagatccctgcctcccagcacacccagaactggtcagccacgtggaccaaggacagcaagcgtcgggacaagcgctgggtcaagtacgagggaatcgggcccgtggacgagagcggcatgcccattgccccccgatccagcgttgacagacccagagactggtaccggagaatgttccagcagattcaccggaaaatgccagacttgcagctggactggaccttcgaggagccacccagagaccccaggcatctaggagcccagcaaagacctgcccacaggcccggcccggcaacatcttccagtggaagaagctgggaccactctgaagagttacctagaagcaccttcaactacagacctggagcattctccactgtgctgcagccctcaaatcaggtgctcagacgccgggaaaaagtagacaatgtctggacggaagagtcctggaaccagtttctgcaggaactagagactgggcagaggcccaagaaaccgctggtggacgaccctggtgagaagccctcccagcccattgaggtgctgctggagagagagctggccgagctgagcgccgagctggacaaggacctgcgggcaattgagacccgactgccgtcccccaagagctcgccggcgccccgacgggccccggagcagcggcccccggccggcccggcctcagcctggagctccagctacccacatgcaccttacctgggttccgcccggtccctgagtccccacaaaatggctgatggaggaagccccttcctaggtcggagggactttgtctacccttcctcaacccgagaccctagtgcctctaacggagggggcagcccagccaggagggaagagaagaagagaaaggccgccaggctcaagtttgacttccaggcgcagtcccccaaggagctgactctgcagaagggtgacattgtctacatccacaaggaggtggacaagaactggctggagggagagcaccacggccgcctgggcatcttccctgctaattatgtggaggtgctgcccgcagatgagatccctaagcccatcaagcccccgacctaccaggtgctggagtatggagaggctgtggcccagtacaccttcaagggggacctggaggtggagctgtccttccgcaagggagagcacatctgcctgatccgcaaggtgaacgagaactggtacgagggacgcatcacgggcacggggcgccaaggcatattccctgccagctacgtgcaggtgtctcgtgaaccccggctccggctctgtgacgacggcccccagctccccacgtctccccgcctgaccgctgccgcccgctcagcccgtcaccccagctccccctcagccctgcgcagcccagctgaccccatcgacttggggggacagacctccccccgtcgcactggcttctccttccccacccaggagcctagaccccagacccagaatcttggcacccctggtccagctctgtcccactctcgaggtcccagccatcccctggacctggggacctcctctcctaacacctctcagatacactggaccccgtaccgggcgatgtaccagtacaggccccagaacgaagacgagctggagctgcgcgagggggacagggtggatgtcatgcagcagtgtgacgatggctggtttgtgggtgtctcccggaggacccagaaattcggaacgttccctggaaattacgttgccccggtgtgagtggtctccatggcaacttggagccagccaggatggggtggggagcggtggcactcgtgggagggagaggacccccgcccacatcctccttccccaggacctgagctcccagcatctgcagacgacccccgcagcctttccctcggacccccctcgaagccccctggactgattcccacccacgactcacaggcattcctcccacagccctttcatttcctccccaccccactccccaaatacagaggtctgctttgaagcggagaccatttccaggccttattgagaccagaccccaagtcccccacccccatcctgctccagcgtttcctctaacagggaccagctctccgctttgcccccacggggttcctctaaccagaaccagcttcctagcctcgtagagaccaaaggccgcccccgcctgctggggttcctcccagcaccccagcttgctggctgccctctttgccttctggcctccagctgggtgtgggggggcggagcaaggcgggggacagacgcagcaccttcttagcgatctaggcctggcaagagctctggccccaaggcctcctcttcccaggggctgccaagtcctggccctggccctggcatatcaccccgcactgtggggccaggcaccactagcctggctcaaatattccccagggagactgctgtgtgctgcccgcctgcctgctggctctcccccagccccacatcccctctggaagagaatgtaaaataaacctggacacaaggg

SEQ ID NO: 7195 - protein, 671 aa, Homo sapiens
MQGPPRSLRAGLSLDDFIPGHLQSHIGSSSRGTRVPVIRNGGSNTLNFQFHDPAPRTVCNGGYTPRRDASQHPDPAWYQTWPGPGSKPSASTKIPASQHTQNWSATWTKDSKRRDKRWVKYEGIGPVDESGMPIAPRSSVDRPRDWYRRMFQQIHRKMPDLQLDWTFEEPPRDPRHLGAQQRPAHRPGPATSSSGRSWDHSEELPRSTFNYRPGAFSTVLQPSNQVLRRREKVDNVWTEESWNQFLQELETGQRPKKPLVDDPGEKPSQPIEVLLERELAELSAELDKDLRAIETRLPSPKSSPAPRRAPEQRPPAGPASAWSSSYPHAPYLGSARSLSPHKMADGGSPFLGRRDFVYPSSTRDPSASNGGGSPARREEKKRKAARLKFDFQAQSPKELTLQKGDIVYIHKEVDKNWLEGEHHGRLGIFPANYVEVLPADEIPKPIKPPTYQVLEYGEAVAQYTFKGDLEVELSFRKGEHICLIRKVNENWYEGRITGTGRQGIFPASYVQVSREPRLRLCDDGPQLPTSPRLTAAARSARHPSSPSALRSPADPIDLGGQTSPRRTGFSFPTQEPRPQTQNLGTPGPALSHSRGPSHPLDLGTSSPNTSQIHWTPYRAMYQYRPQNEDELELREGDRVDVMQQCDDGWFVGVSRRTQKFGTFPGNYVAPV

SEQ ID NO: 7196 - DNA, 3459 bp, Homo sapiens
cgcgcgcgccccgacggacggagagcactcgcacgtccctcctctccggcccagccccggcccgcagtccagatccgagacccaaactccgcccgccccgccgcgcgactctcacggtccggcctccggcgcgcgccccttcggcctccctcttcctgcgccggcgcccggcccggcccggcccgtcctgacccggtcacgagggccgcgacggcccgcgcttctccttgcccttcctcctcgagcgcccgcgccaggcagcagccgggcagggatgctcctgcgctcccgggcggcctcgggcccagccacctgctcgccggggaagaggacacgcagaggagcagctggcttgcccggagtcctcccaccttgacccaagcatgcagggcccaccccgcagcctccgcgctgggctcagcctggacgacttcatccctggccacctccagtcccacatagggtcttcctcccgggggacacgggtgcccgtgatccggaatggtggctccaacacccttaatttccagttccacgaccccgcgcccaggactgtgtgcaatgggggctacacaccaagacgagatgcttcccagcacccggaccctgcgtggtatcagacctggccaggccctgggagcaagccctctgcaagcacaaagatccctgcctcccagcacacccagaactggtcagccacgtggaccaaggacagcaagcgtcgggacaagcgctgggtcaagtacgagggaatcgggcccgtggacgagagcggcatgcccattgccccccgatccagcgttgacagacccagagactggtaccggagaatgttccagcagattcaccggaaaatgccagacttgcagctggactggaccttcgaggagccacccagagaccccaggcatctaggagcccagcaaagacctgcccacaggcccggcccggcaacatcttccagtggaagaagctgggaccactctgaagagttacctagaagcaccttcaactacagacctggagcattctccactgtgctgcagccctcaaatcaggtgctcagacgccgggaaaaagtagacaatgtctggacggaagagtcctggaaccagtttctgcaggaactagagactgggcagaggcccaagaaaccgctggtggacgaccctggtgagaagccctcccagcccattgaggtgctgctggagagagagctggccgagctgagcgccgagctggacaaggacctgcgggcaattgagacccgactgccgtcccccaagagctcgccggcgccccgacgggccccggagcagcggcccccggccggcccggcctcagcctggagctccagctacccacatgcaccttacctgggttccgcccggtccctgagtccccacaaaatggctgatggaggaagccccttcctaggtcggagggactttgtctacccttcctcaacccgagaccctagtgcctctaacggagggggcagcccagccaggagggaagagaagaagagaaaggccgccaggctcaagtttgacttccaggcgcagtcccccaaggagctgactctgcagaagggtgacattgtctacatccacaaggaggtggacaagaactggctggagggagagcaccacggccgcctgggcatcttccctgctaattatgtggaggtgctgcccgcagatgagatccctaagcccatcaagcccccgacctaccaggtgctggagtatggagaggctgtggcccagtacaccttcaagggggacctggaggtggagctgtccttccgcaagggagagcacatctgcctgatccgcaaggtgaacgagaactggtacgagggacgcatcacgggcacggggcgccaaggcatattccctgccagctacgtgcaggtgtctcgtgaaccccggctccggctctgtgacgacggcccccagctccccacgtctccccgcctgaccgctgccgcccgctcagcccgtcaccccagctccccctcagccctgcgcagcccagctgaccccatcgacttggggggacagacctccccccgtcgcactggcttctccttccccacccaggagcctagaccccagacccagaatcttggcacccctggtccagctctgtcccactctcgaggtcccagccatcccctggacctggggacctcctctcctaacacctctcagatacactggaccccgtaccgggcgatgtaccagtacaggccccagaacgaagacgagctggagctgcgcgagggggacagggtggatgtcatgcagcagtgtgacgatggctggtttgtgggtgtctcccggaggacccagaaattcggaacgttccctggaaattacgttgccccggtgtgagtggtctccatggcaacttggagccagccaggatggggtggggagcggtggcactcgtgggagggagaggacccccgcccacatcctccttccccaggacctgagctcccagcatctgcagacgacccccgcagcctttccctcggacccccctcgaagccccctggactgattcccacccacgactcacaggcattcctcccacagccctttcatttcctccccaccccactccccaaatacagaggtctgctttgaagcggagaccatttccaggccttattgagaccagaccccaagtcccccacccccatcctgctccagcgtttcctctaacagggaccagctctccgctttgcccccacggggttcctctaaccagaaccagcttcctagcctcgtagagaccaaaggccgcccccgcctgctggggttcctcccagcaccccagcttgctggctgccctctttgccttctggcctccagctgggtgtgggggggcggagcaaggcgggggacagacgcagcaccttcttagcgatctaggcctggcaagagctctggccccaaggcctcctcttcccaggggctgccaagtcctggccctggccctggcatatcaccccgcactgtggggccaggcaccactagcctggctcaaatattccccagggagactgctgtgtgctgcccgcctgcctgctggctctcccccagccccacatcccctctggaagagaatgtaaaataaacctggacacaagggaccttgtctctgcggccttttccttggggtaggggatgcctcctcctgtctaggagatgggaattccttctgtggagggctgtgctgggagacaggtgggacaggtgtgtgtgtaagaggaggaggatggaaaaacaccattattacctccaaagatctctgcccttgggtgtcaggcaggttgcggcagcccccacaattgggcagctgtgtggcaagaagtgctgggagaatgaacagtgccaggccctggtagcagggagacaccagagatgggggactgaatgtggcctt

SEQ ID NO: 7197 - protein, 671 aa, Homo sapiens; identical to SEQ ID NO: 7195

SEQ ID NO: 7198 - DNA, 2027 bp, Homo sapiens
ccgggatcggccgcgcgggcgcctctaggaccccgcgtcccgcccgctctcctcccctcccgagccgcgaacttttccggaggcggcggcctcggctgccgctgggtcccggggtcgcgggccctgattgcgccgtttccccgcgcagagctcgccggcgccccgacgggccccggagcagcggcccccggccggcccggcctcagcctggagctccagctacccacatgcaccttacctgggttccgcccggtccctgagtccccacaaaatggctgatggaggaagccccttcctaggtcggagggactttgtctacccttcctcaacccgagaccctagtgcctctaacggagggggcagcccagccaggagggaagagaagaagagaaaggccgccaggctcaagtttgacttccaggcgcagtcccccaaggagctgactctgcagaagggtgacattgtctacatccacaaggaggtggacaagaactggctggagggagagcaccacggccgcctgggcatcttccctgctaattatgtggaggtgctgcccgcagatgagatccctaagcccatcaagcccccgacctaccaggtgctggagtatggagaggctgtggcccagtacaccttcaagggggacctggaggtggagctgtccttccgcaagggagagcacatctgcctgatccgcaaggtgaacgagaactggtacgagggacgcatcacgggcacggggcgccaaggcatattccctgccagctacgtgcaggtgtctcgtgaaccccggctccggctctgtgacgacggcccccagctccccacgtctccccgcctgaccgctgccgcccgctcagcccgtcaccccagctccccctcagccctgcgcagcccagctgaccccatcgacttggggggacagacctccccccgtcgcactggcttctccttccccacccaggagcctagaccccagacccagaatcttggcacccctggtccagctctgtcccactctcgaggtcccagccatcccctggacctggggacctcctctcctaacacctctcagatacactggaccccgtaccgggcgatgtaccagtacaggccccagaacgaagacgagctggagctgcgcgagggggacagggtggatgtcatgcagcagtgtgacgatggctggtttgtgggtgtctcccggaggacccagaaattcggaacgttccctggaaattacgttgccccggtgtgagtggtctccatggcaacttggagccagccaggatggggtggggagcggtggcactcgtgggagggagaggacccccgcccacatcctccttccccaggacctgagctcccagcatctgcagacgacccccgcagcctttccctcggacccccctcgaagccccctggactgattcccacccacgactcacaggcattcctcccacagccctttcatttcctccccaccccactccccaaatacagaggtctgctttgaagcggagaccatttccaggccttattgagaccagaccccaagtcccccacccccatcctgctccagcgtttcctctaacagggaccagctctccgctttgcccccacggggttcctctaaccagaaccagcttcctagcctcgtagagaccaaaggccgcccccgcctgctggggttcctcccagcaccccagcttgctggctgccctctttgccttctggcctccagctgggtgtgggggggcggagcaaggcgggggacagacgcagcaccttcttagcgatctaggcctggcaagagctctggccccaaggcctcctcttcccaggggctgccaagtcctggccctggccctggcatatcaccccgcactgtggggccaggcaccactagcctggctcaaatattccccagggagactgctgtgtgctgcccgcctgcctgctggctctcccccagccccacatcccctctggaagagaatgtaaaataaacctggacacaaggg

SEQ ID NO: 7199 - protein, 329 aa, Homo sapiens; identical to SEQ ID NO: 992

SEQ ID NO: 7200 - DNA, 898 bp, Homo sapiens
tcagatacactggaccccgtgagtaccatctgagggctcttgatcagacgtggggggggtcactggcaggcaatgccccatattccaccctcccccaagtccccacctgtggatttgggaaacttctaccaggtagcccttgtcctcgaagagcttatggtgatttggggcagggaggaggcgctggtctgtgatgttcccaatccctcctggcagctatgtggccttgtggccttggtctcctcattgggtttctagccctgaggtcggtgcatgtataattgaagtgtggaactggtggaatggacaggaaggcaccaggtgctcagaggaggcgagggttcagtgcttagggcccagagggcaggaggcaggcctgggaaagactacggtgagcacaggctgagttgctctgaggagctggatcaggggctagtgagagcatgaagggaccctggggcattcacaggaagcggcaacacttgggttagagcctctgggcccattctctggttgccatgatacgcttctcgcaggtaccgggcgatgtaccagtacaggccccagaacgaagacgagctggagctgcgcgagggggacagggtggatgtcatgcagcagtgtgacgatggctggtttgtgggtatgtgggcaggccgggagggggcatctcaggccccccagatgctttgcccgctggggttcccccccctcctcctcttcaagacacgagtttctgtggggctgagaggcctggatcggagtcccaagcttactcctaagcgtcggggtgctctcgggcaatgcattcagccttcccataggccttcccacccatctctaagtgagggtgccctattagaccagggacgtttctcccgatttcagttctgtgatt

SEQ ID NO: 7201 - protein, 116 aa, Homo sapiens
MYQYRPQNEDELELREGDRVDVMQQCDDGWFVGMWAGREGASQAPQMLCPLGFPPLLLFKTRVSVGLRGLDRSPKLTPKRRGALGQCIQPSHRPSHPSLSEGALLDQGRFSRFQFC

SEQ ID NO: 7202 - DNA, 908 bp, Homo sapiens
gacaagaagaaaaagtaccacttttgtattaggagccacaagcgctttgagaggaatgggcgagacctgtgccctttccggtgtctcccggaggacccagaaattcggaacgttccctggaaattacgttgccccggtgtgagtggtctccatggcaacttggagccagccaggatggggtggggagcggtggcactcgtgggagggagaggacccccgcccacatcctccttccccaggacctgagctcccagcatctgcagacgacccccgcagcctttccctcggacccccctcgaagccccctggactgattcccacccacgactcacaggcattcctcccacagccctttcatttcctccccaccccactccccaaatacagaggtctgctttgaagcggagaccatttccaggccttattgagaccagaccccaagtcccccacccccatcctgctccagcgtttcctctaacagggaccagctctccgctttgcccccacggggttcctctaaccagaaccagcttcctagcctcgtagagaccaaaggccgcccccgcctgctggggttcctcccagcaccccagcttgctggctgccctctttgccttctggcctccagctgggtgtgggggggcggagcaaggcgggggacagacgcagcaccttcttagcgatctaggcctggcaagagctctggccccaaggcctcctcttcccaggggctgccaagtcctggccctggccctggcatatcaccccgcactgtggggccaggcaccactagcctggctcaaatattccccagggagactgctgtgtgctgcccgcctgcctgctggctctcccccagccccacatcccctctggaagagaatgtaaaataaacctggacacaaggg

SEQ ID NO: 7203 - protein, 82 aa, Homo sapiens
MATWSQPGWGGERWHSWEGEDPRPHPPSPGPELPASADDPRSLSLGPPSKPPGLIPTHDSQAFLPQPFHFLPTPLPKYRGLL

SEQ ID NO: 7204 - DNA, 1202 bp, Homo sapiens
gacaagaagaaaaagtaccacttttgtattaggagccacaagcgctttgagaggaatgggcgagacctgtgccctttccggtgtctcccggaggacccagaaattcggaacgttccctggaaattacgttgccccggtgtgagtggtctccatggcaacttggagccagccaggatggggtggggagcggtggcactcgtgggagggagaggacccccgcccacatcctccttccccaggacctgagctcccagcatctgcagacgacccccgcagcctttccctcggacccccctcgaagccccctggactgattcccacccacgactcacaggcattcctcccacagccctttcatttcctccccaccccactccccaaatacagaggtctgctttgaagcggagaccatttccaggccttattgagaccagaccccaagtcccccacccccatcctgctccagcgtttcctctaacagggaccagctctccgctttgcccccacggggttcctctaaccagaaccagcttcctagcctcgtagagaccaaaggccgcccccgcctgctggggttcctcccagcaccccagcttgctggctgccctctttgccttctggcctccagctgggtgtgggggggcggagcaaggcgggggacagacgcagcaccttcttagcgatctaggcctggcaagagctctggccccaaggcctcctcttcccaggggctgccaagtcctggccctggccctggcatatcaccccgcactgtggggccaggcaccactagcctggctcaaatattccccagggagactgctgtgtgctgcccgcctgcctgctggctctcccccagccccacatcccctctggaagagaatgtaaaataaacctggacacaagggaccttgtctctgcggccttttccttggggtaggggatgcctcctcctgtctaggagatgggaattccttctgtggagggctgtgctgggagacaggtgggacaggtgtgtgtgtaagaggaggaggatggaaaaacaccattattacctccaaagatctctgcccttgggtgtcaggcaggttgcggcagcccccacaattgggcagctgtgtggcaagaagtgctgggagaatgaacagtgccaggccctggtagcagggagacaccagagatgggggactgaatgtggcctt

SEQ ID NO: 7205 - protein, 82 aa, Homo sapiens; identical to SEQ ID NO: 7203

SEQ ID NO: 7206 - DNA, 2236 bp, Homo sapiens
agacacacccaggcagcccaccctgcccaggacctggggatgcggggcgggagagcgcggccggcgtgggagagctttatggggctgccccctcgatcgtctgcgaagtggggcgcggggcagtccctggaccggctctgctgtgctccgggcagtcgggggcttgcgggcgctccggggaggatgcgggcaccaccggctggacggtcgcagcctgcagggggccctggggacagcctgcctcatccccccggcgggctcgggccaggtggcagcgcctgggctcgccgcgcggaggcggcggcttctcgggctaggggcggcggcaggggcggccccgggatcacatgggcggaggcaggtccgggagccccgggcgggctctccccagagtcgggtagacggcagcgggagcggtggcgtctccccgccttccctccctcccgggcctgggcgcccagccggacaggtgagcggcagccaggtgagcgcgcccacctgcgcctctccgcgcggcccgccctccccggcgccgggctcctctccgcgcccctgtcggcgcggaaccctggcctcgtccgcggcccagctccctggagcctcgcatcagcgggggcgcccccgcgagctgcgctctccccggccggagcgctcctcctccagcccccagcccgcagggtactttgccctcggagcgaaggaggctccagaactggtagagccgggccatcgggctgggcacctccccgcggcgcccgcagcgcggagtccactgaccggctcaaaggtatggcgttgacggtggatgtggccgggccagcgccctggggcttccgtatcacagggggcagggatttccacacgcccatcatggtgactaaggtggccgagcggggcaaagccaaggacgctgacctccggcctggagacataatcgtggccatcaacggggaaagcgcggagggcatgctgcatgccgaggcccagagcaagatccgccagagcccctcgcccctgcggctgcagctggaccggtctcaggctacgtctccagggcagaccaatggggacagctccttggaagtgctggcgactcgcttccagggctccgtgaggacatacactgagagtcagtcctccttaaggtcctcctactccagcccaacctccctcagcccgagggccggcagccccttctcaccaccaccctctagcagctccctcactggagaggcagccatcagccgcagcttccagagtctggcatgttccccgggcctccccgctgctgaccgcctgtcctactcaggccgccctggaagccgacaggccggcctcggccgcgctggcgactcggcggtgctggtgctgccgccttccccgggccctcgttcctccaggcccagcatggactcggaagggggaagcctcctcctggacgaggactcggaagtcttcaagatgctgcaggaaaatcgcgagggacgggcggccccccgacagtccagctcctttcggctcttgcaggaagccctggaggctgaggagagaggtggcacgccagccttcttgcccagctcactgagcccccagtcctccctgcccgcctccagggccctggccacccctcccaagctccacacttgtgagaagtgcagtaccagcatcgcgaaccaggctgtgcgcatccaggagggccggtaccgccaccccggctgctacacctgtgccgactgtgggctgaacctgaagatgcgcgggcacttctgggtgggtgacgagctgtactgtgagaagcatgcccgccagcgctactccgcacctgccaccctcagctctcgggcctgagcccgccatgccctcagcctgcctcactgctgggccagggtcatgcctatataagttggcatggcagggacaatggtgggcagttgctcttacatgagctaagtttggagacctgaggcccctttgtcctcgctgggtgggccaaggtctgggacctgtcttggactgtgggagactcaccctcaccttgccaggcctctcccctgcaggactggcattgcactagtctgaggtggccactgcctttgatcaacctttgtgtgcgagggtctaagtagggtcgaacacagaagtgggaaggagaggggtgggccaggggctaatggtgtcactgtgtaaagtttttgacatactagctctataaatatatgaatatggacaaaataaa

SEQ ID NO: 7207 - protein, 602 aa, Homo sapiens
MRGGRARPAWESFMGLPPRSSAKWGAGQSLDRLCCAPGSRGLAGAPGRMRAPPAGRSQPAGGPGDSLPHPPGGLGPGGSAWARRAEAAASRARGGGRGGPGITWAEAGPGAPGGLSPESGRRQRERWRLPAFPPSRAWAPSRTGERQPGERAHLRLSARPALPGAGLLSAPLSARNPGLVRGPAPWSLASAGAPPRAALSPAGALLLQPPARRVLCPRSEGGSRTGRAGPSGWAPPRGARSAESTDRLKGMALTVDVAGPAPWGFRITGGRDFHTPIMVTKVAERGKAKDADLRPGDIIVAINGESAEGMLHAEAQSKIRQSPSPLRLQLDRSQATSPGQTNGDSSLEVLATRFQGSVRTYTESQSSLRSSYSSPTSLSPRAGSPFSPPPSSSSLTGEAAISRSFQSLACSPGLPAADRLSYSGRPGSRQAGLGRAGDSAVLVLPPSPGPRSSRPSMDSEGGSLLLDEDSEVFKMLQENREGRAAPRQSSSFRLLQEALEAEERGGTPAFLPSSLSPQSSLPASRALATPPKLHTCEKCSTSIANQAVRIQEGRYRHPGCYTCADCGLNLKMRGHFWVGDELYCEKHARQRYSAPATLSSRA

SEQ ID NO: 7208 - DNA, 1544 bp, Homo sapiens
agagtcgggtagacggcagcgggagcggtggcgtctccccgccttccctccctcccgggcctgggcgcccagccggacaggtgagcggcagccaggtatggcgttgacggtggatgtggccgggccagcgccctggggcttccgtatcacagggggcagggatttccacacgcccatcatggtgactaaggtggccgagcggggcaaagccaaggacgctgacctccggcctggagacataatcgtggccatcaacggggaaagcgcggagggcatgctgcatgccgaggcccagagcaagatccgccagagcccctcgcccctgcggctgcagctggaccggtctcaggctacgtctccagggcagaccaatggggacagctccttggaagtgctggcgactcgcttccagggctccgtgaggacatacactgagagtcagtcctccttaaggtcctcctactccagcccaacctccctcagcccgagggccggcagccccttctcaccaccaccctctagcagctccctcactggagaggcagccatcagccgcagcttccagagtctggcatgttccccgggcctccccgctgctgaccgcctgtcctactcaggccgccctggaagccgacaggccggcctcggccgcgctggcgactcggcggtgctggtgctgccgccttccccgggccctcgttcctccaggcccagcatggactcggaagggggaagcctcctcctggacgaggactcggaagtcttcaagatgctgcaggaaaatcgcgagggacgggcggccccccgacagtccagctcctttcggctcttgcaggaagccctggaggctgaggagagaggtggcacgccagccttcttgcccagctcactgagcccccagtcctccctgcccgcctccagggccctggccacccctcccaagctccacacttgtgagaagtgcagtaccagcatcgcgaaccaggctgtgcgcatccaggagggccggtaccgccaccccggctgctacacctgtgccgactgtgggctgaacctgaagatgcgcgggcacttctgggtgggtgacgagctgtactgtgagaagcatgcccgccagcgctactccgcacctgccaccctcagctctcgggcctgagcccgccatgccctcagcctgcctcactgctgggccagggtcatgcctatataagttggcatggcagggacaatggtgggcagttgctcttacatgagctaagtttggagacctgaggcccctttgtcctcgctgggtgggccaaggtctgggacctgtcttggactgtgggagactcaccctcaccttgccaggcctctcccctgcaggactggcattgcactagtctgaggtggccactgcctttgatcaacctttgtgtgcgagggtctaagtagggtcgaacacagaagtgggaaggagaggggtgggccaggggctaatggtgtcactgtgtaaagtttttgacatactagctctataaatatatgaatatggacaaaataaa

SEQ ID NO: 7209 - protein, 352 aa, Homo sapiens; identical to SEQ ID NO: 998

SEQ ID NO: 7210 - DNA, 1463 bp, Homo sapiens
aagcccctgagtagctgctccgggagctgtggtgccctctccttctccctttggctcctctcctgctgccttacagtgcccccagagccggctaggggcatggacttcacctcctggtcctctcttcctcaggtatggcgttgacggtggatgtggccgggccagcgccctggggcttccgtatcacagggggcagggatttccacacgcccatcatggtgactaaggtggccgagcggggcaaagccaaggacgctgacctccggcctggagacataatcgtggccatcaacggggaaagcgcggagggcatgctgcatgccgaggcccagagcaagatccgccagagcccctcgcccctgcggctgcagctggaccggtctcaggctacgtctccagggcagaccaatggggacagctccttggaagtgctggcgactcgcttccagggctccgtgaggacatacactgagagtcagtcctccttaaggtcctcctactccagcccaacctccctcagcccgagggccggcagccccttctcaccaccaccctctagcagctccctcactggagaggcagccatcagccgcagcttccagagtctggcatgttccccgggcctccccgctgctgaccgcctgtcctactcaggccgccctggaagccgacaggccggcctcggccgcgctggcgactcggcggtgctggtgctgccgccttccccgggccctcgttcctccaggcccagcatggactcggaagggggaagcctcctcctggacgaggactcggaagtcttcaagatgctgcaggaaaatcgcgagggacgggcggccccccgacagtccagctcctttcggctcttgcaggaagccctggaggctgaggagagaggaaccaggctgtgcgcatccaggagggccggtaccgccaccccggctgctacacctgtgccgactgtgggctgaacctgaagatgcgcgggcacttctgggtgggtgacgagctgtactgtgagaagcatgcccgccagcgctactccgcacctgccaccctcagctctcgggcctgagcccgccatgccctcagcctgcctcactgctgggccagggtcatgcctatataagttggcatggcagggacaatggtgggcagttgctcttacatgagctaagtttggagacctgaggcccctttgtcctcgctgggtgggccaaggtctgggacctgtcttggactgtgggagactcaccctcaccttgccaggcctctcccctgcaggactggcattgcactagtctgaggtggccactgcctttgatcaacctttgtgtgcgagggtctaagtagggtcgaacacagaagtgggaaggagaggggtgggccaggggctaatggtgtcactgtgtaaagtttttgacatactagctctataaatatatgaatatggacaaaataaa

SEQ ID NO: 7211 - protein, 278 aa, Homo sapiens; identical to SEQ ID NO: 1002

SEQ ID NO: 7212 - DNA, 1502 bp, Homo sapiens
aagcccctgagtagctgctccgggagctgtggtgccctctccttctccctttggctcctctcctgctgccttacagtgcccccagagccggctaggggcatggacttcacctcctggtcctctcttcctcaggtatggcgttgacggtggatgtggccgggccagcgccctggggcttccgtatcacagggggcagggatttccacacgcccatcatggtgactaaggtggccgagcggggcaaagccaaggacgctgacctccggcctggagacataatcgtggccatcaacggggaaagcgcggagggcatgctgcatgccgaggcccagagcaagatccgccagagcccctcgcccctgcggctgcagctggaccggtctcaggctacgtctccagggcagaccaatggggacagctccttggaagtgctggcgactcgcttccagggctccgtgaggacatacactgagagtcagtcctccttaaggtcctcctactccagcccaacctccctcagcccgagggccggcagccccttctcaccaccaccctctagcagctccctcactggagaggcagccatcagccgcaggccggcctcggccgcgctggcgactcggcggtgctggtgctgccgccttccccgggccctcgttcctccaggcccagcatggactcggaagggggaagcctcctcctggacgaggactcggaagtcttcaagatgctgcaggaaaatcgcgagggacgggcggccccccgacagtccagctcctttcggctcttgcaggaagccctggaggctgaggagagaggtggcacgccagccttcttgcccagctcactgagcccccagtcctccctgcccgcctccagggccctggccacccctcccaagctccacacttgtgagaagtgcagtaccagcatcgcgaaccaggctgtgcgcatccaggagggccggtaccgccaccccggctgctacacctgtgccgactgtgggctgaacctgaagatgcgcgggcacttctgggtgggtgacgagctgtactgtgagaagcatgcccgccagcgctactccgcacctgccaccctcagctctcgggcctgagcccgccatgccctcagcctgcctcactgctgggccagggtcatgcctatataagttggcatggcagggacaatggtgggcagttgctcttacatgagctaagtttggagacctgaggcccctttgtcctcgctgggtgggccaaggtctgggacctgtcttggactgtgggagactcaccctcaccttgccaggcctctcccctgcaggactggcattgcactagtctgaggtggccactgcctttgatcaacctttgtgtgcgagggtctaagtagggtcgaacacagaagtgggaaggagaggggtgggccaggggctaatggtgtcactgtgtaaagtttttgacatactagctctataaatatatgaatatggacaaaataaa

SEQ ID NO: 7213 - protein, 238 aa, Homo sapiens
MALTVDVAGPAPWGFRITGGRDFHTPIMVTKVAERGKAKDADLRPGDIIVAINGESAEGMLHAEAQSKIRQSPSPLRLQLDRSQATSPGQTNGDSSLEVLATRFQGSVRTYTESQSSLRSSYSSPTSLSPRAGSPFSPPPSSSSLTGEAAISRRPASAALATRRCWCCRLPRALVPPGPAWTRKGEASSWTRTRKSSRCCRKIARDGRPPDSPAPFGSCRKPWRLRREVARQPSCPAH

SEQ ID NO: 7214 - DNA, 4611 bp, Homo sapiens
aagcccctgagtagctgctccgggagctgtggtgccctctccttctccctttggctcctctcctgctgccttacagtgcccccagagccggctaggggcatggacttcacctcctggtcctctcttcctcaggtatggcgttgacggtggatgtggccgggccagcgccctggggcttccgtatcacagggggcagggatttccacacgcccatcatggtgactaaggtggccgagcggggcaaagccaaggacgctgacctccggcctggagacataatcgtggccatcaacggggaaagcgcggagggcatgctgcatgccgaggcccagagcaagatccgccagagcccctcgcccctgcggctgcagctggaccggtctcaggctacgtctccagggcagaccaatggggacagctccttggaagtgctggcgactcgcttccagggctccgtgaggacatacactgagagtcagtcctccttaaggtcctcctactccagcccaacctccctcagcccgagggccggcagccccttctcaccaccaccctctagcagctccctcactggagaggcagccatcagccgcagcttccagagtctggcatgttccccgggcctccccgctgctgaccgcctgtcctactcaggccgccctggaagccgacaggccggcctcggccgcgctggcgactcggcggtgctggtgctgccgccttccccgggccctcgttcctccaggcccagcatggactcggaagggggaagcctcctcctggacgaggactcggaagtcttcaagatgctgcaggaaaatcgcgagggacgggcggccccccgacagtccagctcctttcggctcttgcaggaagccctggaggctgaggagagaggtggcacgccagccttcttgcccagctcactgagcccccagtcctccctgcccgcctccagggccctggccacccctcccaagctccacacttgtgagaagtgcagtaccagcatcgcgaaccaggctgtgcgcatccaggagggccggtaccgccaccccggctgctacacctgtgccgactgtgggctgaacctgaagatgcgcgggcacttctgggaggacgcttgtgctatggagggaatgagattgtcactggaagctttggaggggatggtggagggcgccaagcggagggacaggaggaagaccaggagacccatccagccaagctggtgagacaacctctgatcctgaggaccggccgcccaccaagggttgggcccccggggccaggttgatctaccgacaccttccacttctttcctgggagagactgctggcttcattggtgattgatttggaggggggaaaaagggcagggtggctcaggctttaggcccaggtactggggaggcctgaggagccctcctggagctcaggaggccgaggctgccttaagctgtgatcatgccactgcattccagcctgggagagagagaggacctgtctgttgaaaaaaacacaaaaacaaatgaatgcatgtggccagtgccaggtgagctgccctgggggttcactggagttgaggcaggggacagtagtctcccctgccagcctaggattttgggcgtcattcacccactacccctagtgctagtcccagaggatgctgcggagggggcagcctcagctctcttttcagagaagatcaaagctgggcttcccagggtgcctggctggtccctgccggcagctttgtgctctccggctctttgtgaaaggaatcttggcgcagatgtttgtgttgcctcctcaggcacctgtagatataatttacaccatgatatcattgtctcaccttttgcctgggtggctgcctgagaaaggtctttctttttatagaaaagatcaaggctgtctggcgcgggactccatgagccccaggcgctggtcagaaacggggtagtctctttggcgccacctagtgtccagtttggcccatggcggggcccattcacggggcaacactgggcttctgggcacagcgggaatacagaaagatacagcactcctcatgccttcctggaggtagaaggccagtggcagcgactgagctggcatgaatgaataagaggatgtggcactgagcgccaagggctaccttggaacgcaccgaggagcgtcccgtgagttcaaagcagtggccgtgatgcaaaaggagggctgggtcttggagacgtggagaagaggaatgctgagtgatggggtggctgctggggggatgcttagctcagagcagtggctgatggggacactgagataagatcggaggggagctgtcaatgccagaagtggtttgaacttccccttgaggctctagggacattttgttttgagacatggtcttgctctattgcccaggctggagtgcagtggtacaatcttagctcactgcagcctccacctcccaggctcaagagatcctcccacagcctcccaggtagctgggactacaggcgtgcaccaccacacccagctaatttttaagtttttttttttttttaagagatggggtctcactatgttgcccaggctggtctcgaacttcgggccccaagccatcctcccaccttggctttccaaagtgttgggattacaagcgtgagctaaccttgcccagcctctgggaacacttggaaggttttaagcagagaagtgacaggttggaaaagatggtttggattattgatatggacagattcccacctgtatgtagcacgccatgctgggccagcagtgtcataggagtggagggggataagtggggactggggacatgtgaaatgatgggcattccagtgaggcatcgaatgccttctgagggctttgtaggttccagctcaaatccccctctggctcttgttctttggtgtggcagccatctctcctcccaggggtcctgagggtttcagcaccagggttctctgcagccacacaatcagcccggctcgggagcaaactcccctggaagaacggagttatgagttggtcagcagaggaggctggggacaggcagtttttggtcttttacctctgatcttgtccccaacctaagccagctagctgcgtgctcccactccctctgccgcacgccgcccgtctatgttcccggactttgtccagtgcagtgccctcttcccttcctgcactgaggagattaactgaagtgacagattagagttagaagtggcccaaaggagcatctggtacaaccccctttggttagagaagggaaagtgacttttccaaagctgcacagctagacagtcataatggctaagctctgggggtgcttttgatgtgctagggatacttccaatgctttaactcacttaatcctcacaacccgagataggtactgttaccatcctctctgcagacgaggaaaccgaggaccaggaggttcagtaaatggtccaagtactcctagctagtaaggaatggatctacagcctgcctcccaggtttctggcttgtggggggcagagtttgtccctctgtcatcagaggcagccttccaggcacagctctggtcacctctggtcacaactggaggtcaccacagccctccccagcgctctgtaggctctcagctttgtgcttcctcccacgggtactagctccagctgagcttgcaggaaacccacttcctgaagccaggacttccccatgggaagtgcaggggccactgggcagcctgagggctgaccctgctcaggacactgtctgtctcaggaactcatggcagtggtttaccttgtcaggagtgcatggacgggctgcccctcccattccttcaagcatcactcagagagccctggcctggctctaggcttgggactgcggctgccacaggaagggggcatccccctactttgggtgttgggtcagatcctgcccccgtgcccgccagggctcaggttcctctgagctggtcctgggccaggacgcatctgcatggcggtggtggggaggaggggtgcgccatggcctggaggggagtgtgtgttggggtgtgtgtgtggaggttcttttgagtcacacacaaagcattgtgctgagacactgcattcctgctggctgggcttcctgtttccagatgcattcctgtcccagagtcaccacagagactgtttggaatcccgccccacattctccaaattcagggcgcgatctggcaaaggctccctcccccaccctcttactttggagggagtctgggctccctcctacccagggagggctggcagggctctggcacggccggggtgtgattccacacatcttcttggtcttgcataaggcagttcctggagacccagcactctggttctctctctgcctgtgagaagcggaatgggtactgtctaggaggactgggcagggtgggggcaacccagaggacccatggctagcagggaagggcctgggcttgaatgtgactctgttgagacatggccagcaattctggcacttggctgtcattcggctggcctgcgcagagattggctgtgggcctcagtttccccattttataaagttttaaaatctg

SEQ ID NO: 7215 - protein, 366 aa, Homo sapiens; identical to SEQ ID NO: 1000

SEQ ID NO: 7216 - DNA, 2208 bp, Homo sapiens
atttcgagaggtgttggctacagacaagctcatgatgggcaggtgaagggggagcagctttcctggatttggagataaaaggtctcttctgtgaaggcaagggtcgctaacccctaaccgcctgggaggaaaggaaggagagaaagacattgtctctcccagtcggggagctggtctccttttctgggctgggcagtctggtgggagtgtgtgagaggaatgctgtgggctgcagaggcaggggtgctgtgtccttgtggcctcctgacatggccaaggctgcagagagctggaggctcaggatgcccttatagtgcctctggaaattacaggttccccctgctggtaggcacatgccttggtgagcagaggccaagtgaaaaaagcccctctccctctggttgggaatgaggacttgcctcatgaagggatcccgggccggtgccctaggcagggcccatggtggtctgtctggagatgtgatgtggctcgtgaattcctgcggaaactatctctaggtccttcaggtgaccgcacagccccgggcagttgccctggagcccaggtgtggagtcccagccctgcctctgatgctgcaggtggcttggaccagctactttgcccttctgacctgcagtctccttacctatagaacgttttactggagaaccctgagagcagagggatgcgaggccaactgctggtagcagcctggtggggtgagggtctagggttgttttcttaagatccagaagtttttgctttagcttaaggatgtgtgcaattttccatgtggcttcataattcatccatgactttgaattttaaaatggagagaagttggcttcccaggaaatggtgcccctggccctgggcatcggcccacctggctgtctccaaggctctccttcccagtggctggtgcgggctccgggagctcagctgagtcccattggggtggcaacggaaagggagcaggggagtggggagtacggagatgcaggctggaaactggcctccaggaacaactgtgaggttgaaggcgagatttccatgttgggagcaaatttaagagccccagatggacacggcacacctggagacaggcactgctgcctgagtgtggcccagggagggctcggctccccaaagctccacggggcaggcccagacctcccagcagagtagggacaggctggttagcccagactcccgcctctgaggagaggaaccagctctccttgggaagagggcctctgccctggccggccctgactcccaggggacttcgaccccttgcttcatccctttatgtttctatctcctcagtgcaaaagggcagcgtgcttcctctctgctggttccgtgggatcggagccaggccccagtgtgcaatgtctttgcacacagataatagcgtgcgtgacagaggactctgtgcttagctgtcacctgctgccttcctgctgcccggtccccggcagaacccgcatgcctccctccctctctggaccctggcagtctctgcgccctggctccgagggaaggggcagggggcccgctggtcggcgagggctgggagcccccgacaccttggctccaagggaaggggcaggggtccgctggtcggcgagggccgggggccccctggtgtcgggcctgggaacagccggtaccgccaccccggctgctacacctgtgccgactgtgggctgaacctgaagatgcgcgggcacttctgggtgggtgacgagctgtactgtgagaagcatgcccgccagcgctactccgcacctgccaccctcagctctcgggcctgagcccgccatgccctcagcctgcctcactgctgggccagggtcatgcctatataagttggcatggcagggacaatggtgggcagttgctcttacatgagctaagtttggagacctgaggcccctttgtcctcgctgggtgggccaaggtctgggacctgtcttggactgtgggagactcaccctcaccttgccaggcctctcccctgcaggactggcattgcactagtctgaggtggccactgcctttgatcaacctttgtgtgcgagggtctaagtagggtcgaacacagaagtgggaaggagaggggtgggccaggggctaatggtgtcactgtgtaaagtttttgacatactagctctataaatatatgaatatggacaaaataaa

SEQ ID NO: 7217 - protein, 134 aa, Homo sapiens
MFLSPQCKRAACFLSAGSVGSEPGPSVQCLCTQIIACVTEDSVLSCHLLPSCCPVPGRTRMPPSLSGPWQSLRPGSEGRGRGPAGRRGLGAPDTLAPREGAGVRWSARAGGPLVSGLGTAGTATPAATPVPTVG

SEQ ID NO: 7218 - DNA, 2003 bp, Homo sapiens
atagaacgttttactggagaaccctgagagcagagggatgcgaggccaactgctggtagcagcctggtggggtgagggtctagggttgttttcttaagatccagaagtttttgctttagcttaaggatgtgtgcaattttccatgtggcttcataattcatccatgactttgaattttaaaatggagagaagttggcttcccaggaaatggtgcccctggccctgggcatcggcccacctggctgtctccaaggctctccttcccagtggctggtgcgggctccgggagctcagctgagtcccattggggtggcaacggaaagggagcaggggagtggggagtacggagatgcaggctggaaactggcctccaggaacaactgtgaggttgaaggcgagatttccatgttgggagcaaatttaagagccccagatggacacggcacacctggagacaggcactgctgcctgagtgtggcccagggagggctcggctccccaaagctccacggggcaggcccagacctcccagcagagtagggacaggctggttagcccagactcccgcctctgaggagaggaaccagctctccttgggaagagggcctctgccctggccggccctgactcccaggggacttcgaccccttgcttcatccctttatgtttctatctcctcagtgcaaaagggcagcgtgcttcctctctgctggttccgtgggatcggagccaggccccagtgtgcaatgtctttgcacacagataatagcgtgcgtgacagaggactctgtgcttagctgtcacctgctgccttcctgctgcccggtccccggcagaacccgcatgcctccctccctctctggaccctggcagtctctgcgccctggctccgagggaaggggcagggggcccgctggtcggcgagggctgggagcccccgacaccttggctccaagggaaggggcaggggtccgctggtcggcgagggccgggggccccctggtgtcgggcctgggaacagccgggctaggccctcctgggtgtgttggcccaaggctctggccctgactcctccccggctgcctcctcccaacaggccggcctcggccgcgctggcgactcggcggtgctggtgctgccgccttccccgggccctcgttcctccaggcccagcatggactcggaagggggaagcctcctcctggacgaggactcggaagtcttcaagatgctgcaggaaaatcgcgagggacgggcggccccccgacagtccagctcctttcggctcttgcaggaagccctggaggctgaggagagaggtggcacgccagccttcttgcccagctcactgagcccccagtcctccctgcccgcctccagggccctggccacccctcccaagctccacacttgtgagaagtgcagtaccagcatcgcgaaccaggctgtgcgcatccaggagggccggtaccgccaccccggctgctacacctgtgccgactgtgggctgaacctgaagatgcgcgggcacttctgggtgggtgacgagctgtactgtgagaagcatgcccgccagcgctactccgcacctgccaccctcagctctcgggcctgagcccgccatgccctcagcctgcctcactgctgggccagggtcatgcctatataagttggcatggcagggacaatggtgggcagttgctcttacatgagctaagtttggagacctgaggcccctttgtcctcgctgggtgggccaaggtctgggacctgtcttggactgtgggagactcaccctcaccttgccaggcctctcccctgcaggactggcattgcactagtctgaggtggccactgcctttgatcaacctttgtgtgcgagggtctaagtagggtcgaacacagaagtgggaaggagaggggtgggccaggggctaatggtgtcactgtgtaaagtttttgacatactagctctataaatatatgaatatggacaaaataaa

SEQ ID NO: 7219 - protein, 146 aa, Homo sapiens
MDSEGGSLLLDEDSEVFKMLQENREGRAAPRQSSSFRLLQEALEAEERGGTPAFLPSSLSPQSSLPASRALATPPKLHTCEKCSTSIANQAVRIQEGRYRHPGCYTCADCGLNLKMRGHFWVGDELYCEKHARQRYSAPATLSSRA

SEQ ID NO: 7220 - DNA, 3716 bp, Homo sapiens
agcggcagcttccgaccagtggtcgcgcttccggagaggcgcttccggtggcggcggcagcagcggctgtggtggttccgggtgtctttgtccccccggtgtcgctgccctggcccgcagccttttccccacgactctgaaagaggacagcgttcccaatgtcccagtttaagcgccagcggatcaacccgcttccagggggacgcaacttctcaggcacagcttcaacatctcttctgggccctcctcctggtttgctcactcctcctgtggccacagaactgtcccagaatgccaggcaccttcagggtggggagaaacagcgggtcttcactggtattgttaccagcttgcatgactactttggggttgtggatgaagaggtcttttttcagctaagtgtggtgaagggccgtctgccccagctgggtgagaaggtgctggtgaaggctgcatacaacccaggccaggcagtgccctggaatgctgtcaaggtgcaaacgctctccaaccagcccctactgaagtccccagcacctcctcttctgcatgtagcagccctgggccagaagcaagggatcctgggagctcagcctcagttgatcttccagcctcaccggattcccccactctttcctcagaagcctctgagtctcttccaaacatcccacacacttcacctgagccacctgaacagatttcctgcccggggccctcatggacggttggatcagggccgaagtgatgactatgactccaagaaacgcaaacagcgggctggtggagagccctggggtgctaagaagccaaggcatgacctgcctccttaccgggtccacctcactccttacactgtggacagccccatctgtgacttcctagaactccagcgccgttaccgcagcctcctggtcccctcagattttctgtccgtgcatctgagttggctatcagccttccccctgagccagcccttttccctccatcatccaagccggatccaggtctcttctgaaaaggaggcagctccagacgctggtgctgagcccatcactgcagacagtgaccccgcttatagttcgaaggtactgctgctctcttccccggggttggaggaattgtatcgttgttgcatgctctttgtggatgacatggctgagccaagggagacgccagagcatcctctgaagcagattaagtttttgctgggcaggaaagaagaggaggcagtgctggttgggggtgaatggtctccttccctggatggcctcgacccccaggctgacccgcaggtgctggtgcgtaccgccatccgctgtgcgcaggcccagactggcattgatttgagcggctgtaccaagtggtggcgctttgccgagtttcagtacctgcagccgggacccccccggcggcttcagacagtggtggtgtacctgccggatgtctggaccatcatgcctactttggaggagtgggaggccctgtgccagcagaaagctgcagaggcagctcccccaacccaggaggcacaaggggaaacggagcctactgaacaggcacctgatgccttggagcaagcagcagacacttctagacggaacgcagaaactccagaggccaccacacagcaggaaacggacactgatctcccagaggcccctccaccccccctagaacctgctgtcatcgcacgccctggctgtgtaaacctgtccctccatgggattgtggaggatcggaggccaaaggaaaggatctcttttgaggtgatggtgctggccgagctgtttctggagatgctccagagggattttggctatagagtttataagatgctactgagccttcctgaaaaggtcgtgtccccacctgaacctgagaaggaggaggcggccaaggaagaagccaccaaggaggaagaagccatcaaagaggaggtggtcaaggagcccaaggatgaggcacagaatgagggcccggctacagagtcagaggccccgctgaaggaggatgggcttttgcccaaaccactctcttctgggggagaggaagaagaaaaaccccggggcgaggcttctgaggacctgtgtgagatggccctggacccagaactgttgcttctgagggatgatggagaggaggagtttgcaggagcaaagctggaggattcggaggtccggtccgttgcctcaaaccagtcagagatggagttctcttcacttcaggacatgcccaaggagctggatccctctgctgtgctccccttagactgtctgcttgcttttgtgttctttgatgccaactggtgtggctacttgcaccggcgagacttagagaggatcctccttacccttgggatccggctcagtgcagagcaggccaagcagctggtcagcagggtggtgacccagaacatctgccagtaccggagccttcagtacagccgccaggagggcctggatggtggccttcccgaggaggtgctcttcggaaacctggacctgctgccccctcctgggaaaagcacgaagccaggtgctgcccccacagaacacaaagccttggtgtcccacaatggcagcctgattaacgtggggagcctgctgcagcgcgcggagcagcaggacagcggccggctctacctagagaacaagatccacacactggagctgaagctggaggagagccataaccgtttctcagccactgaagtaaccaataagacgctggcggcagagatgcaggagctgcgagtccggctggcggaggccgaggagaccgcccggacggcggagcgacagaagagccagctccagcggctgctgcaggagctccgcaggcgtctgacccccctgcagctggagatccagcgggtggtggaaaaggctgacagctgggtggagaaggaggagccggcacctagcaactgacggcctcgcacggaactgccatcctgtgagggcagcggtggcgcccggcaaagttggagcccttgcggtaccagaaagcagcgagagcgagacctgggagccagggcaggggtggctgaccccatgctcagcctctaggggacggcaggccatcaggctgggggctgtgctatgtgggatggatgtgtgaggaaccccggttccacttaacaactaaatacaacatcttttgcacccctagaatgtcattttgccctcaaccttggtatttctcctggggcccttttagtcttgtgctgactttctcctgtcctcttccagtttagaataagacaggggagaaaaaggcttttcgagtgtgggacaaggtctgatgtcagtgaacggaactgaagagcaagacatggagcctggctggggctaagcagccccctcctccggatggcacaggctctgctaggttccggacacaggcttctgggggaagggtctcccttggccatcacgggaatggagtccatgctagaaagagctcagtgttgggctgggtttgccagtagaacactgcgttccagtcaccccggtcttgccagaagaaaccagcacctctttcccgtggctcctgtgttcagaatgtggtattggctctggcccagccttctcccctgttacccataattcttgcctctttccataatccgtggtttcagtttgactttgtatataaagttggggttttttttttttttttttggcttgttttttaaataaaccaaagtcaaaaac

SEQ ID NO: 7221 - protein, 923 aa, Homo sapiens; identical to SEQ ID NO: 1006

SEQ ID NO: 7222 - DNA, 4667 bp, Homo sapiens
agcggcagcttccgaccagtggtcgcgcttccggagaggcgcttccggtggcggcggcagcagcggctgtggtggttccgggtgtctttgtccccccggtgtcgctgccctggcccgcagccttttccccacgactctgaaagaggacagcgttcccaatgtcccagtttaagcgccagcggatcaacccgcttccagggggacgcaacttctcaggcacagcttcaacatctcttctgggccctcctcctggtttgctcactcctcctgtggccacagaactgtcccagaatgccaggcaccttcagggtggggagaaacagcgggtcttcactggtattgttaccagcttgcatgactactttggggttgtggatgaagaggtcttttttcagctaagtgtggtgaagggccgtctgccccagctgggtgagaaggtgctggtgaaggctgcatacaacccaggccaggcagtgccctggaatgctgtcaaggtgcaaacgctctccaaccagcccctactgaagtccccagcacctcctcttctgcatgtagcagccctgggccagaagcaagggatcctgggagctcagcctcagttgatcttccagcctcaccggattcccccactctttcctcagaagcctctgagtctcttccaaacatcccacacacttcacctgagccacctgaacagatttcctgcccggggccctcatggacggttggatcagggccgaagtgatgactatgactccaagaaacgcaaacagcgggctggtggagagccctggggtgctaagaagccaaggcatgacctgcctccttaccgggtccacctcactccttacactgtggacagccccatctgtgacttcctagaactccagcgccgttaccgcagcctcctggtcccctcagattttctgtccgtgcatctgagttggctatcagccttccccctgagccagcccttttccctccatcatccaagccggatccaggtctcttctgaaaaggaggcagctccagacgctggtgctgagcccatcactgcagacagtgaccccgcttatagttcgaaggtactgctgctctcttccccggggttggaggaattgtatcgttgttgcatgctctttgtggatgacatggctgagccaagggagacgccagagcatcctctgaagcagattaagtttttgctgggcaggaaagaagaggaggcagtgctggttgggggtgaatggtctccttccctggatggcctcgacccccaggctgacccgcaggtgctggtgcgtaccgccatccgctgtgcgcaggcccagactggcattgatttgagcggctgtaccaagtggtggcgctttgccgagtttcagtacctgcagccgggacccccccggcggcttcagacagtggtggtgtacctgccggatgtctggaccatcatgcctactttggaggagtgggaggccctgtgccagcagaaagctgcagaggcagctcccccaacccaggaggcacaaggggaaacggagcctactgaacaggcacctgatgccttggagcaagcagcagacacttctagacggaacgcagaaactccagaggccaccacacagcaggaaacggacactgatctcccagaggcccctccaccccccctagaacctgctgtcatcgcacgccctggctgtgtaaacctgtccctccatgggattgtggaggatcggaggccaaaggaaaggatctcttttgaggtgatggtgctggccgagctgtttctggagatgctccagagggattttggctatagagtttataagatgctactgagccttcctgaaaaggtcgtgtccccacctgaacctgagaaggaggaggcggccaaggaagaagccaccaaggaggaagaagccatcaaagaggaggtggtcaaggagcccaaggatgaggcacagaatgagggcccggctacagagtcagaggccccgctgaaggaggatgggcttttgcccaaaccactctcttctgggggagaggaagaagaaaaaccccggggcgaggcttctgaggacctgtgtgagatggccctggacccagaactgttgcttctgagggatgatggagaggaggagtttgcaggagcaaagctggaggattcggaggtccggtccgttgcctcaaaccagtcagagatggagttctcttcacttcaggacatgcccaaggagctggatccctctgctgtgctccccttagactgtctgcttgcttttgtgttctttgatgccaactggtgtggctacttgcaccggcgagacttagagaggatcctccttacccttgggatccggctcagtgcagagcaggccaagcagctggtcagcagggtggtgacccagaacatctgccagtaccggagccttcagtacagccgccaggagggcctggatggtggccttcccgaggaggtgctcttcggaaacctggacctgctgccccctcctgggaaaagcacgaagccaggtgctgcccccacagaacacaaagccttggtgtcccacaatggcagcctgattaacgtggggagcctgctgcagcgcgcggagcagcaggacagcggccggctctacctagagaacaagatccacacactggagctgaagctggaggagagccataaccgtttctcagccactgaagtaaccaataagacgctggcggcagagatgcaggagctgcgagtccggctggcggaggccgaggagaccgcccggacggcggagcgacagaagagccagctccagcggctgctgcaggagctccgcaggcgtctgacccccctgcagctggagatccagcgggtggtggaaaaggctgacagctgggtggagaaggaggagccggcacctagcaactgacggcctcgcacggaactgccatcctgtgagggcagcggtggcgcccggcaaagttggagcccttgcggtaccagaaagcagcgagagcgagacctgggagccagggcaggggtggctgaccccatgctcagcctctaggggacggcaggccatcaggctgggggctgtgctatgtgggatggatgtgtgaggaaccccggttccacttaacaactaaatacaacatcttttgcacccctagaatgtcattttgccctcaaccttggtatttctcctggggcccttttagtcttgtgctgactttctcctgtcctcttccagtttagaataagacaggggagaaaaaggcttttcgagtgtgggacaaggtctgatgtcagtgaacggaactgaagagcaagacatggagcctggctggggctaagcagccccctcctccggatggcacaggctctgctaggttccggacacaggcttctgggggaagggtctcccttggccatcacgggaatggagtccatgctagaaagagctcagtgttgggctgggtttgccagtagaacactgcgttccagtcaccccggtcttgccagaagaaaccagcacctctttcccgtggctcctgtgttcagaatgtggtattggctctggcccagccttctcccctgttacccataattcttgcctctttccataatccgtggtttcagtttgactttgtatataaagttggggttttttttttttttttttggcttgttttttaaataaaccaaagtcaaaaacaaactgagagtgtgtcctccacagctcttcctactctcctaggcttgcccgcgtgccctcccacccagcgcctctgctggaccacggtgcagttcgctccagaaggtgggccagggccggggaggtgcgcacacacccctggcatgctgggctgcctgctggagggtgctgctgctccgtggagggcagcaggcccaggaaggggtttcctctgctcgcctaagttacagcacaatactatgtggacgtttcattgaaaattttacttgaaaaaataaaattccagatactcaggtgagacacaaacccactgttcctgctttgagacctgtgaattcttgtgggacagttccactgacagcttgcgttcccgaggtaccagtcctcagtgacctcgggaaccccaaccacttaggtcccaaagccacaagggtgccctttgtcttgctgggaagctggctgagggcctgccagggctggaggaccagctctcccgcacagggttcagggcctctcccagaaaaaagaggttttgaagtgaaaaggcaacgaggggccagagggctccccaggatgggtcttttggaggtagatttgatgcccacaacgcatgcaaggctaagacccccaacttagccaacgaagcccatggcctcagaagggctgcagcttgctcaggccgtgggccaggatgcatgctggacggttctccaaataaaaaagccccaagggtttgtctacactgcttacctgctggggctgtgagtggggagacggcggcctgcctagggctcctggtgccaggctcaggaagagtcattcattgcaaagggccggcaagtgaaccagggccacctctgtccccagcctgtgagaggagcagctagccctgagaagggcaaggatgaatgaggctgaccacgtcacaggagtcctccaagagtgacgggg

SEQ ID NO: 7223 - protein, 923 aa, Homo sapiens; identical to SEQ ID NO: 1006

SEQ ID NO: 7224 - DNA, 603 bp, Homo sapiens
gcgcttccggagaggcgcttccggtggcggcggcagcagcggctgtggtggttccgggtgtctttgtccccccggtgtcgctgccctggcccgcagccttttccccacgactctgaaagaggacagcgttcccaatgtcccagtttaagcgccagcggatcaacccgcttccagggggacgcaacttctcaggcacagcttcaacatctcttctgggccctcctcctggtttgctcactcctcctgtggccacagaactgtcccagaatgccaggcaccttcagggtggggagaaacagcgggtcttcactggtattgttaccagcttgcatgactactttggggttgtggatgaagaggtcttttttcagctaagtgtggtgaagggccgtctgccccagctgggtgagaagaaaccagcacctctttcccgtggctcctgtgttcagaatgtggtattggctctggcccagccttctcccctgttacccataattcttgcctctttccataatccgtggtttcagtttgactttgtatataaagttggggttttttttttttttttttggcttgttttttaaataaaccaaagtcaaaaac

SEQ ID NO: 7225 - protein, 149 aa, Homo sapiens
MSQFKRQRINPLPGGRNFSGTASTSLLGPPPGLLTPPVATELSQNARHLQGGEKQRVFTGIVTSLHDYFGVVDEEVFFQLSVVKGRLPQLGEKKPAPLSRGSCVQNVVLALAQPSPLLPIILASFHNPWFQFDFVYKVGVFFFFFWLVF

SEQ ID NO: 7226 - DNA, 3977 bp, Homo sapiens
cctcagtcctcccttggtggcctcgccgcggctctgctgggagacccggcgctggcggctgctgaggccggagcggagggcccgggagcgtgggagcaggagggtggcgcgcagccggtttcgcgtttggtcggccagggagctgccttcccaccagccggtcgaggaaacaacgggtcgggcttccggggagagggcccacacagtctcctcgccggcaccggcctcctccatttttccgggccttgcgtggagggttttggcggatgtttttgaacgaaggaatgtcatcggggctctctcgagcccctcaccccgccagctactctgggggtggcgtggcatagtgagaggagcgctaagttgttgggaggcctgggtccttttccccacgactctgaaagaggacagcgttcccaatgtcccagtttaagcgccagcggatcaacccgcttccagggggacgcaacttctcaggcacagcttcaacatctcttctgggccctcctcctggtttgctcactcctcctgtggccacagaactgtcccagaatgccaggcaccttcagggtggggagaaacagcgggtcttcactggtattgttaccagcttgcatgactactttggggttgtggatgaagaggtcttttttcagctaagtgtggtgaagggccgtctgccccagctgggtgagaaggtgctggtgaaggctgcatacaacccaggccaggcagtgccctggaatgctgtcaaggtgcaaacgctctccaaccagcccctactgaagtccccagcacctcctcttctgcatgtagcagccctgggccagaagcaagggatcctgggagctcagcctcagttgatcttccagcctcaccggattcccccactctttcctcagaagcctctgagtctcttccaaacatcccacacacttcacctgagccacctgaacagatttcctgcccggggccctcatggacggttggatcagggccgaagtgatgactatgactccaagaaacgcaaacagcgggctggtggagagccctggggtgctaagaagccaaggcatgacctgcctccttaccgggtccacctcactccttacactgtggacagccccatctgtgacttcctagaactccagcgccgttaccgcagcctcctggtcccctcagattttctgtccgtgcatctgagttggctatcagccttccccctgagccagcccttttccctccatcatccaagccggatccaggtctcttctgaaaaggaggcagctccagacgctggtgctgagcccatcactgcagacagtgaccccgcttatagttcgaaggtactgctgctctcttccccggggttggaggaattgtatcgttgttgcatgctctttgtggatgacatggctgagccaagggagacgccagagcatcctctgaagcagattaagtttttgctgggcaggaaagaagaggaggcagtgctggttgggggtgaatggtctccttccctggatggcctcgacccccaggctgacccgcaggtgctggtgcgtaccgccatccgctgtgcgcaggcccagactggcattgatttgagcggctgtaccaagtggtggcgctttgccgagtttcagtacctgcagccgggacccccccggcggcttcagacagtggtggtgtacctgccggatgtctggaccatcatgcctactttggaggagtgggaggccctgtgccagcagaaagctgcagaggcagctcccccaacccaggaggcacaaggggaaacggagcctactgaacaggcacctgatgccttggagcaagcagcagacacttctagacggaacgcagaaactccagaggccaccacacagcaggaaacggacactgatctcccagaggcccctccaccccccctagaacctgctgtcatcgcacgccctggctgtgtaaacctgtccctccatgggattgtggaggatcggaggccaaaggaaaggatctcttttgaggtgatggtgctggccgagctgtttctggagatgctccagagggattttggctatagagtttataagatgctactgagccttcctgaaaaggtcgtgtccccacctgaacctgagaaggaggaggcggccaaggaagaagccaccaaggaggaagaagccatcaaagaggaggtggtcaaggagcccaaggatgaggcacagaatgagggcccggctacagagtcagaggccccgctgaaggaggatgggcttttgcccaaaccactctcttctgggggagaggaagaagaaaaaccccggggcgaggcttctgaggacctgtgtgagatggccctggacccagaactgttgcttctgagggatgatggagaggaggagtttgcaggagcaaagctggaggattcggaggtccggtccgttgcctcaaaccagtcagagatggagttctcttcacttcaggacatgcccaaggagctggatccctctgctgtgctccccttagactgtctgcttgcttttgtgttctttgatgccaactggtgtggctacttgcaccggcgagacttagagaggatcctccttacccttgggatccggctcagtgcagagcaggccaagcagctggtcagcagggtggtgacccagaacatctgccagtaccggagccttcagtacagccgccaggagggcctggatggtggccttcccgaggaggtgctcttcggaaacctggacctgctgccccctcctgggaaaagcacgaagccaggtgctgcccccacagaacacaaagccttggtgtcccacaatggcagcctgattaacgtggggagcctgctgcagcgcgcggagcagcaggacagcggccggctctacctagagaacaagatccacacactggagctgaagctggaggagagccataaccgtttctcagccactgaagtaaccaataagacgctggcggcagagatgcaggagctgcgagtccggctggcggaggccgaggagaccgcccggacggcggagcgacagaagagccagctccagcggctgctgcaggagctccgcaggcgtctgacccccctgcagctggagatccagcgggtggtggaaaaggctgacagctgggtggagaaggaggagccggcacctagcaactgacggcctcgcacggaactgccatcctgtgagggcagcggtggcgcccggcaaagttggagcccttgcggtaccagaaagcagcgagagcgagacctgggagccagggcaggggtggctgaccccatgctcagcctctaggggacggcaggccatcaggctgggggctgtgctatgtgggatggatgtgtgaggaaccccggttccacttaacaactaaatacaacatcttttgcacccctagaatgtcattttgccctcaaccttggtatttctcctggggcccttttagtcttgtgctgactttctcctgtcctcttccagtttagaataagacaggggagaaaaaggcttttcgagtgtgggacaaggtctgatgtcagtgaacggaactgaagagcaagacatggagcctggctggggctaagcagccccctcctccggatggcacaggctctgctaggttccggacacaggcttctgggggaagggtctcccttggccatcacgggaatggagtccatgctagaaagagctcagtgttgggctgggtttgccagtagaacactgcgttccagtcaccccggtcttgccagaagaaaccagcacctctttcccgtggctcctgtgttcagaatgtggtattggctctggcccagccttctcccctgttacccataattcttgcctctttccataatccgtggtttcagtttgactttgtatataaagttggggttttttttttttttttttggcttgttttttaaataaaccaaagtcaaaaac

SEQ ID NO: 7227 - protein, 923 aa, Homo sapiens; identical to SEQ ID NO: 1006

SEQ ID NO: 7228 - DNA, 2304 bp, Homo sapiens; identical to SEQ ID NO: 1013

SEQ ID NO: 7229 - protein, 475 aa, Homo sapiens; identical to SEQ ID NO: 1014

SEQ ID NO: 7230 - DNA, 1918 bp, Homo sapiens
gaattccgaatcatgtgcagaatgctgaatcttcccccagccaggacgaataagacagcgcggaaaagcagattctcgtaattctggaattgcatgttgcaaggagtctcctggatcttcgcacccagcttcgggtagggagggagtccgggtcccgggctaggccagcccggcaggtggagagggtccccggcagccccgcgcgcccctggccatgtctttaatgccctgccccttcatgtggccttctgagggttcccagggctggccagggttgtttcccacccgcgcgcgcgctctcacccccagccaaacccacctggcagggctccctccagccgagaccttttgattcccggctcccgcgctcccgcctccgcgccagcccgggaggtggccctggacagccggacctcgcccggccccggctgggaccatggtgtttctctcgggaaatgcttccgacagctccaactgcacccaaccgccggcaccggtgaacatttccaaggccattctgctcggggtgatcttggggggcctcattcttttcggggtgctgggtaacatcctagtgatcctctccgtagcctgtcaccgacacctgcactcagtcacgcactactacatcgtcaacctggcggtggccgacctcctgctcacctccacggtgctgcccttctccgccatcttcgaggtcctaggctactgggccttcggcagggtcttctgcaacatctgggcggcagtggatgtgctgtgctgcaccgcgtccatcatgggcctctgcatcatctccatcgaccgctacatcggcgtgagctacccgctgcgctacccaaccatcgtcacccagaggaggggtctcatggctctgctctgcgtctgggcactctccctggtcatatccattggacccctgttcggctggaggcagccggcccccgaggacgagaccatctgccagatcaacgaggagccgggctacgtgctcttctcagcgctgggctccttctacctgcctctggccatcatcctggtcatgtactgccgcgtctacgtggtggccaagagggagagccggggcctcaagtctggcctcaagaccgacaagtcggactcggagcaagtgacgctccgcatccatcggaaaaacgccccggcaggaggcagcgggatggccagcgccaagaccaagacgcacttctcagtgaggctcctcaagttctcccgggagaagaaagcggccaaaacgctgggcatcgtggtcggctgcttcgtcctctgctggctgccttttttcttagtcatgcccattgacgaagtctcgctctgtcaccaggctggagtgcagtggcatgatcttggctcactgcaacctccgcctcccgggttcaagagattctcctgcctcagcctcccaagcagctgggactacagggatgtgccaccaggccgacgccaccaggcccagctaatttttgtatttttagtagagacggggtttcaccatgttggccaggatgatctcgatctcttgacctcatgatctgcctgcctcagcctcccaaagtgctgggattacaggcgtgagccaccgtgcccggcccaactattttttttttttatcttttttaacagtgcaatcctttctgtggatgaaatcttgctcagaagctcaatatgcaaaagaaagaaaaacagcagggctggacggatgttgggagtggggtaagaccccaaccactcagaaccacccccccaacacacacacacattctctccatggtgactggtgaggggcctctagagggtacatagtacaccatggagcacggtttaagcaccactggactacacattcttctgtggcagttatcttaccttcccatagacacccagcccatagccattggtt

SEQ ID NO: 7231 - protein, 370 aa, Homo sapiens
MVFLSGNASDSSNCTQPPAPVNISKAILLGVILGGLILFGVLGNILVILSVACHRHLHSVTHYYIVNLAVADLLLTSTVLPFSAIFEVLGYWAFGRVFCNIWAAVDVLCCTASIMGLCIISIDRYIGVSYPLRYPTIVTQRRGLMALLCVWALSLVISIGPLFGWRQPAPEDETICQINEEPGYVLFSALGSFYLPLAIILVMYCRVYVVAKRESRGLKSGLKTDKSDSEQVTLRIHRKNAPAGGSGMASAKTKTHFSVRLLKFSREKKAAKTLGIVVGCFVLCWLPFFLVMPIDEVSLCHQAGVQWHDLGSLQPPPPGFKRFSCLSLPSSWDYRDVPPGRRHQAQLIFVFLVETGFHHVGQDDLDLLTS

SEQ ID NO: 7232 - DNA, 2092 bp, Homo sapiens
gaattccgaatcatgtgcagaatgctgaatcttcccccagccaggacgaataagacagcgcggaaaagcagattctcgtaattctggaattgcatgttgcaaggagtctcctggatcttcgcacccagcttcgggtagggagggagtccgggtcccgggctaggccagcccggcaggtggagagggtccccggcagccccgcgcgcccctggccatgtctttaatgccctgccccttcatgtggccttctgagggttcccagggctggccagggttgtttcccacccgcgcgcgcgctctcacccccagccaaacccacctggcagggctccctccagccgagaccttttgattcccggctcccgcgctcccgcctccgcgccagcccgggaggtggccctggacagccggacctcgcccggccccggctgggaccatggtgtttctctcgggaaatgcttccgacagctccaactgcacccaaccgccggcaccggtgaacatttccaaggccattctgctcggggtgatcttggggggcctcattcttttcggggtgctgggtaacatcctagtgatcctctccgtagcctgtcaccgacacctgcactcagtcacgcactactacatcgtcaacctggcggtggccgacctcctgctcacctccacggtgctgcccttctccgccatcttcgaggtcctaggctactgggccttcggcagggtcttctgcaacatctgggcggcagtggatgtgctgtgctgcaccgcgtccatcatgggcctctgcatcatctccatcgaccgctacatcggcgtgagctacccgctgcgctacccaaccatcgtcacccagaggaggggtctcatggctctgctctgcgtctgggcactctccctggtcatatccattggacccctgttcggctggaggcagccggcccccgaggacgagaccatctgccagatcaacgaggagccgggctacgtgctcttctcagcgctgggctccttctacctgcctctggccatcatcctggtcatgtactgccgcgtctacgtggtggccaagagggagagccggggcctcaagtctggcctcaagaccgacaagtcggactcggagcaagtgacgctccgcatccatcggaaaaacgccccggcaggaggcagcgggatggccagcgccaagaccaagacgcacttctcagtgaggctcctcaagttctcccgggagaagaaagcggccaaaacgctgggcatcgtggtcggctgcttcgtcctctgctggctgccttttttcttagtcatgcccattgggacatacattcttaaatatgacgtgctgttttggagaaaagggctgtcggtctgcactaggctgcgggagaggaaagagattaaaaactgaaaccagggcagggatgagtgtgctatccacagctgagaagtgaaacacccatgtttaatagggactgacccaggaaaatcagacgaagtctcgctctgtcaccaggctggagtgcagtggcatgatcttggctcactgcaacctccgcctcccgggttcaagagattctcctgcctcagcctcccaagcagctgggactacagggatgtgccaccaggccgacgccaccaggcccagctaatttttgtatttttagtagagacggggtttcaccatgttggccaggatgatctcgatctcttgacctcatgatctgcctgcctcagcctcccaaagtgctgggattacaggcgtgagccaccgtgcccggcccaactattttttttttttatcttttttaacagtgcaatcctttctgtggatgaaatcttgctcagaagctcaatatgcaaaagaaagaaaaacagcagggctggacggatgttgggagtggggtaagaccccaaccactcagaaccacccccccaacacacacacacattctctccatggtgactggtgaggggcctctagagggtacatagtacaccatggagcacggtttaagcaccactggactacacattcttctgtggcagttatcttaccttcccatagacacccagcccatagccattggtt

SEQ ID NO: 7233 - protein, 324 aa, Homo sapiens
MVFLSGNASDSSNCTQPPAPVNISKAILLGVILGGLILFGVLGNILVILSVACHRHLHSVTHYYIVNLAVADLLLTSTVLPFSAIFEVLGYWAFGRVFCNIWAAVDVLCCTASIMGLCIISIDRYIGVSYPLRYPTIVTQRRGLMALLCVWALSLVISIGPLFGWRQPAPEDETICQINEEPGYVLFSALGSFYLPLAIILVMYCRVYVVAKRESRGLKSGLKTDKSDSEQVTLRIHRKNAPAGGSGMASAKTKTHFSVRLLKFSREKKAAKTLGIVVGCFVLCWLPFFLVMPIGTYILKYDVLFWRKGLSVCTRLRERKEIKN

SEQ ID NO: 7234 - DNA, 1877 bp, Homo sapiens
gaattccgaatcatgtgcagaatgctgaatcttcccccagccaggacgaataagacagcgcggaaaagcagattctcgtaattctggaattgcatgttgcaaggagtctcctggatcttcgcacccagcttcgggtagggagggagtccgggtcccgggctaggccagcccggcaggtggagagggtccccggcagccccgcgcgcccctggccatgtctttaatgccctgccccttcatgtggccttctgagggttcccagggctggccagggttgtttcccacccgcgcgcgcgctctcacccccagccaaacccacctggcagggctccctccagccgagaccttttgattcccggctcccgcgctcccgcctccgcgccagcccgggaggtggccctggacagccggacctcgcccggccccggctgggaccatggtgtttctctcgggaaatgcttccgacagctccaactgcacccaaccgccggcaccggtgaacatttccaaggccattctgctcggggtgatcttggggggcctcattcttttcggggtgctgggtaacatcctagtgatcctctccgtagcctgtcaccgacacctgcactcagtcacgcactactacatcgtcaacctggcggtggccgacctcctgctcacctccacggtgctgcccttctccgccatcttcgaggtcctaggctactgggccttcggcagggtcttctgcaacatctgggcggcagtggatgtgctgtgctgcaccgcgtccatcatgggcctctgcatcatctccatcgaccgctacatcggcgtgagctacccgctgcgctacccaaccatcgtcacccagaggaggggtctcatggctctgctctgcgtctgggcactctccctggtcatatccattggacccctgttcggctggaggcagccggcccccgaggacgagaccatctgccagatcaacgaggagccgggctacgtgctcttctcagcgctgggctccttctacctgcctctggccatcatcctggtcatgtactgccgcgtctacgtggtggccaagagggagagccggggcctcaagtctggcctcaagaccgacaagtcggactcggagcaagtgacgctccgcatccatcggaaaaacgccccggcaggaggcagcgggatggccagcgccaagaccaagacgcacttctcagtgaggctcctcaagttctcccgggagaagaaagcggccaaaacgctgggcatcgtggtcggctgcttcgtcctctgctggctgccttttttcttagtcatgcccattgggacatacattcttaaatatgacgtgctgttttggagaaaagggctgtcggtctgcactaggctgcgggagaggaaagagattaaaaactgaaaccagggcagggatgagtgtgctatccacagctgagaagtgaaacacccatgtttaatagggactgacccaggaaaatcagggacacacacccatgacatgaagccagcttcccgtccacgactgttgtccttactgcccaaggaaggggagcatgaaacccaccactggtcctgcgacccactgtctttggaatccaccccaggagcccaggagccttgcctgacacttggatttacttctttatcaagcatccatctgactaaggcacaaatccaacatgttactgttactgatacaggaaaaacagtaacttaaggaatgatcatgaatgcaaagggaaagaggaaaagagccttcagggacaaatagctcgattttttgtaaatcagtttcatacaacctccctcccccatttcattcttaaaagttaattgagaatcatcagccacgtgtagggtgtgag

SEQ ID NO: 7235 - protein, 324 aa, Homo sapiens; identical to SEQ ID NO: 7233

SEQ ID NO: 7236 - DNA, 2089 bp, Homo sapiens; identical to SEQ ID NO: 1011

SEQ ID NO: 7237 - protein, 429 aa, Homo sapiens; identical to SEQ ID NO: 1012

SEQ ID NO: 7238 - DNA, 1703 bp, Homo sapiens
gaattccgaatcatgtgcagaatgctgaatcttcccccagccaggacgaataagacagcgcggaaaagcagattctcgtaattctggaattgcatgttgcaaggagtctcctggatcttcgcacccagcttcgggtagggagggagtccgggtcccgggctaggccagcccggcaggtggagagggtccccggcagccccgcgcgcccctggccatgtctttaatgccctgccccttcatgtggccttctgagggttcccagggctggccagggttgtttcccacccgcgcgcgcgctctcacccccagccaaacccacctggcagggctccctccagccgagaccttttgattcccggctcccgcgctcccgcctccgcgccagcccgggaggtggccctggacagccggacctcgcccggccccggctgggaccatggtgtttctctcgggaaatgcttccgacagctccaactgcacccaaccgccggcaccggtgaacatttccaaggccattctgctcggggtgatcttggggggcctcattcttttcggggtgctgggtaacatcctagtgatcctctccgtagcctgtcaccgacacctgcactcagtcacgcactactacatcgtcaacctggcggtggccgacctcctgctcacctccacggtgctgcccttctccgccatcttcgaggtcctaggctactgggccttcggcagggtcttctgcaacatctgggcggcagtggatgtgctgtgctgcaccgcgtccatcatgggcctctgcatcatctccatcgaccgctacatcggcgtgagctacccgctgcgctacccaaccatcgtcacccagaggaggggtctcatggctctgctctgcgtctgggcactctccctggtcatatccattggacccctgttcggctggaggcagccggcccccgaggacgagaccatctgccagatcaacgaggagccgggctacgtgctcttctcagcgctgggctccttctacctgcctctggccatcatcctggtcatgtactgccgcgtctacgtggtggccaagagggagagccggggcctcaagtctggcctcaagaccgacaagtcggactcggagcaagtgacgctccgcatccatcggaaaaacgccccggcaggaggcagcgggatggccagcgccaagaccaagacgcacttctcagtgaggctcctcaagttctcccgggagaagaaagcggccaaaacgctgggcatcgtggtcggctgcttcgtcctctgctggctgccttttttcttagtcatgcccattgggacacacacccatgacatgaagccagcttcccgtccacgactgttgtccttactgcccaaggaaggggagcatgaaacccaccactggtcctgcgacccactgtctttggaatccaccccaggagcccaggagccttgcctgacacttggatttacttctttatcaagcatccatctgactaaggcacaaatccaacatgttactgttactgatacaggaaaaacagtaacttaaggaatgatcatgaatgcaaagggaaagaggaaaagagccttcagggacaaatagctcgattttttgtaaatcagtttcatacaacctccctcccccatttcattcttaaaagttaattgagaatcatcagccacgtgtagggtgtgag

SEQ ID NO: 7239 - protein, 372 aa, Homo sapiens
MVFLSGNASDSSNCTQPPAPVNISKAILLGVILGGLILFGVLGNILVILSVACHRHLHSVTHYYIVNLAVADLLLTSTVLPFSAIFEVLGYWAFGRVFCNIWAAVDVLCCTASIMGLCIISIDRYIGVSYPLRYPTIVTQRRGLMALLCVWALSLVISIGPLFGWRQPAPEDETICQINEEPGYVLFSALGSFYLPLAIILVMYCRVYVVAKRESRGLKSGLKTDKSDSEQVTLRIHRKNAPAGGSGMASAKTKTHFSVRLLKFSREKKAAKTLGIVVGCFVLCWLPFFLVMPIGTHTHDMKPASRPRLLSLLPKEGEHETHHWSCDPLSLESTPGAQEPCLTLGFTSLSSIHLTKAQIQHVTVTDTGKTVT

SEQ ID NO: 7240 - DNA, 1765 bp, Homo sapiens
tcatgtggccttctgagggttcccagggctggccagggttgtttcccacccgcgcgcgcgctctcacccccagccaaacccacctggcagggctccctccagccgagaccttttgattcccggctcccgcgctcccgcctccgcgccagcccgggaggtggccctggacagccggacctcgcccggccccggctgggaccatggtgtttctctcgggaaatgcttccgacagctccaactgcacccaaccgccggcaccggtgaacatttccaaggccattctgctcggggtgatcttggggggcctcattcttttcggggtgctgggtaacatcctagtgatcctctccgtagcctgtcaccgacacctgcactcagtcacgcactactacatcgtcaacctggcggtggccgacctcctgctcacctccacggtgctgcccttctccgccatcttcgaggtcctaggctactgggccttcggcagggtcttctgcaacatctgggcggcagtggatgtgctgtgctgcaccgcgtccatcatgggcctctgcatcatctccatcgaccgctacatcggcgtgagctacccgctgcgctacccaaccatcgtcacccagaggaggggtctcatggctctgctctgcgtctgggcactctccctggtcatatccattggacccctgttcggctggaggcagccggcccccgaggacgagaccatctgccagatcaacgaggagccgggctacgtgctcttctcagcgctgggctccttctacctgcctctggccatcatcctggtcatgtactgccgcgtctacgtggtggccaagagggagagccggggcctcaagtctggcctcaagaccgacaagtcggactcggagcaagtgacgctccgcatccatcggaaaaacgccccggcaggaggcagcgggatggccagcgccaagaccaagacgcacttctcagtgaggctcctcaagttctcccgggagaagaaagcggccaaaacgctgggcatcgtggtcggctgcttcgtcctctgctggctgccttttttcttagtcatgcccattgggtctttcttccctgatttcaagccctctgaaacagtttttaaaatagtattttggctcggatatctaaacagctgcatcaaccccatcatatacccatgctccagccaagagttcaaaaaggcctttcagaatgtcttgagaatccagtgtctctgcagaaagcagtcttccaaacatgccctgggctacaccctgcacccgcccagccaggccgtggaagggcaacacaaggacatggtgcgcatccccgtgggatcaagagagaccttctacaggatctccaagacggatggcgtttgtgaatggaaatttttctcttccatgccccgtggatctgccaggattacagtgtccaaagaccaatcctcctgtaccacagcccggaggggaatggattgtagatatttcaccaagaattgcagagagcatatcaagcatgtgaattttatgatgccaccgtggagaaagggttcagaatgctgatctccaggtagctggagacctaggcagtctgcaaatgaggagtcagctggaagctatggctatgtattatgtgacatcgcttgttcctaagtgaaaactggatatcccaaccttctggcccagtaggtttcatggttaagacctggtagtgagaacattttaggaactatttgcttgggcaggcaatttttcactct

SEQ ID NO: 7241 - protein, 455 aa, Homo sapiens; identical to SEQ ID NO: 1016

SEQ ID NO: 7242 - DNA, 2281 bp, Homo sapiens; identical to SEQ ID NO: 1009

SEQ ID NO: 7243 - protein, 466 aa, Homo sapiens; identical to SEQ ID NO: 1010

SEQ ID NO: 7244 - DNA, 545 bp, Homo sapiens
cacagagagcctggtgggttccttccacaccacactctctaccccaccacactggctgccacattaacagggatgctcagagagacttccagggtctttcttccctgatttcaagccctctgaaacagtttttaaaatagtattttggctcggatatctaaacagctgcatcaaccccatcatatacccatgctccagccaagagttcaaaaaggcctttcagaatgtcttgagaatccagtgtctctgcagaaagcagtcttccaaacatgccctgggctacaccctgcacccgcccagccaggccgtggaagggcaacacaaggacatggtgcgcatccccgtgggatcaagagagaccttctacaggatctccaagacggatggcgtttgtgaatggaaatttttctcttccatgccccgtggatctgccaggattacagtgtccaaagaccaatcctcctgtaccacagcccgggtgagaagtaaaagctttttgcaggtctgctgctgtgtagggccctcaacccccagccttgacaaga

SEQ ID NO: 7245 - protein, 71 aa, Homo sapiens
MVRIPVGSRETFYRISKTDGVCEWKFFSSMPRGSARITVSKDQSSCTTARVRSKSFLQVCCCVGPSTPSLD

SEQ ID NO: 7246 - DNA, 1694 bp, Homo sapiens
gaattccgaatcatgtgcagaatgctgaatcttcccccagccaggacgaataagacagcgcggaaaagcagattctcgtaattctggaattgcatgttgcaaggagtctcctggatcttcgcacccagcttcgggtagggagggagtccgggtcccgggctaggccagcccggcaggtggagagggtccccggcagccccgcgcgcccctggccatgtctttaatgccctgccccttcatgtggccttctgagggttcccagggctggccagggttgtttcccacccgcgcgcgcgctctcacccccagccaaacccacctggcagggctccctccagccgagaccttttgattcccggctcccgcgctcccgcctccgcgccagcccgggaggtggccctggacagccggacctcgcccggccccggctgggaccatggtgtttctctcgggaaatgcttccgacagctccaactgcacccaaccgccggcaccggtgaacatttccaaggccattctgctcggggtgatcttggggggcctcattcttttcggggtgctgggtaacatcctagtgatcctctccgtagcctgtcaccgacacctgcactcagtcacgcactactacatcgtcaacctggcggtggccgacctcctgctcacctccacggtgctgcccttctccgccatcttcgaggtcctaggctactgggccttcggcagggtcttctgcaacatctgggcggcagtggatgtgctgtgctgcaccgcgtccatcatgggcctctgcatcatctccatcgaccgctacatcggcgtgagctacccgctgcgctacccaaccatcgtcacccagaggaggggtctcatggctctgctctgcgtctgggcactctccctggtcatatccattggacccctgttcggctggaggcagccggcccccgaggacgagaccatctgccagatcaacgaggagccgggctacgtgctcttctcagcgctgggctccttctacctgcctctggccatcatcctggtcatgtactgccgcgtctacgtggtggccaagagggagagccggggcctcaagtctggcctcaagaccgacaagtcggactcggagcaagtgacgctccgcatccatcggaaaaacgccccggcaggaggcagcgggatggccagcgccaagaccaagacgcacttctcagtgaggctcctcaagttctcccgggagaagaaagcggccaaaacgctgggcatcgtggtcggctgcttcgtcctctgctggctgccttttttcttagtcatgcccattgatgaggaaactgaggcccaagaaggaaaaaatgactcacccagctttaaacaaccagttcaccatgcagcagtgctggggttggaggtgatggagaaggaaaatttggaaggtgtttcaaggaaagacacctgtggggtttggtgaccagttggaatgtaagaggcaaaaaaaagggagaaggaactagatacatattcttctggcaggaactgttaattgggttcctgctcccatcttgcactacagtgagagagataacctggtctcctaccattggaaagcatatcatctgtgctctggaggatgagacaatcaaagaaaacaagtaaataagaaaacttaaaaactgtgatatgtaccgtgaaataaataa

SEQ ID NO: 7247 - protein, 342 aa, Homo sapiens
MVFLSGNASDSSNCTQPPAPVNISKAILLGVILGGLILFGVLGNILVILSVACHRHLHSVTHYYIVNLAVADLLLTSTVLPFSAIFEVLGYWAFGRVFCNIWAAVDVLCCTASIMGLCIISIDRYIGVSYPLRYPTIVTQRRGLMALLCVWALSLVISIGPLFGWRQPAPEDETICQINEEPGYVLFSALGSFYLPLAIILVMYCRVYVVAKRESRGLKSGLKTDKSDSEQVTLRIHRKNAPAGGSGMASAKTKTHFSVRLLKFSREKKAAKTLGIVVGCFVLCWLPFFLVMPIDEETEAQEGKNDSPSFKQPVHHAAVLGLEVMEKENLEGVSRKDTCGVW

SEQ ID NO: 7248 - DNA, 806 bp, Homo sapiens
gtccctgcagccctgtgaacaactttgacaacctcctgcaccaaattctcaacaatgtttccatcccagtctcagggcacagagagcctggtgggttccttccacaccacactctctaccccaccacactggctgccacattaacagacatggtcttgctgtgtcacccaggctggagtgaagtggcacaatcatggctcactgcagcctagaaccctgggttcaagtgatcctctcttctcagcctcctgagtagttggaactacagacatgcaccaccgtgcccagccaatcttcaggcattcctaccactcttgttgagagagagggctcagaacaaatgccaactgcctctttccactaccttcttccccacctttctcacagtccctcagggaagacagggaagtctttcctcttccttgttctggctaaaggggacactcctcctcctttccagagtggcatccaccttctatggaatagcaaagccaagtggacagcagagagagagagaggcagagagagagagagaggcagagagagagagaggtttactaagaaaagaataaagatgaggaatattttaaaatattataatccttatacatatttaaaactatcttttccacttggttatttgcattttgttgttttatggtttttgcaaatgtttagacatttaaaatatttatatagtcaaatattttcatgttttttcattgaatgtgccttctcagggatgctcagagagaccttccacaatgtaagtctgtttcctcctcattcttttagagcatcatttg

SEQ ID NO: 7249 - protein, 154 aa, Homo sapiens
MPTASFHYLLPHLSHSPSGKTGKSFLFLVLAKGDTPPPFQSGIHLLWNSKAKWTAERERGRERERGRERERFTKKRIKMRNILKYYNPYTYLKLSFPLGYLHFVVLWFLQMFRHLKYLYSQIFSCFFIECAFSGMLRETFHNVSLFPPHSFRAS

SEQ ID NO: 7250 - DNA, 563 bp, Homo sapiens
agatgcccagtgtgcacccggccacagagaagtcctggccacgccatcggcaacctgctcgtcttgtctgtgaggccttcccagctggccgggctcaccctgcagctcccgcacctgtgcctgccccgggaatctggggccgtttcccactcctcttcaaccgtcagcgacaccttgggccttcttttccagtcaggtgggacggcgcccctgtcaggctgtgtcttatctctcggaacacgggcaccccacagaaggtcctgcctcctgtggtctggagccccccctcaaggaagaaacccatgctgtctgctcgcaactccatgatgtttggacacctcagccccgtgaggatccctcgtctcagagaatagtaaatctaaagtttctttgcaaatgggtgaaattgtcaaggtcattgttaccatcaaagacttgaaagttgcaaggatggtgctttttgtcacattttcatctcaactcaccaactgatctgtgaagaatatggaagcatcttggaagatgacagattatggcaagagaacccagaaaaaagttgctct

SEQ ID NO: 7251 - protein, 123 aa, Homo sapiens
MPSVHPATEKSWPRHRQPARLVCEAFPAGRAHPAAPAPVPAPGIWGRFPLLFNRQRHLGPSFPVRWDGAPVRLCLISRNTGTPQKVLPPVVWSPPSRKKPMLSARNSMMFGHLSPVRIPRLRE

SEQ ID NO: 7252 - DNA, 1243 bp, Homo sapiens
aggtcctggccacgccatcggcaacctgctcgtcttgtctgtgaggccttcccagctggccgggctcaccctgcagctcccgcacctgtgcctgccccgggaatctggggccgtttcccactcctcttcaaccgtcagcgacaccttgggccttcttttccagtcaggtgggacggcgcccctgtcaggctgtgtcttatctctcggaacacgggcaccccacagaaggtcctgcctcctgtggtctggagccccccctcaaggaagaaacccatgctgtctgctcgcaactccatgatgtttggacacctcagccccgtgaggatccctcgtctcagaggcaagtttaaccttcaacttccttcattagatgagcaggtgatcccagccaggctcctgaagatggaggtgagggcagaagagcccaaagaagcaacggaggtgaaagaccaggtagagacccaggggcaggaggacaataaaatgggcccctgtagcaatggggaagcagcctccacctctaggcccctggagactcagggaaacctcacttcctcctggtacaatcccaggcccttggagggaaatgtccacctcaagagcttgacagaaaagaaccagactgacaaggcccaggtgcatgcagtgagtttctactccaagggccatggagtcgccagttcacacagccctgctggtggcatccttccctttgggaagcctgacccacttccaacagtgctccctgccccagttccgggctgctccctgtggccagagaaggcggccttgaaggtgctgggtaaagaccacctgcccagctctccaggcttgctgatggtgggggaggacatgcagcccaaggatcctgcagttcttggatcaagtaggtcttctccacccagagctgccggccacaggtcccgcaaaagaaaactgtcggggccaccactgcagctgcaactgacccctcccctgcaactgaggtgggatagagacggggggcccccaccggctaagcttccatgtctatctcctgaggcactgttggtgggtcaggcttcccaaagagaaggacgcctccagcagggcaacatgcgtaagaacatgagggtgttaagtagaacatcaaaattcaggagacgaaaacagctgcttaggaggagaaagaagacacggcagggcaggcgtggtggctcatgcctgtaatccagcactttgggaggcccaggcgggcggatca

SEQ ID NO: 7253 - protein, 311 aa, Homo sapiens
MLSARNSMMFGHLSPVRIPRLRGKFNLQLPSLDEQVIPARLLKMEVRAEEPKEATEVKDQVETQGQEDNKMGPCSNGEAASTSRPLETQGNLTSSWYNPRPLEGNVHLKSLTEKNQTDKAQVHAVSFYSKGHGVASSHSPAGGILPFGKPDPLPTVLPAPVPGCSLWPEKAALKVLGKDHLPSSPGLLMVGEDMQPKDPAVLGSSRSSPPRAAGHRSRKRKLSGPPLQLQLTPPLQLRWDRDGGPPPAKLPCLSPEALLVGQASQREGRLQQGNMRKNMRVLSRTSKFRRRKQLLRRRKKTRQGRRGGSCL

SEQ ID NO: 7254 - DNA, 586 bp, Homo sapiens
cagaaatatctggggagaggctttggaatcataaagagtcggaattaaaatactgttgtgccacttaccaactttgggacaagccgatctgtctgcacctcaatctcccagtctgtgaattgggaccagtgattcctaccacctgggggtactgtggacattcaccaacacgatggatgtgaaagcatcccacttatctcagtggttaagttgcaagaatatttccaaagcagatgccaaactgtacgctgatgccaaaagcaagtatttgcaaaactgtaaaggaaggagaagaaaacatcagcctcttgggaagctaccaaaggagagagaacctggactcagtttgttctgctctcttttagggaaggaggagtgagctcctagctagtgagaggcctctgtacgttgggactgtgcattcactaactccactgtccttacatttgccatttatttgaaaaagatgacctgtgtgtacgaggacctgggtttgaatcttgacttgttatatatgggttgtgagaccctggataaaccactgaactttttcgggcttcagattcctcatctgtgaaacagagac

SEQ ID NO: 7255 - protein, 68 aa, Homo sapiens
MDVKASHLSQWLSCKNISKADAKLYADAKSKYLQNCKGRRRKHQPLGKLPKEREPGLSLFCSLLGKEE

SEQ ID NO: 7256 - DNA, 1378 bp, Homo sapiens
tcatggcaagagcgagcagtggtgctgatgttgagagaagcccagggtaccactaattgagggagtgaggaagagagcagctcgcttctaactggactgcacgttggtgacagcgtcccaagctggtgacagacccactctgtaactttcagctagattcagccaccagatcccagaaacatgacccttgctgcctacaaagagaagatgaaggagctcccgctggtgtccttgttctgctcctgcttcctggccgatcccctgaataagtcgtcctacaaatatgaaggctggtgtgggagacagtgtaggaggaaggatgaaagccagcggaaagacagtgctgactggagagaaagaagagctcaggcagacacggtggacctgaattggtgcgtcatttccgacatggaagtcatcgagctgaacaaatgcacctcgggccaatcctttgaagtcatcctgaagccaccctcctttgatggggttcccgagttcaacgcctccctgccaaggcggcgagacccatccctggaagagatccagaagaaactagaagcggctgaggagcgaaggaagtaccaggaagcggagctcctgaaacacctagcagagaaacgggaacatgagagagaggtgatccaaaaggccattgaggaaaacaacaacttcatcaagatggctaaggaaaaactggcccagaagatggaatccaacaaggagaacagggaggcccacctcgccgccatgttggaacggctgcaagagaaggacaagcacgccgaggaggtgcggaaaaacaaggagctgaaggaagaggcctccaggtaaagcctagaggccaaagaactttccaggtcagccggacagctccagcagctccacgttccaggcagcctcgcccgccggctgcgctcccagcactggggtttggggggaggggggtggccaaggggcgtttcctctgcttttggtgtttgtacatgttaagaattgaccagtgaagccatcctatttgtttccggggaacaatgacggggtgggagaggggagaggagagagtttgggaaagggagatggagaagaactcaaggacattgcaaccctgcccggcgcagatctgattttcacatctctacctggacattgagcctccaggcaccatgttgaggagagatgaaaaccagggcggtagaacttcagggtgaaggacagagtcctgggtggggcagcggctgcagggcgcaccagagaacccagccagaggggttgtgagtaccagtggtgttgcttccaccctgcagcaggtgggatgaggtctgtgtgtgtgtgtgaaccatcattttttgatcatcatgaccaatgaaacattgactcc

SEQ ID NO: 7257 - protein, 216 aa, Homo sapiens; identical to SEQ ID NO: 1018

SEQ ID NO: 7258 - DNA, 1694 bp, Homo sapiens
ctgacagagctggaaacaggcaccaagccctccaggaagctatttttagggttcatctgttcttttttatttcttctctggattccatattctctcacccccaaatttaaaggacctaaagatcctggaaatcattcattatacccccagctcgcaagctgtggcttctccccaaccttctctgtaccactccctctttctttcttcctctccgccctcacccctctggttctccagctccacaggcagcagagaaagcaggctctttgtctgacatcatctttcactccctggcctgctaagagttactcactcaggcaatccctgctccaccagaggagactgtccaattgccaagcaacccactgctggccaatcacagagcttggaggtgatgtcatggcaagagcgagcagtggtgctgatgttgagagaagcccagggtaccactaattgagggagtgaggaagagagcagctcgcttctaactggactgcacgttggtgacagcgtcccaagctggtgacagacccactctgtaactttcagctagattcagccaccagatcccagaaacatgacccttgctgcctacaaagagaagatgaaggagctcccgctggtgtccttgttctgctcctgcttcctggccgatcccctgaataagtcgtcctacaaatatgaagcagacacggtggacctgaattggtgcgtcatttccgacatggaagtcatcgagctgaacaaatgcacctcgggccaatcctttgaagtcatcctgaagccaccctcctttgatggggttcccgagttcaacgcctccctgccaaggcggcgagacccatccctggaagagatccagaagaaactagaagcggctgaggagcgaaggaagtaccaggaagcggagctcctgaaacacctagcagagaaacgggaacatgagagagaggtgatccaaaaggccattgaggaaaacaacaacttcatcaagatggctaaggaaaaactggcccagaagatggaatccaacaaggagaacagggaggcccacctcgccgccatgttggaacggctgcaagagaaggacaagcacgccgaggaggtgcggaaaaacaaggagctgaaggaagaggcctccaggtaaagcctagaggccaaagaactttccaggtcagccggacagctccagcagctccacgttccaggcagcctcgcccgccggctgcgctcccagcactggggtttggggggaggggggtggccaaggggcgtttcctctgcttttggtgtttgtacatgttaagaattgaccagtgaagccatcctatttgtttccggggaacaatgacggggtgggagaggggagaggagagagtttgggaaagggagatggagaagaactcaaggacattgcaaccctgcccggcgcagatctgattttcacatctctacctggacattgagcctccaggcaccatgttgaggagagatgaaaaccagggcggtagaacttcagggtgaaggacagagtcctgggtggggcagcggctgcagggcgcaccagagaacccagccagaggggttgtgagtaccagtggtgttgcttccaccctgcagcaggtgggatgaggtctgtgtgtgtgtgtgaaccatcattttttgatcatcatgaccaatgaaacattgactcc

SEQ ID NO: 7259 - protein, 189 aa, Homo sapiens
MTLAAYKEKMKELPLVSLFCSCFLADPLNKSSYKYEADTVDLNWCVISDMEVIELNKCTSGQSFEVILKPPSFDGVPEFNASLPRRRDPSLEEIQKKLEAAEERRKYQEAELLKHLAEKREHEREVIQKAIEENNNFIKMAKEKLAQKMESNKENREAHLAAMLERLQEKDKHAEEVRKNKELKEEASR

SEQ ID NO: 7260 - DNA, 297 bp, Homo sapiens
cacctagcagagaaacgggaacatgagagagaggtgatccaaaaggccattgaggaaaacaacaacttcatcaagatggctaaggaaaaactggcccagaagatggaatccaacaaggagaacagggaggcccacctcgccgccatgttggaaccggctgcagggcgcaccagagaacccagccagaggggttgtgagtaccagtggtgttgcttccaccctgcagcaggtgggatgaggtctgtgtgtgtgtgtgaaccatcattttttgatcatcatgaccaatgaaacattgac

SEQ ID NO: 7261 - protein, 70 aa, Homo sapiens
MAKEKLAQKMESNKENREAHLAAMLEPAAGRTREPSQRGCEYQWCCFHPAAGGMRSVCVCEPSFFDHHDQ

SEQ ID NO: 7262 - DNA, 2168 bp, Homo sapiens
ggggcagagccgggccaagctgggcgggtcatgcgccctggccttcgcgcatctcccaggttagctgcgtgtccgggtgctaggctgcagacccgccgccatgacgctgcgcgcggccgtcttcgaccttgacggggtgctggcgctgccagcggtgttcggcgtcctcggccgcacggaggaggccctggcgctgcccagaggacttctgaatgatgctttccagaaagggggaccagagggtgccactacccggcttatgaaaggagagatcacactttcccagtggataccactcatggaagaaaactgcaggaagtgctccgagaccgctaaagtctgcctccccaagaatttctccataaaagaaatctttgacaaggcgatttcagccagaaagatcaaccgccccatgctccaggcagctctcatgctcaggaagaaaggattcactactgccatcctcaccaacacctggctggacgaccgtgctgagagagatggcctggcccagctgatgtgtgagctgaagatgcactttgacttcctgatagagtcgtgtcaggtgggaatggtcaaacctgaacctcagatctacaagtttctgctggacaccctgaaggccagccccagtgaggtcgtttttttggatgacatcggggctaatctgaagccagcccgtgacttgggaatggtcaccatcctggtccaggacactgacacggccctgaaagaactggagaaagtgaccggaatccagcttctcaataccccggcccctctgccgacctcttgcaatccaagtgacatgagccatgggtacgtgacagtaaagcccagggtccgtctgcattttgtggagctgggctccggccctgctgtgtgcctctgccatggatttcccgagagttggtattcttggaggtaccagatccctgctctggcccaggcaggttaccgggtcctagctatggacatgaaaggctatggagagtcatctgctcctcccgaaatagaagaatattgcatggaagtgttatgtaaggagatggtaaccttcctggataaactgggcctctctcaagcagtgttcattggccatgactggggtggcatgctggtgtggtacatggctctcttctaccccgagagagtgagggcggtggccagtttgaatactcccttcataccagcaaatcccaacatgtcccctttggagagtatcaaagccaacccagtatttgattaccagctctacttccaagaaccaggagtggctgaggctgaactggaacagaacctgagtcggactttcaaaagcctcttcagagcaagcgatgagagtgttttatccatgcataaagtctgtgaagcgggaggactttttgtaaatagcccagaagagcccagcctcagcaggatggtcactgaggaggaaatccagttctatgtgcagcagttcaagaagtctggtttcagaggtcctctaaactggtaccgaaacatggaaaggaactggaagtgggcttgcaaaagcttgggacggaagatcctgattccggccctgatggtcacggcggagaaggacttcgtgctcgttcctcagatgtcccagcacatggaggactggattccccacctgaaaaggggacacattgaggactgtgggcactggacacagatggacaagccaaccgaggtgaatcagatcctcattaagtggctggattctgatgcccggaacccaccggtggtctcaaagatgtagaacgcagcgtgtgcccacgctcagcaggtgtgccatccttccacctgctggggcaccattcttagtatacagaggtggccttacacacatcttgcatggatggcagcattgttctgaaggggtttgcagaaaaaaaagattttctttacataaagtgaatcaaatttgacattattttagatcccagagaaatcaggtgtgattagttctccaggcatgaatgcatcgtccctttatctgtaagaacccttagtgtcctgtagggggacagaatggggtggccaggtggtgatttctctttgaccaatgcatagtttggcagaaaaatcagccgttcatttagaagaatcttagcagagattgggatgccttactcaataaagctaagatgactatgctg

SEQ ID NO: 7263 - protein, 555 aa, Homo sapiens; identical to SEQ ID NO: 1020

SEQ ID NO: 7264 - DNA, 2810 bp, Homo sapiens
ggggcagagccgggccaagctgggcgggtcatgcgccctggccttcgcgcatctcccaggttagctgcgtgtccgggtgctaggctgcagacccgccgccatgacgctgcgcgcggccgtcttcgaccttgacggggtgctggcgctgccagcggtgttcggcgtcctcggccgcacggaggaggccctggcgctgcccagaggacttctgaatgatgctttccagaaagggggaccagagggtgccactacccggcttatgaaaggagagatcacactttcccagtggataccactcatggaagaaaactgcaggaagtgctccgagaccgctaaagtctgcctccccaagaatttctccataaaagaaatctttgacaaggcgatttcagccagaaagatcaaccgccccatgctccaggcagctctcatgctcaggaagaaaggattcactactgccatcctcaccaacacctggctggacgaccgtgctgagagagatggcctggcccagctgatgtgtgagctgaagatgcactttgacttcctgatagagtcgtgtcaggtgggaatggtcaaacctgaacctcagatctacaagtttctgctggacaccctgaaggccagccccagtgaggtcgtttttttggatgacatcggggctaatctgaagccagcccgtgacttgggaatggtcaccatcctggtccaggacactgacacggccctgaaagaactggagaaagtgaccggaatccagcttctcaataccccggcccctctgccgacctcttgcaatccaagtgacatgagccatgggtacgtgacagtaaagcccagggtccgtctgcattttgtggagctgggctccggccctgctgtgtgcctctgccatggatttcccgagagttggtattcttggaggtaccagatccctgctctggcccaggcaggttaccgggtcctagctatggacatgaaaggctatggagagtcatctgctcctcccgaaatagaagaatattgcatggaagtgttatgtaaggagatggtaaccttcctggataaactgggcctctctcaagcagtgttcattggccatgactggggtggcatgctggtgtggtacatggctctcttctaccccgagagagtgagggcggtggccagtttgaatactcccttcataccagcaaatcccaacatgtcccctttggagagtatcaaagccaacccagtatttgattaccagctctacttccaagaaccaggagtggctgaggctgaactggaacagaacctgagtcggactttcaaaagcctcttcagagcaagcgatgagagtgttttatccatgcataaagtctgtgaagcgggaggactttttgtaaatagcccagaagagcccagcctcagcaggatggtcactgaggaggaaatccagttctatgtgcagcagttcaagaagtctggtttcagaggtcctctaaactggtaccgaaacatggaaaggaactggaagtgggcttgcaaaagcttgggacggaagatcctgattccggccctgatggtcacggcggagaaggacttcgtgctcgttcctcagatgtcccagcacatggaggactggattccccacctgaaaaggggacacattgaggactgtgggcactggacacagatggacaagccaaccgaggtgaatcagatcctcattaagtggctggattctgatgcccggaacccaccggtggtctcaaagatgtagaacgcagcgtgtgcccacgctcagcaggtgtgccatccttccacctgctggggcaccattcttagtatacagaggtggccttacacacatcttgcatggatggcagcattgttctgaaggggtttgcagaaaaaaaagattttctttacataaagtgaatcaaatttgacattattttagatcccagagaaatcaggtgtgattagttctccaggcatgaatgcatcgtccctttatctgtaagaacccttagtgtcctgtagggggacagaatggggtggccaggtggtgatttctctttgaccaatgcatagtttggcagaaaaatcagccgttcatttagaagaatcttagcagagattgggatgccttactcaataaagctaagatgactatgctgctggctgtctttgttcttggagaggtggagtgactgttcacggagaatgcacggcatggggatgaaccctttccctctgcttttgagccctgttctgggctccaaggtgctgtatgatctaggccgtgctggccaggagacaatcctatggggatggcagtggtgtcttgtgctctgtcccctagagcagtcactggccacaggtagccacctgcctttctcccggcttccctagcagagtttgctcaggcacaaatgtgcacctggagcatttgaaatgtgctagtgaggctgaggaagagaattttaaatttcattgaattgtaatcagtttaaagttaaatagcagcagctgccatgaggctcaggcagatccagctcatcttcccctctgccccctcctccctatcttcccctctaccctctcctgcctcctgtcacatccggttaggctcccatctcactgatgtgtctcctgcagtggtctctcccctgccctgcttccagccccagagtcctggagcagcagcctcctcacgggtcttgccgcccacatggttggatcctgaaactcgcagggcctcccccaactgcccctgcccacccccagcccggccccatcaccctccaattcctaaccgc

SEQ ID NO: 7265 - protein, 555 aa, Homo sapiens; identical to SEQ ID NO: 1020

SEQ ID NO: 7266 - DNA, 2099 bp, Homo sapiens
tgcgccctggccttcgcgcatctcccaggttagctgcgtgtccgggtgctaggctgcagacccgccgccatgacgctgcgcgcggccgtcttcgaccttgacggggtgctggcgctgccagcggtgttcggcgtcctcggccgcacggaggaggccctggcgctgcccagagggtgccactacccggcttatgaaaggagagatcacactttcccagtggataccactcatggaagaaaactgcaggaagtgctccgagaccgctaaagtctgcctccccaagaatttctccataaaagaaatctttgacaaggcgatttcagccagaaagatcaaccgccccatgctccaggcagctctcatgctcaggaagaaaggattcactactgccatcctcaccaacacctggctggacgaccgtgctgagagagatggcctggcccagctgatgtgtgagctgaagatgcactttgacttcctgatagagtcgtgtcaggtgggaatggtcaaacctgaacctcagatctacaagtttctgctggacaccctgaaggccagccccagtgaggtcgtttttttggatgacatcggggctaatctgaagccagcccgtgacttgggaatggtcaccatcctggtccaggacactgacacggccctgaaagaactggagaaagtgaccggaatccagcttctcaataccccggcccctctgccgacctcttgcaatccaagtgacatgagccatgggtacgtgacagtaaagcccagggtccgtctgcattttgtggagctgggctccggccctgctgtgtgcctctgccatggatttcccgagagttggtattcttggaggtaccagatccctgctctggcccaggcaggttaccgggtcctagctatggacatgaaaggctatggagagtcatctgctcctcccgaaatagaagaatattgcatggaagtgttatgtaaggagatggtaaccttcctggataaactgggcctctctcaagcagtgttcattggccatgactggggtggcatgctggtgtggtacatggctctcttctaccccgagagagtgagggcggtggccagtttgaatactcccttcataccagcaaatcccaacatgtcccctttggagagtatcaaagccaacccagtatttgattaccagctctacttccaagaaccaggagtggctgaggctgaactggaacagaacctgagtcggactttcaaaagcctcttcagagcaagcgatgagagtgttttatccatgcataaagtctgtgaagcgggaggactttttgtaaatagcccagaagagcccagcctcagcaggatggtcactgaggaggaaatccagttctatgtgcagcagttcaagaagtctggtttcagaggtcctctaaactggtaccgaaacatggaaaggaactggaagtgggcttgcaaaagcttgggacggaagatcctgattccggccctgatggtcacggcggagaaggacttcgtgctcgttcctcagatgtcccagcacatggaggactggattccccacctgaaaaggggacacattgaggactgtgggcactggacacagatggacaagccaaccgaggtgaatcagatcctcattaagtggctggattctgatgcccggaacccaccggtggtctcaaagatgtagaacgcagcgtgtgcccacgctcagcaggtgtgccatccttccacctgctggggcaccattcttagtatacagaggtggccttacacacatcttgcatggatggcagcattgttctgaaggggtttgcagaaaaaaaagattttctttacataaagtgaatcaaatttgacattattttagatcccagagaaatcaggtgtgattagttctccaggcatgaatgcatcgtccctttatctgtaagaacccttagtgtcctgtagggggacagaatggggtggccaggtggtgatttctctttgaccaatgcatagtttggcagaaaaatcagccgttcatttagaagaatcttagcagagattgggatgccttactcaataaagctaagatgactatgctg

SEQ ID NO: 7267 - protein, 502 aa, Homo sapiens
MKGEITLSQWIPLMEENCRKCSETAKVCLPKNFSIKEIFDKAISARKINRPMLQAALMLRKKGFTTAILTNTWLDDRAERDGLAQLMCELKMHFDFLIESCQVGMVKPEPQIYKFLLDTLKASPSEVVFLDDIGANLKPARDLGMVTILVQDTDTALKELEKVTGIQLLNTPAPLPTSCNPSDMSHGYVTVKPRVRLHFVELGSGPAVCLCHGFPESWYSWRYQIPALAQAGYRVLAMDMKGYGESSAPPEIEEYCMEVLCKEMVTFLDKLGLSQAVFIGHDWGGMLVWYMALFYPERVRAVASLNTPFIPANPNMSPLESIKANPVFDYQLYFQEPGVAEAELEQNLSRTFKSLFRASDESVLSMHKVCEAGGLFVNSPEEPSLSRMVTEEEIQFYVQQFKKSGFRGPLNWYRNMERNWKWACKSLGRKILIPALMVTAEKDFVLVPQMSQHMEDWIPHLKRGHIEDCGHWTQMDKPTEVNQILIKWLDSDARNPPVVSKM

SEQ ID NO: 7268 - DNA, 2052 bp, Homo sapiens
tgcgccctggccttcgcgcatctcccaggttagctgcgtgtccgggtgctaggctgcagacccgccgccatgacgctgcgcgcggccgtcttcgaccttgacggggtgctggcgctgccagcggtgttcggcgtcctcggccgcacggaggaggccctggcgctgcccagtggataccactcatggaagaaaactgcaggaagtgctccgagaccgctaaagtctgcctccccaagaatttctccataaaagaaatctttgacaaggcgatttcagccagaaagatcaaccgccccatgctccaggcagctctcatgctcaggaagaaaggattcactactgccatcctcaccaacacctggctggacgaccgtgctgagagagatggcctggcccagctgatgtgtgagctgaagatgcactttgacttcctgatagagtcgtgtcaggtgggaatggtcaaacctgaacctcagatctacaagtttctgctggacaccctgaaggccagccccagtgaggtcgtttttttggatgacatcggggctaatctgaagccagcccgtgacttgggaatggtcaccatcctggtccaggacactgacacggccctgaaagaactggagaaagtgaccggaatccagcttctcaataccccggcccctctgccgacctcttgcaatccaagtgacatgagccatgggtacgtgacagtaaagcccagggtccgtctgcattttgtggagctgggctccggccctgctgtgtgcctctgccatggatttcccgagagttggtattcttggaggtaccagatccctgctctggcccaggcaggttaccgggtcctagctatggacatgaaaggctatggagagtcatctgctcctcccgaaatagaagaatattgcatggaagtgttatgtaaggagatggtaaccttcctggataaactgggcctctctcaagcagtgttcattggccatgactggggtggcatgctggtgtggtacatggctctcttctaccccgagagagtgagggcggtggccagtttgaatactcccttcataccagcaaatcccaacatgtcccctttggagagtatcaaagccaacccagtatttgattaccagctctacttccaagaaccaggagtggctgaggctgaactggaacagaacctgagtcggactttcaaaagcctcttcagagcaagcgatgagagtgttttatccatgcataaagtctgtgaagcgggaggactttttgtaaatagcccagaagagcccagcctcagcaggatggtcactgaggaggaaatccagttctatgtgcagcagttcaagaagtctggtttcagaggtcctctaaactggtaccgaaacatggaaaggaactggaagtgggcttgcaaaagcttgggacggaagatcctgattccggccctgatggtcacggcggagaaggacttcgtgctcgttcctcagatgtcccagcacatggaggactggattccccacctgaaaaggggacacattgaggactgtgggcactggacacagatggacaagccaaccgaggtgaatcagatcctcattaagtggctggattctgatgcccggaacccaccggtggtctcaaagatgtagaacgcagcgtgtgcccacgctcagcaggtgtgccatccttccacctgctggggcaccattcttagtatacagaggtggccttacacacatcttgcatggatggcagcattgttctgaaggggtttgcagaaaaaaaagattttctttacataaagtgaatcaaatttgacattattttagatcccagagaaatcaggtgtgattagttctccaggcatgaatgcatcgtccctttatctgtaagaacccttagtgtcctgtagggggacagaatggggtggccaggtggtgatttctctttgaccaatgcatagtttggcagaaaaatcagccgttcatttagaagaatcttagcagagattgggatgccttactcaataaagctaagatgactatgctg

SEQ ID NO: 7269 - protein, 489 aa, Homo sapiens
MEENCRKCSETAKVCLPKNFSIKEIFDKAISARKINRPMLQAALMLRKKGFTTAILTNTWLDDRAERDGLAQLMCELKMHFDFLIESCQVGMVKPEPQIYKFLLDTLKASPSEVVFLDDIGANLKPARDLGMVTILVQDTDTALKELEKVTGIQLLNTPAPLPTSCNPSDMSHGYVTVKPRVRLHFVELGSGPAVCLCHGFPESWYSWRYQIPALAQAGYRVLAMDMKGYGESSAPPEIEEYCMEVLCKEMVTFLDKLGLSQAVFIGHDWGGMLVWYMALFYPERVRAVASLNTPFIPANPNMSPLESIKANPVFDYQLYFQEPGVAEAELEQNLSRTFKSLFRASDESVLSMHKVCEAGGLFVNSPEEPSLSRMVTEEEIQFYVQQFKKSGFRGPLNWYRNMERNWKWACKSLGRKILIPALMVTAEKDFVLVPQMSQHMEDWIPHLKRGHIEDCGHWTQMDKPTEVNQILIKWLDSDARNPPVVSKM

SEQ ID NO: 7270 - DNA, 2741 bp, Homo sapiens
tgcgccctggccttcgcgcatctcccaggttagctgcgtgtccgggtgctaggctgcagacccgccgccatgacgctgcgcgcggccgtcttcgaccttgacggggtgctggcgctgccagcggtgttcggcgtcctcggccgcacggaggaggccctggcgctgcccagagggtgccactacccggcttatgaaaggagagatcacactttcccagtggataccactcatggaagaaaactgcaggaagtgctccgagaccgctaaagtctgcctccccaagaatttctccataaaagaaatctttgacaaggcgatttcagccagaaagatcaaccgccccatgctccaggcagctctcatgctcaggaagaaaggattcactactgccatcctcaccaacacctggctggacgaccgtgctgagagagatggcctggcccagctgatgtgtgagctgaagatgcactttgacttcctgatagagtcgtgtcaggtgggaatggtcaaacctgaacctcagatctacaagtttctgctggacaccctgaaggccagccccagtgaggtcgtttttttggatgacatcggggctaatctgaagccagcccgtgacttgggaatggtcaccatcctggtccaggacactgacacggccctgaaagaactggagaaagtgaccggaatccagcttctcaataccccggcccctctgccgacctcttgcaatccaagtgacatgagccatgggtacgtgacagtaaagcccagggtccgtctgcattttgtggagctgggctccggccctgctgtgtgcctctgccatggatttcccgagagttggtattcttggaggtaccagatccctgctctggcccaggcaggttaccgggtcctagctatggacatgaaaggctatggagagtcatctgctcctcccgaaatagaagaatattgcatggaagtgttatgtaaggagatggtaaccttcctggataaactgggcctctctcaagcagtgttcattggccatgactggggtggcatgctggtgtggtacatggctctcttctaccccgagagagtgagggcggtggccagtttgaatactcccttcataccagcaaatcccaacatgtcccctttggagagtatcaaagccaacccagtatttgattaccagctctacttccaagaaccaggagtggctgaggctgaactggaacagaacctgagtcggactttcaaaagcctcttcagagcaagcgatgagagtgttttatccatgcataaagtctgtgaagcgggaggactttttgtaaatagcccagaagagcccagcctcagcaggatggtcactgaggaggaaatccagttctatgtgcagcagttcaagaagtctggtttcagaggtcctctaaactggtaccgaaacatggaaaggaactggaagtgggcttgcaaaagcttgggacggaagatcctgattccggccctgatggtcacggcggagaaggacttcgtgctcgttcctcagatgtcccagcacatggaggactggattccccacctgaaaaggggacacattgaggactgtgggcactggacacagatggacaagccaaccgaggtgaatcagatcctcattaagtggctggattctgatgcccggaacccaccggtggtctcaaagatgtagaacgcagcgtgtgcccacgctcagcaggtgtgccatccttccacctgctggggcaccattcttagtatacagaggtggccttacacacatcttgcatggatggcagcattgttctgaaggggtttgcagaaaaaaaagattttctttacataaagtgaatcaaatttgacattattttagatcccagagaaatcaggtgtgattagttctccaggcatgaatgcatcgtccctttatctgtaagaacccttagtgtcctgtagggggacagaatggggtggccaggtggtgatttctctttgaccaatgcatagtttggcagaaaaatcagccgttcatttagaagaatcttagcagagattgggatgccttactcaataaagctaagatgactatgctgctggctgtctttgttcttggagaggtggagtgactgttcacggagaatgcacggcatggggatgaaccctttccctctgcttttgagccctgttctgggctccaaggtgctgtatgatctaggccgtgctggccaggagacaatcctatggggatggcagtggtgtcttgtgctctgtcccctagagcagtcactggccacaggtagccacctgcctttctcccggcttccctagcagagtttgctcaggcacaaatgtgcacctggagcatttgaaatgtgctagtgaggctgaggaagagaattttaaatttcattgaattgtaatcagtttaaagttaaatagcagcagctgccatgaggctcaggcagatccagctcatcttcccctctgccccctcctccctatcttcccctctaccctctcctgcctcctgtcacatccggttaggctcccatctcactgatgtgtctcctgcagtggtctctcccctgccctgcttccagccccagagtcctggagcagcagcctcctcacgggtcttgccgcccacatggttggatcctgaaactcgcagggcctcccccaactgcccctgcccacccccagcccggccccatcaccctccaattcctaaccgc

SEQ ID NO: 7271 - protein, 502 aa, Homo sapiens; identical to SEQ ID NO: 7267

SEQ ID NO: 7272 - DNA, 2694 bp, Homo sapiens
tgcgccctggccttcgcgcatctcccaggttagctgcgtgtccgggtgctaggctgcagacccgccgccatgacgctgcgcgcggccgtcttcgaccttgacggggtgctggcgctgccagcggtgttcggcgtcctcggccgcacggaggaggccctggcgctgcccagtggataccactcatggaagaaaactgcaggaagtgctccgagaccgctaaagtctgcctccccaagaatttctccataaaagaaatctttgacaaggcgatttcagccagaaagatcaaccgccccatgctccaggcagctctcatgctcaggaagaaaggattcactactgccatcctcaccaacacctggctggacgaccgtgctgagagagatggcctggcccagctgatgtgtgagctgaagatgcactttgacttcctgatagagtcgtgtcaggtgggaatggtcaaacctgaacctcagatctacaagtttctgctggacaccctgaaggccagccccagtgaggtcgtttttttggatgacatcggggctaatctgaagccagcccgtgacttgggaatggtcaccatcctggtccaggacactgacacggccctgaaagaactggagaaagtgaccggaatccagcttctcaataccccggcccctctgccgacctcttgcaatccaagtgacatgagccatgggtacgtgacagtaaagcccagggtccgtctgcattttgtggagctgggctccggccctgctgtgtgcctctgccatggatttcccgagagttggtattcttggaggtaccagatccctgctctggcccaggcaggttaccgggtcctagctatggacatgaaaggctatggagagtcatctgctcctcccgaaatagaagaatattgcatggaagtgttatgtaaggagatggtaaccttcctggataaactgggcctctctcaagcagtgttcattggccatgactggggtggcatgctggtgtggtacatggctctcttctaccccgagagagtgagggcggtggccagtttgaatactcccttcataccagcaaatcccaacatgtcccctttggagagtatcaaagccaacccagtatttgattaccagctctacttccaagaaccaggagtggctgaggctgaactggaacagaacctgagtcggactttcaaaagcctcttcagagcaagcgatgagagtgttttatccatgcataaagtctgtgaagcgggaggactttttgtaaatagcccagaagagcccagcctcagcaggatggtcactgaggaggaaatccagttctatgtgcagcagttcaagaagtctggtttcagaggtcctctaaactggtaccgaaacatggaaaggaactggaagtgggcttgcaaaagcttgggacggaagatcctgattccggccctgatggtcacggcggagaaggacttcgtgctcgttcctcagatgtcccagcacatggaggactggattccccacctgaaaaggggacacattgaggactgtgggcactggacacagatggacaagccaaccgaggtgaatcagatcctcattaagtggctggattctgatgcccggaacccaccggtggtctcaaagatgtagaacgcagcgtgtgcccacgctcagcaggtgtgccatccttccacctgctggggcaccattcttagtatacagaggtggccttacacacatcttgcatggatggcagcattgttctgaaggggtttgcagaaaaaaaagattttctttacataaagtgaatcaaatttgacattattttagatcccagagaaatcaggtgtgattagttctccaggcatgaatgcatcgtccctttatctgtaagaacccttagtgtcctgtagggggacagaatggggtggccaggtggtgatttctctttgaccaatgcatagtttggcagaaaaatcagccgttcatttagaagaatcttagcagagattgggatgccttactcaataaagctaagatgactatgctgctggctgtctttgttcttggagaggtggagtgactgttcacggagaatgcacggcatggggatgaaccctttccctctgcttttgagccctgttctgggctccaaggtgctgtatgatctaggccgtgctggccaggagacaatcctatggggatggcagtggtgtcttgtgctctgtcccctagagcagtcactggccacaggtagccacctgcctttctcccggcttccctagcagagtttgctcaggcacaaatgtgcacctggagcatttgaaatgtgctagtgaggctgaggaagagaattttaaatttcattgaattgtaatcagtttaaagttaaatagcagcagctgccatgaggctcaggcagatccagctcatcttcccctctgccccctcctccctatcttcccctctaccctctcctgcctcctgtcacatccggttaggctcccatctcactgatgtgtctcctgcagtggtctctcccctgccctgcttccagccccagagtcctggagcagcagcctcctcacgggtcttgccgcccacatggttggatcctgaaactcgcagggcctcccccaactgcccctgcccacccccagcccggccccatcaccctccaattcctaaccgc

SEQ ID NO: 7273 - protein, 489 aa, Homo sapiens; identical to SEQ ID NO: 7269

SEQ ID NO: 7274 - DNA, 1082 bp, Homo sapiens
aggattcactactgccatcctcaccaacacctggctggacgaccgtgctgagagagatggcctggcccagctgatgtgtgagctgaagatgcactttgacttcctgatagagtcgtgtcaggtgggaatggtcaaacctgaacctcagatctacaagtttctgctggacaccctgaaggccagccccagtgaggtacggagacatttgacattattttagatcccagagaaatcaggtgtgattagttctccaggcatgaatgcatcgtccctttatctgtaagaacccttagtgtcctgtagggggacagaatggggtggccaggtggtgatttctctttgaccaatgcatagtttggcagaaaaatcagccgttcatttagaagaatcttagcagagattgggatgccttactcaataaagctaagatgactatgctgctggctgtctttgttcttggagaggtggagtgactgttcacggagaatgcacggcatggggatgaaccctttccctctgcttttgagccctgttctgggctccaaggtgctgtatgatctaggccgtgctggccaggagacaatcctatggggatggcagtggtgtcttgtgctctgtcccctagagcagtcactggccacaggtagccacctgcctttctcccggcttccctagcagagtttgctcaggcacaaatgtgcacctggagcatttgaaatgtgctagtgaggctgaggaagagaattttaaatttcattgaattgtaatcagtttaaagttaaatagcagcagctgccatgaggctcaggcagatccagctcatcttcccctctgccccctcctccctatcttcccctctaccctctcctgcctcctgtcacatccggttaggctcccatctcactgatgtgtctcctgcagtggtctctcccctgccctgcttccagccccagagtcctggagcagcagcctcctcacgggtcttgccgcccacatggttggatcctgaaactcgcagggcctcccccaactgcccctgcccacccccagcccggccccatcaccctccaattcctaaccgc

SEQ ID NO: 7275 - protein, 48 aa, Homo sapiens
MCELKMHFDFLIESCQVGMVKPEPQIYKFLLDTLKASPSEVRRHLTLF

SEQ ID NO: 7276 - DNA, 3075 bp, Homo sapiens
tgattgccactgaatcctaaactgggttgataatagatctttctgtgttctggctttatggacatttttcttaacacagaaaaaaaatgagatgggaaaggacatgcgtttgctgggctactcagctgagtcaatatgaagctgtgagcctcagtatccacagcttcatgatgagatgataaagctcaagagtgagctgtttagttgggatctgtgctagaacacaggcgaactaggatcgtttttgatcagacataagtgtgaaacatttctcagtgtaaggtagatcaaatttaatgtcaacttttgccaagtgctgaaggaaagactatggaacaaactctgataaacactgtagtctgtgagagggtctgccagatgcccacctaatgttttcttgagcaaaatagcttgttgggaattatgaataaaactttctgtggggccaggtgtggtggctcatgcctgtaatcccagcactttgggaggccaaggcaggaggatcacttaatgccaggagttcgagaccagcctgggcaacatagtgagaccccccatctctaaaattagctggggtggtggtatgcatctgtggtcccagctacttgggagactgaggtgggaggatcgctagagcccaggagtttgaggctgcagtgagctatgatcatgcccctgccctccagcctgggcaacaaagtgagaccatgtcccccacactgcccaaaaaagaaacttccagtgtggggcacagcttggagtcatctaacatacagccaagtggaattgttccacgtgaatttctataatgtgactctgattgttctcctgcatttcctttaggatcgtggagatatgtaattggggtaagaacagggcactttgattatttggttcatttggctggaccccaccataacagtcaaggctggttagtggctataacaaacaccctgtccctttcagtggcttcacaccaagtgtatttctcgcctacagcacagtgcagtgttgtgggctctgtccacacagccattcaagcaaccagactccttctctctgctgcctccaccttcctcgaggcccatgtcattcaggcagagataggcaaagggagggaggccacgcacaggaggttcctgtgacccccggatgtagcacctttcctctgcttgggagacactggccggagctcacttgtgcgtccacaccgactgtaggagggggaggtgctctgcgagatgctaccatgtgtctggaagaagatgggaacacagactttgtcaagccctcacagtctctgccacacccgtagcccccaaaaagactatgggtgtggcaaagcttgaacagatttcatatttaagaagtaaacagctcttaatgaaacacttatagtattgagacagccaggtgggagggggtccccagagaaactccaaacagcctgtgcactggggtggagcctcaggaagttcttgccctttgcagcagggaggagcctggcccctcctcctcctgtgtggaaactgggattccaacagcgaggcgggaagtgctgtggcagggaactctggccttgcagagagtccctgttccccgtttttttccttttcaccaagaaaaccctgctctttactcatgcttcaaactgcgagcctatattttcatgaccttgggaacaagaaccccgtcttcagctgaactaaggaaaagtcttgcaacagtattctgcacgtgaccatgaatattaagctctgcacagtatcagccccctgtttaatatactgaaaacacatcacaacagcatcagaaactgtgagagtatgggggccttgtagagaggaaggagaagtgtgttgttttgttttattttgttttccaacatcataatctttgcagaattcttaggttatggtgagagccacctgtttttattgagtaggttggccagggcctcttctcagccattttcatgtaacactggggtctttcactgagaaatctgggtcatgcacaatccagcaacggactgaaacggccctggcattctgcagacgctgtggggcctgggtccactgggcctggtgcttggtcgctgccctctcctctttcccttccacagcccagggtccgtctgcattttgtggagctgggctccggccctgctgtgtgcctctgccatggatttcccgagagttggtattcttggaggtaccagaaatagaagaatattgcatggaagtgttatgtaaggagatggtaaccttcctggataaactggaggactttttgtaaatagcccagaagagcccagcctcagcaggatggtcactgaggaggaaatccagttctatgtgcagcagttcaagaagtctggtttcagaggtcctctaaactggtaccgaaacatggaaaggaactggaagtgggcttgcaaaagcttgggacggaagatcctgattccggccctgatggtcacggcggagaaggacttcgtgctcgttcctcagatgtcccagcacatggaggactggattccccacctgaaaaggggacacattgaggactgtgggcactggacacagatggacaagccaaccgaggtgaatcagatcctcattaagtggctggattctgatgcccggaacccaccggtggtctcaaagatgtagaacgcagcgtgtgcccacgctcagcaggtgtgccatccttccacctgctggggcaccattcttagtatacagaggtggccttacacacatcttgcatggatggcagcattgttctgaaggggtttgcagaaaaaaaagattttctttacataaagtgaatcaaatttgacattattttagatcccagagaaatcaggtgtgattagttctccaggcatgaatgcatcgtccctttatctgtaagaacccttagtgtcctgtagggggacagaatggggtggccaggtggtgatttctctttgaccaatgcatagtttggcagaaaaatcagccgttcatttagaagaatcttagcagagattgggatgccttactcaataaagctaagatgactatgctg

SEQ ID NO: 7277 - protein, 115 aa, Homo sapiens [sequence omitted]

SEQ ID NO: 7278 - DNA, 3717 bp, Homo sapiens
tgattgccactgaatcctaaactgggttgataatagatctttctgtgttctggctttatggacatttttcttaacacagaaaaaaaatgagatgggaaaggacatgcgtttgctgggctactcagctgagtcaatatgaagctgtgagcctcagtatccacagcttcatgatgagatgataaagctcaagagtgagctgtttagttgggatctgtgctagaacacaggcgaactaggatcgtttttgatcagacataagtgtgaaacatttctcagtgtaaggtagatcaaatttaatgtcaacttttgccaagtgctgaaggaaagactatggaacaaactctgataaacactgtagtctgtgagagggtctgccagatgcccacctaatgttttcttgagcaaaatagcttgttgggaattatgaataaaactttctgtggggccaggtgtggtggctcatgcctgtaatcccagcactttgggaggccaaggcaggaggatcacttaatgccaggagttcgagaccagcctgggcaacatagtgagaccccccatctctaaaattagctggggtggtggtatgcatctgtggtcccagctacttgggagactgaggtgggaggatcgctagagcccaggagtttgaggctgcagtgagctatgatcatgcccctgccctccagcctgggcaacaaagtgagaccatgtcccccacactgcccaaaaaagaaacttccagtgtggggcacagcttggagtcatctaacatacagccaagtggaattgttccacgtgaatttctataatgtgactctgattgttctcctgcatttcctttaggatcgtggagatatgtaattggggtaagaacagggcactttgattatttggttcatttggctggaccccaccataacagtcaaggctggttagtggctataacaaacaccctgtccctttcagtggcttcacaccaagtgtatttctcgcctacagcacagtgcagtgttgtgggctctgtccacacagccattcaagcaaccagactccttctctctgctgcctccaccttcctcgaggcccatgtcattcaggcagagataggcaaagggagggaggccacgcacaggaggttcctgtgacccccggatgtagcacctttcctctgcttgggagacactggccggagctcacttgtgcgtccacaccgactgtaggagggggaggtgctctgcgagatgctaccatgtgtctggaagaagatgggaacacagactttgtcaagccctcacagtctctgccacacccgtagcccccaaaaagactatgggtgtggcaaagcttgaacagatttcatatttaagaagtaaacagctcttaatgaaacacttatagtattgagacagccaggtgggagggggtccccagagaaactccaaacagcctgtgcactggggtggagcctcaggaagttcttgccctttgcagcagggaggagcctggcccctcctcctcctgtgtggaaactgggattccaacagcgaggcgggaagtgctgtggcagggaactctggccttgcagagagtccctgttccccgtttttttccttttcaccaagaaaaccctgctctttactcatgcttcaaactgcgagcctatattttcatgaccttgggaacaagaaccccgtcttcagctgaactaaggaaaagtcttgcaacagtattctgcacgtgaccatgaatattaagctctgcacagtatcagccccctgtttaatatactgaaaacacatcacaacagcatcagaaactgtgagagtatgggggccttgtagagaggaaggagaagtgtgttgttttgttttattttgttttccaacatcataatctttgcagaattcttaggttatggtgagagccacctgtttttattgagtaggttggccagggcctcttctcagccattttcatgtaacactggggtctttcactgagaaatctgggtcatgcacaatccagcaacggactgaaacggccctggcattctgcagacgctgtggggcctgggtccactgggcctggtgcttggtcgctgccctctcctctttcccttccacagcccagggtccgtctgcattttgtggagctgggctccggccctgctgtgtgcctctgccatggatttcccgagagttggtattcttggaggtaccagaaatagaagaatattgcatggaagtgttatgtaaggagatggtaaccttcctggataaactggaggactttttgtaaatagcccagaagagcccagcctcagcaggatggtcactgaggaggaaatccagttctatgtgcagcagttcaagaagtctggtttcagaggtcctctaaactggtaccgaaacatggaaaggaactggaagtgggcttgcaaaagcttgggacggaagatcctgattccggccctgatggtcacggcggagaaggacttcgtgctcgttcctcagatgtcccagcacatggaggactggattccccacctgaaaaggggacacattgaggactgtgggcactggacacagatggacaagccaaccgaggtgaatcagatcctcattaagtggctggattctgatgcccggaacccaccggtggtctcaaagatgtagaacgcagcgtgtgcccacgctcagcaggtgtgccatccttccacctgctggggcaccattcttagtatacagaggtggccttacacacatcttgcatggatggcagcattgttctgaaggggtttgcagaaaaaaaagattttctttacataaagtgaatcaaatttgacattattttagatcccagagaaatcaggtgtgattagttctccaggcatgaatgcatcgtccctttatctgtaagaacccttagtgtcctgtagggggacagaatggggtggccaggtggtgatttctctttgaccaatgcatagtttggcagaaaaatcagccgttcatttagaagaatcttagcagagattgggatgccttactcaataaagctaagatgactatgctgctggctgtctttgttcttggagaggtggagtgactgttcacggagaatgcacggcatggggatgaaccctttccctctgcttttgagccctgttctgggctccaaggtgctgtatgatctaggccgtgctggccaggagacaatcctatggggatggcagtggtgtcttgtgctctgtcccctagagcagtcactggccacaggtagccacctgcctttctcccggcttccctagcagagtttgctcaggcacaaatgtgcacctggagcatttgaaatgtgctagtgaggctgaggaagagaattttaaatttcattgaattgtaatcagtttaaagttaaatagcagcagctgccatgaggctcaggcagatccagctcatcttcccctctgccccctcctccctatcttcccctctaccctctcctgcctcctgtcacatccggttaggctcccatctcactgatgtgtctcctgcagtggtctctcccctgccctgcttccagccccagagtcctggagcagcagcctcctcacgggtcttgccgcccacatggttggatcctgaaactcgcagggcctcccccaactgcccctgcccacccccagcccggccccatcaccctccaattcctaaccgc

SEQ ID NO: 7279 - protein, 115 aa, Homo sapiens [sequence omitted]

SEQ ID NO: 7280 - DNA, 440 bp, Homo sapiens
caagtaggcaaaggcacttcccatccctggccctcagtttcctcatctgcaaaaggttggttttgggtggttttcaaacaggtaatagcttcaaacttaagctgattccaggtcagcaaataaagccaataacatggagaacagctcttggatgtatagtgggtgctgggagttcctccttcctgccacctcctaacccgctccctccctggccaggaggaggcatttctgacatctcctccttctccctaggagcactgaggctgttccagacccatgcagcctaaggaagactccttctgtgctgtgggtgcacccgtctcccccacttatttttttattattattattatttgagacagaaatctcttgaacctgggagatggaggttgcagtgagctgacatcgcagtactgcactccagcctgagcaaaaaaaaa

SEQ ID NO: 7281 - protein, 46 aa, Homo sapiens
HLLLLPRSTEAVPDPCSLRKTPSVLWVHPSPPLIFLLLLLFETEIS

SEQ ID NO: 7282 - DNA, 779 bp, Homo sapiens
tggcctgggggatactcacaccccattatgccccccataccagaacgtacctaggatatcctgtgaaccctgctctctcccacctcacgacactggtcctctttacttgtccttaaaccgcacatgtgtatttttatttctttgaggaagactgggtggcaggcacctgtgtgtgtgtctggaaacatatagcaagctagaggcagatttcaggcaaaaaaaaatgctcttttgggctgggcgtggtgactcacatctataatctcagcagacaggtggatcacctgaggtcaggagtttgacaccagcctggccaacatggtgaaacctcgtctctactaaaaatacaaaagagctgggtgtggtggtgcatgcctgtaatcccagctgctcgggaggctgaggcaggagaatctcttgaacctgggagatggaggttgcagtgagctgacatcgcagtactgcactccagcctgagcaaaaaaaaaaaaaagaaaaagaaaaaagagcccttttatttaagtatttaaccagaagagaaactaaggatcagagagaaaatgtgggaaaagaaaaattgtaggcagaaggttttacctggctgaaaatcatccacaaatgattttctttctcctcaaaacattgagtctctctctctttttttttttttctgctgtgttgcccaggctggcaagagaatctcttgaacccatcttggcagtgagctgagattgcgctactgcacaccagcctgggcaacagagcaagactccatctaa

SEQ ID NO: 7283 - protein, 36 aa, Homo sapiens
MIFFLLKTLSLSLFFFFSAVLPRLARESLEPILAVS

SEQ ID NO: 7284 - DNA, 749 bp, Homo sapiens
cgcaagcagcgaggccattgtgcgtgcatctgtgagcccgataaccatgcaaggggggcaggcagaaagggctcggaacccagcctatgggcttggaggaggtggcaggaggaatattccaggcaaagaatggaacaatgctgccatccatgcaagatgtgtgtaaggccacctctgtatactaagaatggtgccccagcaggtggaaggatggcacacctgctgagcgtgggcacacgctgcgttctacatctttgagaccaccggtgggttccgggcatcagaatccagccacttaatgaggatctgattcacctcggttggcctgggggaaagggagaagtaaaagaaaaaaatagccattcacacttgtctgcacctacccagccaactcgaaggcagaggtgtatcttctgctgccgtcttccctctgagcacccgtgccctctcccggggtgcactgatgacccttgtacagggccattccctcacccagtcctccatgtgctgggacatctgaggaacgagcacgaagtccttctccgccgtgaccatcagggccggaatcaggatctggggggagaacaggaaacagaagtggccagcactccacaaaggaagccctccctcctcctctgaaagacccctgctcgccaccctgctgtggtcctgacgttgtatctgccgaactttgcacaacagactcgtggttattactggagatctttaaaataacagcttcagcagtg

SEQ ID NO: 7285 - protein, 42 aa, Homo sapiens
MEQCCHPCKMCVRPPLYTKNGAPAGGRMAHLLSVGTRCVLHL

SEQ ID NO: 7286 - DNA, 518 bp, Homo sapiens
gtggctttgtgacctaaggaaggcggccatgctaaaatacttaccttggacataagctaagctttaagtttgttgtttataacttcaaagagagacaagggacagtgacttaagaatattctaagctataaatttacatgtggactttgctacacacctgggatgcagccagatgagttttgttccattgcagtacatctgatgaccagaattctatcagagaatgttaatgaacgaaaagcctgagctttaagactgagattggtaccacgggtagtcatggccacctgctggcagcgtagggtactgcagcccagctatggttcagactaaaagccgagaaacgcctgtggtccagggaaaggtatgaagatcatataaaccggcggtggacaggaaatgccacagtcaagaagatgcccctgggatgctgagctcttacaactcgaaatcaacagcttttacaaataaaaccgctgcaaaagcaatagctcttacaaataaaactgataatttgg

SEQ ID NO: 7287 - DNA, 828 bp, Homo sapiens
gttgccgaggctggagtgctttggtgtgaccctggctcactgcaacctccgcctcccggattcaagcagttctcctgcctcagcctcccaagcagccgggatcacaggcgcccgccaccatgctcagctaacttttgtatttttagtacagacggggtttcaccatgttggtcagtctggtctcgaattcctgacctcaagtgatccacccgcctcagcctcccaaagtgctgagattatagtcgtgagccaccgtgcctggccaggtttgcggttactagaatgaggcaaaagttgggagctatttccaaaatggaagactggaagacagaagaatacctatgagtaccttaccttggacataagctaagctttaagtttgttgtttataacttcaaagagagacaagggacagtgacttaagaatattctaagctataaatttacatgtggactttgctacacacctgggatgcagccagatgagttttgttccattgcagtacatctgatgaccagaattctatcagagaatgttaatgaacgaaaagcctgagctttaagactgagattggtaccacgggtagtcatggccacctgctggcagcgtagggtactgcagcccagctatggttcagactaaaagccgagaaacgcctgtggtccagggaaaggtatgaagatcatataaaccggcggtggacaggaaatgccacagtcaagaagatgcccctgggatgctgagctcttacaactcgaaatcaacagcttttacaaataaaaccgctgcaaaagcaatagctcttacaaataaaactgataatttgg

SEQ ID NO: 7288 - protein, 94 aa, Homo sapiens
LPRLECFGVTLAHCNLRLPDSSSSPASASQAAGITGARHHAQLTFVFLVQTGFHHVGQSGLEFLTSSDPPASASQSAEIIVVSHRAWPGLRLLE

SEQ ID NO: 7289 - DNA, 1463 bp, Homo sapiens
aagaaccctaaatttatggagaccgtggcggagaaagcgctgcaggaataccgcaaaaagcaccgggaggagtgagatgtggatgttgcttttgcacctacgggggcatctgagtccagctccccccaagatgagctgcagccccccagagagagctctgcacgtcaccaagtaaccaggccccagcctccaggcccccaactccgcccagcctctccccgctctggatcctgcactctaacactcgactctgctgctcatgggaagaacagaattgctcctgcatgcaactaattcaataaaactgtcttgtgagctgatcgcttggagggtcctctttttatgttgagttgctgcttcccggcatgccttcattttgctatggggggcaggcaggggggatggaaaataagtagaaacaaaaaagcagtggctaagatggtatagggactgtcataccagtgaagaataaaagggtgaagaataaaagggatatgatgacaaggttgatccacttcaagaattgcttgctttcaggaagagagatgtgtttcaacaagccaactaaaatatattgctgcaaatggaagcttttctgttctattataaaactgtcgatgtattctgaccaaggtgcgacaatctcctaaaggaatacactgaaagttaaggagaagaatcagtaagtgtaaggtgtacttggtattataatgcataattgatgttttcgttatgaaaacatttggtgcccagaagtccaaattatcagttttatttgtaagagctattgcttttgcagcggttttatttgtaaaagctgttgatttcgagttgtaagagctcagcatcccaggggcatcttcttgactgtggcatttcctgtccaccgccggtttatatgatcttcatacctttccctggaccacaggcgtttctcggcttttagtctgaaccatagctgggctgcagtaccctacgctgccagcaggtggccatgactacccgtggtaccaatctcagtcttaaagctcaggcttttcgttcattaacattctctgatagaattctggtcatcagatgtactgcaatggaacaaaactcatctggctgcatcccaggtgtgtagcaaagtccacatgtaaatttatagcttagaatattcttaagtcactgtcccttgtctctctttgaagttataaacaacaaacttaaagcttagcttatgtccaaggtaagtattttagcatggctgtcaaggaaattcagagtaaagtcagtgtgattcacttaatgatatacattaattagaattatggggtcagaggtatttgcttaagtgatcataattgtaaagtatatgtcacattgtcacattaatgtcacactgtttcaaaagttactttttcttttccactgttatgttgctagactctggaactcactatattcagtgggttttttgg

SEQ ID NO: 7290 - protein, 51 aa, Homo sapiens
MMTRLIHFKNCLLSGREMCFNKPTKIYCCKWKLFCSIIKLSMYSDQGATIS

SEQ ID NO: 7291 - DNA, 1502 bp, Homo sapiens
gatcccatcactgtgacggtccctgtagaagtctccaggaagaaccctaaatttatggagaccgtggcggagaaagcgctgcaggaataccgcaaaaagcaccgggaggagtgagatgtggatgttgcttttgcacctacgggggcatctgagtccagctccccccaagatgagctgcagccccccagagagagctctgcacgtcaccaagtaaccaggccccagcctccaggcccccaactccgcccagcctctccccgctctggatcctgcactctaacactcgactctgctgctcatgggaagaacagaattgctcctgcatgcaactaattcaataaaactgtcttgtgagctgatcgcttggagggtcctctttttatgttgagttgctgcttcccggcatgccttcattttgctatggggggcaggcaggggggatggaaaataagtagaaacaaaaaagcagtggctaagatggtatagggactgtcataccagtgaagaataaaagggtgaagaataaaagggatatgatgacaaggttgatccacttcaagaattgcttgctttcaggaagagagatgtgtttcaacaagccaactaaaatatattgctgcaaatggaagcttttctgttctattataaaactgtcgatgtattctgaccaaggtgcgacaatctcctaaaggaatacactgaaagttaaggagaagaatcagtaagtgtaaggtgtacttggtattataatgcataattgatgttttcgttatgaaaacatttggtgcccagaagtccaaattatcagttttatttgtaagagctattgcttttgcagcggttttatttgtaaaagctgttgatttcgagttgtaagagctcagcatcccaggggcatcttcttgactgtggcatttcctgtccaccgccggtttatatgatcttcatacctttccctggaccacaggcgtttctcggcttttagtctgaaccatagctgggctgcagtaccctacgctgccagcaggtggccatgactacccgtggtaccaatctcagtcttaaagctcaggcttttcgttcattaacattctctgatagaattctggtcatcagatgtactgcaatggaacaaaactcatctggctgcatcccaggtgtgtagcaaagtccacatgtaaatttatagcttagaatattcttaagtcactgtcccttgtctctctttgaagttataaacaacaaacttaaagcttagcttatgtccaaggtaagtattttagcatggctgtcaaggaaattcagagtaaagtcagtgtgattcacttaatgatatacattaattagaattatggggtcagaggtatttgcttaagtgatcataattgtaaagtatatgtcacattgtcacattaatgtcacactgtttcaaaagttactttttcttttccactgttatgttgctagactctggaactcactatattcagtgggttttttgg

SEQ ID NO: 7292 - protein, 51 aa, Homo sapiens; identical to SEQ ID NO: 7290

SEQ ID NO: 7293 - DNA, 1554 bp, Homo sapiens
ctcggacgttccttccggtgtcactgaggtggtcgtgaagctctttgactctgatcccatcactgtgacggtccctgtagaagtctccaggaagaaccctaaatttatggagaccgtggcggagaaagcgctgcaggaataccgcaaaaagcaccgggaggagtgagatgtggatgttgcttttgcacctacgggggcatctgagtccagctccccccaagatgagctgcagccccccagagagagctctgcacgtcaccaagtaaccaggccccagcctccaggcccccaactccgcccagcctctccccgctctggatcctgcactctaacactcgactctgctgctcatgggaagaacagaattgctcctgcatgcaactaattcaataaaactgtcttgtgagctgatcgcttggagggtcctctttttatgttgagttgctgcttcccggcatgccttcattttgctatggggggcaggcaggggggatggaaaataagtagaaacaaaaaagcagtggctaagatggtatagggactgtcataccagtgaagaataaaagggtgaagaataaaagggatatgatgacaaggttgatccacttcaagaattgcttgctttcaggaagagagatgtgtttcaacaagccaactaaaatatattgctgcaaatggaagcttttctgttctattataaaactgtcgatgtattctgaccaaggtgcgacaatctcctaaaggaatacactgaaagttaaggagaagaatcagtaagtgtaaggtgtacttggtattataatgcataattgatgttttcgttatgaaaacatttggtgcccagaagtccaaattatcagttttatttgtaagagctattgcttttgcagcggttttatttgtaaaagctgttgatttcgagttgtaagagctcagcatcccaggggcatcttcttgactgtggcatttcctgtccaccgccggtttatatgatcttcatacctttccctggaccacaggcgtttctcggcttttagtctgaaccatagctgggctgcagtaccctacgctgccagcaggtggccatgactacccgtggtaccaatctcagtcttaaagctcaggcttttcgttcattaacattctctgatagaattctggtcatcagatgtactgcaatggaacaaaactcatctggctgcatcccaggtgtgtagcaaagtccacatgtaaatttatagcttagaatattcttaagtcactgtcccttgtctctctttgaagttataaacaacaaacttaaagcttagcttatgtccaaggtaagtattttagcatggctgtcaaggaaattcagagtaaagtcagtgtgattcacttaatgatatacattaattagaattatggggtcagaggtatttgcttaagtgatcataattgtaaagtatatgtcacattgtcacattaatgtcacactgtttcaaaagttactttttcttttccactgttatgttgctagactctggaactcactatattcagtgggttttttgg

SEQ ID NO: 7294 - protein, 51 aa, Homo sapiens; identical to SEQ ID NO: 7290

SEQ ID NO: 7295 - DNA, 1744 bp, Homo sapiens
gtccactgagctgtacttacgtctagatgtataagaagcatggggtcagctctctaggtttccttggagaagcaggaggacttccttatcagaagcctgacttctgttgcagagcgcatgcattttgaccacagtgtttcagctcttcccttttctcttgttccatttaggtggcttcccacacttctgactcggacgttccttccggtgtcactgaggtggtcgtgaagctctttgactctgatcccatcactgtgacggtccctgtagaagtctccaggaagaaccctaaatttatggagaccgtggcggagaaagcgctgcaggaataccgcaaaaagcaccgggaggagtgagatgtggatgttgcttttgcacctacgggggcatctgagtccagctccccccaagatgagctgcagccccccagagagagctctgcacgtcaccaagtaaccaggccccagcctccaggcccccaactccgcccagcctctccccgctctggatcctgcactctaacactcgactctgctgctcatgggaagaacagaattgctcctgcatgcaactaattcaataaaactgtcttgtgagctgatcgcttggagggtcctctttttatgttgagttgctgcttcccggcatgccttcattttgctatggggggcaggcaggggggatggaaaataagtagaaacaaaaaagcagtggctaagatggtatagggactgtcataccagtgaagaataaaagggtgaagaataaaagggatatgatgacaaggttgatccacttcaagaattgcttgctttcaggaagagagatgtgtttcaacaagccaactaaaatatattgctgcaaatggaagcttttctgttctattataaaactgtcgatgtattctgaccaaggtgcgacaatctcctaaaggaatacactgaaagttaaggagaagaatcagtaagtgtaaggtgtacttggtattataatgcataattgatgttttcgttatgaaaacatttggtgcccagaagtccaaattatcagttttatttgtaagagctattgcttttgcagcggttttatttgtaaaagctgttgatttcgagttgtaagagctcagcatcccaggggcatcttcttgactgtggcatttcctgtccaccgccggtttatatgatcttcatacctttccctggaccacaggcgtttctcggcttttagtctgaaccatagctgggctgcagtaccctacgctgccagcaggtggccatgactacccgtggtaccaatctcagtcttaaagctcaggcttttcgttcattaacattctctgatagaattctggtcatcagatgtactgcaatggaacaaaactcatctggctgcatcccaggtgtgtagcaaagtccacatgtaaatttatagcttagaatattcttaagtcactgtcccttgtctctctttgaagttataaacaacaaacttaaagcttagcttatgtccaaggtaagtattttagcatggctgtcaaggaaattcagagtaaagtcagtgtgattcacttaatgatatacattaattagaattatggggtcagaggtatttgcttaagtgatcataattgtaaagtatatgtcacattgtcacattaatgtcacactgtttcaaaagttactttttcttttccactgttatgttgctagactctggaactcactatattcagtgggttttttgg

SEQ ID NO: 7296 - protein, 51 aa, Homo sapiens; identical to SEQ ID NO: 7290

SEQ ID NO: 7297 - DNA, 1967 bp, Homo sapiens
aaaaaatcaaataaaacttatttctagtactgggaactcttctttttcttttctttcttccctccaggccctctggattccttttctaccctactctgaccaagggctgcttctaaagcaaatgtttggaaaccacttttattctttggggtgctccctgggctggtcatttgcagatgacatttgccccaacacatgagtgtctgtgaaccaggtccgttctgtccactgagctgtacttacgtctagatgtataagaagcatggggtcagctctctaggtttccttggagaagcaggaggacttccttatcagaagcctgacttctgttgcagagcgcatgcattttgaccacagtgtttcagctcttcccttttctcttgttccatttaggtggcttcccacacttctgactcggacgttccttccggtgtcactgaggtggtcgtgaagctctttgactctgatcccatcactgtgacggtccctgtagaagtctccaggaagaaccctaaatttatggagaccgtggcggagaaagcgctgcaggaataccgcaaaaagcaccgggaggagtgagatgtggatgttgcttttgcacctacgggggcatctgagtccagctccccccaagatgagctgcagccccccagagagagctctgcacgtcaccaagtaaccaggccccagcctccaggcccccaactccgcccagcctctccccgctctggatcctgcactctaacactcgactctgctgctcatgggaagaacagaattgctcctgcatgcaactaattcaataaaactgtcttgtgagctgatcgcttggagggtcctctttttatgttgagttgctgcttcccggcatgccttcattttgctatggggggcaggcaggggggatggaaaataagtagaaacaaaaaagcagtggctaagatggtatagggactgtcataccagtgaagaataaaagggtgaagaataaaagggatatgatgacaaggttgatccacttcaagaattgcttgctttcaggaagagagatgtgtttcaacaagccaactaaaatatattgctgcaaatggaagcttttctgttctattataaaactgtcgatgtattctgaccaaggtgcgacaatctcctaaaggaatacactgaaagttaaggagaagaatcagtaagtgtaaggtgtacttggtattataatgcataattgatgttttcgttatgaaaacatttggtgcccagaagtccaaattatcagttttatttgtaagagctattgcttttgcagcggttttatttgtaaaagctgttgatttcgagttgtaagagctcagcatcccaggggcatcttcttgactgtggcatttcctgtccaccgccggtttatatgatcttcatacctttccctggaccacaggcgtttctcggcttttagtctgaaccatagctgggctgcagtaccctacgctgccagcaggtggccatgactacccgtggtaccaatctcagtcttaaagctcaggcttttcgttcattaacattctctgatagaattctggtcatcagatgtactgcaatggaacaaaactcatctggctgcatcccaggtgtgtagcaaagtccacatgtaaatttatagcttagaatattcttaagtcactgtcccttgtctctctttgaagttataaacaacaaacttaaagcttagcttatgtccaaggtaagtattttagcatggctgtcaaggaaattcagagtaaagtcagtgtgattcacttaatgatatacattaattagaattatggggtcagaggtatttgcttaagtgatcataattgtaaagtatatgtcacattgtcacattaatgtcacactgtttcaaaagttactttttcttttccactgttatgttgctagactctggaactcactatattcagtgggttttttgg

SEQ ID NO: 7298 - protein, 51 aa, Homo sapiens; identical to SEQ ID NO: 7290

SEQ ID NO: 7299 - DNA, 1805 bp, Homo sapiens
gactgttccaccaacaacccctcccaggctaagctgcggcgggagctcgacgaatccctccaggtcgctgagaggttgaccaggaaatacaacgagctgctaaagtcctaccagtggaagatgctcaacacctcctccttgctggagcagctgaacgagcagtttaactgggtgtcccggctggcaaacctcacgcaaggcgaagaccagtactatctgcgggtcaccacggtggcttcccacacttctgactcggacgttccttccggtgtcactgaggtggtcgtgaagctctttgactctgatcccatcactgtgacggtccctgtagaagtctccaggaagaaccctaaatttatggagaccgtggcggagaaagcgctgcaggaataccgcaaaaagcaccgggaggagtgagatgtggatgttgcttttgcacctacgggggcatctgagtccagctccccccaagatgagctgcagccccccagagagagctctgcacgtcaccaagtaaccaggccccagcctccaggcccccaactccgcccagcctctccccgctctggatcctgcactctaacactcgactctgctgctcatgggaagaacagaattgctcctgcatgcaactaattcaataaaactgtcttgtgagctgatcgcttggagggtcctctttttatgttgagttgctgcttcccggcatgccttcattttgctatggggggcaggcaggggggatggaaaataagtagaaacaaaaaagcagtggctaagatggtatagggactgtcataccagtgaagaataaaagggtgaagaataaaagggatatgatgacaaggttgatccacttcaagaattgcttgctttcaggaagagagatgtgtttcaacaagccaactaaaatatattgctgcaaatggaagcttttctgttctattataaaactgtcgatgtattctgaccaaggtgcgacaatctcctaaaggaatacactgaaagttaaggagaagaatcagtaagtgtaaggtgtacttggtattataatgcataattgatgttttcgttatgaaaacatttggtgcccagaagtccaaattatcagttttatttgtaagagctattgcttttgcagcggttttatttgtaaaagctgttgatttcgagttgtaagagctcagcatcccaggggcatcttcttgactgtggcatttcctgtccaccgccggtttatatgatcttcatacctttccctggaccacaggcgtttctcggcttttagtctgaaccatagctgggctgcagtaccctacgctgccagcaggtggccatgactacccgtggtaccaatctcagtcttaaagctcaggcttttcgttcattaacattctctgatagaattctggtcatcagatgtactgcaatggaacaaaactcatctggctgcatcccaggtgtgtagcaaagtccacatgtaaatttatagcttagaatattcttaagtcactgtcccttgtctctctttgaagttataaacaacaaacttaaagcttagcttatgtccaaggtaagtattttagcatggctgtcaaggaaattcagagtaaagtcagtgtgattcacttaatgatatacattaattagaattatggggtcagaggtatttgcttaagtgatcataattgtaaagtatatgtcacattgtcacattaatgtcacactgtttcaaaagttactttttcttttccactgttatgttgctagactctggaactcactatattcagtgggttttttgg

SEQ ID NO: 7300 - protein, 98 aa, Homo sapiens
MLNTSSLLEQLNEQFNWVSRLANLTQGEDQYYLRVTTVASHTSDSDVPSGVTEVVVKLFDSDPITVTVPVEVSRKNPKFMETVAEKALQEYRKKHREE

SEQ ID NO: 7301 - DNA, 2312 bp, Homo sapiens
ttcctgaaccagagctcgcccttctacttctggatgaatggtgaccgcatcgactccctgctggagaacgaccggcagcagacgcacatgctggatgtcatgcaggaccacttcagccgcgcgtccagcatcatagacgagctcttccaggacaggttcttcacccgggagccccaggatacctaccactacctgcccttcagcctgccccaccggaggcctcacttcttctttcccaagtcccgcatcgtccgcagcttgatgcccttctctccgtacgagcccctgaacttccacgccatgttccagcccttccttgagatgatacacgaggctcagcaggccatggacatccacttccatagcccggccttccagcacccgccaacagaattcatacgagaaggcgacgatgaccggactgtgtgccgggagatccgccacaactccacgggctgcctgcggatgaaggaccagtgtgacaagtgccgggagatcttgtctgtggactgttccaccaacaacccctcccaggctaagctgcggcgggagctcgacgaatccctccaggtcgctgagaggttgaccaggaaatacaacgagctgctaaagtcctaccagtggaagatgctcaacacctcctccttgctggagcagctgaacgagcagtttaactgggtgtcccggctggcaaacctcacgcaaggcgaagaccagtactatctgcgggtcaccacggtggcttcccacacttctgactcggacgttccttccggtgtcactgaggtggtcgtgaagctctttgactctgatcccatcactgtgacggtccctgtagaagtctccaggaagaaccctaaatttatggagaccgtggcggagaaagcgctgcaggaataccgcaaaaagcaccgggaggagtgagatgtggatgttgcttttgcacctacgggggcatctgagtccagctccccccaagatgagctgcagccccccagagagagctctgcacgtcaccaagtaaccaggccccagcctccaggcccccaactccgcccagcctctccccgctctggatcctgcactctaacactcgactctgctgctcatgggaagaacagaattgctcctgcatgcaactaattcaataaaactgtcttgtgagctgatcgcttggagggtcctctttttatgttgagttgctgcttcccggcatgccttcattttgctatggggggcaggcaggggggatggaaaataagtagaaacaaaaaagcagtggctaagatggtatagggactgtcataccagtgaagaataaaagggtgaagaataaaagggatatgatgacaaggttgatccacttcaagaattgcttgctttcaggaagagagatgtgtttcaacaagccaactaaaatatattgctgcaaatggaagcttttctgttctattataaaactgtcgatgtattctgaccaaggtgcgacaatctcctaaaggaatacactgaaagttaaggagaagaatcagtaagtgtaaggtgtacttggtattataatgcataattgatgttttcgttatgaaaacatttggtgcccagaagtccaaattatcagttttatttgtaagagctattgcttttgcagcggttttatttgtaaaagctgttgatttcgagttgtaagagctcagcatcccaggggcatcttcttgactgtggcatttcctgtccaccgccggtttatatgatcttcatacctttccctggaccacaggcgtttctcggcttttagtctgaaccatagctgggctgcagtaccctacgctgccagcaggtggccatgactacccgtggtaccaatctcagtcttaaagctcaggcttttcgttcattaacattctctgatagaattctggtcatcagatgtactgcaatggaacaaaactcatctggctgcatcccaggtgtgtagcaaagtccacatgtaaatttatagcttagaatattcttaagtcactgtcccttgtctctctttgaagttataaacaacaaacttaaagcttagcttatgtccaaggtaagtattttagcatggctgtcaaggaaattcagagtaaagtcagtgtgattcacttaatgatatacattaattagaattatggggtcagaggtatttgcttaagtgatcataattgtaaagtatatgtcacattgtcacattaatgtcacactgtttcaaaagttactttttcttttccactgttatgttgctagactctggaactcactatattcagtgggttttttgg

SEQ ID NO: 7302 - protein, 296 aa, Homo sapiens [sequence omitted]

SEQ ID NO: 7303 - DNA, 2325 bp, Homo sapiens
ccagcttgaggagttcctgaaccagagctcgcccttctacttctggatgaatggtgaccgcatcgactccctgctggagaacgaccggcagcagacgcacatgctggatgtcatgcaggaccacttcagccgcgcgtccagcatcatagacgagctcttccaggacaggttcttcacccgggagccccaggatacctaccactacctgcccttcagcctgccccaccggaggcctcacttcttctttcccaagtcccgcatcgtccgcagcttgatgcccttctctccgtacgagcccctgaacttccacgccatgttccagcccttccttgagatgatacacgaggctcagcaggccatggacatccacttccatagcccggccttccagcacccgccaacagaattcatacgagaaggcgacgatgaccggactgtgtgccgggagatccgccacaactccacgggctgcctgcggatgaaggaccagtgtgacaagtgccgggagatcttgtctgtggactgttccaccaacaacccctcccaggctaagctgcggcgggagctcgacgaatccctccaggtcgctgagaggttgaccaggaaatacaacgagctgctaaagtcctaccagtggaagatgctcaacacctcctccttgctggagcagctgaacgagcagtttaactgggtgtcccggctggcaaacctcacgcaaggcgaagaccagtactatctgcgggtcaccacggtggcttcccacacttctgactcggacgttccttccggtgtcactgaggtggtcgtgaagctctttgactctgatcccatcactgtgacggtccctgtagaagtctccaggaagaaccctaaatttatggagaccgtggcggagaaagcgctgcaggaataccgcaaaaagcaccgggaggagtgagatgtggatgttgcttttgcacctacgggggcatctgagtccagctccccccaagatgagctgcagccccccagagagagctctgcacgtcaccaagtaaccaggccccagcctccaggcccccaactccgcccagcctctccccgctctggatcctgcactctaacactcgactctgctgctcatgggaagaacagaattgctcctgcatgcaactaattcaataaaactgtcttgtgagctgatcgcttggagggtcctctttttatgttgagttgctgcttcccggcatgccttcattttgctatggggggcaggcaggggggatggaaaataagtagaaacaaaaaagcagtggctaagatggtatagggactgtcataccagtgaagaataaaagggtgaagaataaaagggatatgatgacaaggttgatccacttcaagaattgcttgctttcaggaagagagatgtgtttcaacaagccaactaaaatatattgctgcaaatggaagcttttctgttctattataaaactgtcgatgtattctgaccaaggtgcgacaatctcctaaaggaatacactgaaagttaaggagaagaatcagtaagtgtaaggtgtacttggtattataatgcataattgatgttttcgttatgaaaacatttggtgcccagaagtccaaattatcagttttatttgtaagagctattgcttttgcagcggttttatttgtaaaagctgttgatttcgagttgtaagagctcagcatcccaggggcatcttcttgactgtggcatttcctgtccaccgccggtttatatgatcttcatacctttccctggaccacaggcgtttctcggcttttagtctgaaccatagctgggctgcagtaccctacgctgccagcaggtggccatgactacccgtggtaccaatctcagtcttaaagctcaggcttttcgttcattaacattctctgatagaattctggtcatcagatgtactgcaatggaacaaaactcatctggctgcatcccaggtgtgtagcaaagtccacatgtaaatttatagcttagaatattcttaagtcactgtcccttgtctctctttgaagttataaacaacaaacttaaagcttagcttatgtccaaggtaagtattttagcatggctgtcaaggaaattcagagtaaagtcagtgtgattcacttaatgatatacattaattagaattatggggtcagaggtatttgcttaagtgatcataattgtaaagtatatgtcacattgtcacattaatgtcacactgtttcaaaagttactttttcttttccactgttatgttgctagactctggaactcactatattcagtgggttttttgg

SEQ ID NO: 7304 - protein, 296 aa, Homo sapiens [sequence omitted]

SEQ ID NO: 7305 - DNA, 1728 bp, Homo sapiens
gtccaatcagggaagtaagtacgtcaataaggaaattcaaaatatgctcaacacctcctccttgctggagcagctgaacgagcagtttaactgggtgtcccggctggcaaacctcacgcaaggcgaagaccagtactatctgcgggtcaccacggtggcttcccacacttctgactcggacgttccttccggtgtcactgaggtggtcgtgaagctctttgactctgatcccatcactgtgacggtccctgtagaagtctccaggaagaaccctaaatttatggagaccgtggcggagaaagcgctgcaggaataccgcaaaaagcaccgggaggagtgagatgtggatgttgcttttgcacctacgggggcatctgagtccagctccccccaagatgagctgcagccccccagagagagctctgcacgtcaccaagtaaccaggccccagcctccaggcccccaactccgcccagcctctccccgctctggatcctgcactctaacactcgactctgctgctcatgggaagaacagaattgctcctgcatgcaactaattcaataaaactgtcttgtgagctgatcgcttggagggtcctctttttatgttgagttgctgcttcccggcatgccttcattttgctatggggggcaggcaggggggatggaaaataagtagaaacaaaaaagcagtggctaagatggtatagggactgtcataccagtgaagaataaaagggtgaagaataaaagggatatgatgacaaggttgatccacttcaagaattgcttgctttcaggaagagagatgtgtttcaacaagccaactaaaatatattgctgcaaatggaagcttttctgttctattataaaactgtcgatgtattctgaccaaggtgcgacaatctcctaaaggaatacactgaaagttaaggagaagaatcagtaagtgtaaggtgtacttggtattataatgcataattgatgttttcgttatgaaaacatttggtgcccagaagtccaaattatcagttttatttgtaagagctattgcttttgcagcggttttatttgtaaaagctgttgatttcgagttgtaagagctcagcatcccaggggcatcttcttgactgtggcatttcctgtccaccgccggtttatatgatcttcatacctttccctggaccacaggcgtttctcggcttttagtctgaaccatagctgggctgcagtaccctacgctgccagcaggtggccatgactacccgtggtaccaatctcagtcttaaagctcaggcttttcgttcattaacattctctgatagaattctggtcatcagatgtactgcaatggaacaaaactcatctggctgcatcccaggtgtgtagcaaagtccacatgtaaatttatagcttagaatattcttaagtcactgtcccttgtctctctttgaagttataaacaacaaacttaaagcttagcttatgtccaaggtaagtattttagcatggctgtcaaggaaattcagagtaaagtcagtgtgattcacttaatgatatacattaattagaattatggggtcagaggtatttgcttaagtgatcataattgtaaagtatatgtcacattgtcacattaatgtcacactgtttcaaaagttactttttcttttccactgttatgttgctagactctggaactcactatattcagtgggttttttgg

SEQ ID NO: 7306 - protein, 98 aa, Homo sapiens; identical to SEQ ID NO: 7300

SEQ ID NO: 7307 - DNA, 1398 bp, Homo sapiens
aagaaccctaaatttatggagaccgtggcggagaaagcgctgcaggaataccgcaaaaagcaccgggaggagtgagatgtggatgttgcttttgcacctacgggggcatctgagtccagctccccccaagatgagctgcagccccccagagagagctctgcacgtcaccaagtaaccaggccccagcctccaggcccccaactccgcccagcctctccccgctctggatcctgcactctaacactcgactctgctgctcatgggaagaacagaattgctcctgcatgcaactaattcaataaaactgtcttgtgagctgatcgcttggagggtcctctttttatgttgagttgctgcttcccggcatgccttcattttgctatggggggcaggcaggggggatggaaaataagtagaaacaaaaaagcagtggctaagatggtatagggactgtcataccagtgaagaataaaagggtgaagaataaaagggatatgatgacaaggttgatccacttcaagaattgcttgctttcaggaagagagatgtgtttcaacaagccaactaaaatatattgctgcaaatggaagcttttctgttctattataaaactgtcgatgtattctgaccaaggtgcgacaatctcctaaaggaatacactgaaagttaaggagaagaatcagtaagtgtaaggtgtacttggtattataatgcataattgatgttttcgttatgaaaacatttggtgcccagaagtccaaattatcagttttatttgtaagagctattgcttttgcagcggttttatttgtaaaagctgttgatttcgagttgtaagagctcagcatcccaggggcatcttcttgactgtggcatttcctgtccaccgccggtttatatgatcttcatacctttccctggaccacaggcgtttctcggcttttagtctgaaccatagctgggctgcagtaccctacgctgccagcaggtggccatgactacccgtggtaccaatctcagtcttaaagctcaggcttttcgttcattaacattctctgatagaattctggtcatcagatgtactgcaatggaacaaaactcatctggctgcatcccaggtgtgtagcaaagtccacatgtaaatttatagcttagaatattcttaagtcactgtcccttgtctctctttgaagttataaacaacaaacttaaagcttagcttatgtccaaggtaagtattttagcatggctgtcaaggaaattcagagtaaagtcagtgtgattcacttaatgatatacattaattagaattatggggtcagaggtatttgcttaagtgatcataattgtaaagtatatgtcacattgtcacattaatgtcacactgtttcaaaagtt

SEQ ID NO: 7308 - protein, 51 aa, Homo sapiens; identical to SEQ ID NO: 7290

SEQ ID NO: 7309 - DNA, 1437 bp, Homo sapiens
gatcccatcactgtgacggtccctgtagaagtctccaggaagaaccctaaatttatggagaccgtggcggagaaagcgctgcaggaataccgcaaaaagcaccgggaggagtgagatgtggatgttgcttttgcacctacgggggcatctgagtccagctccccccaagatgagctgcagccccccagagagagctctgcacgtcaccaagtaaccaggccccagcctccaggcccccaactccgcccagcctctccccgctctggatcctgcactctaacactcgactctgctgctcatgggaagaacagaattgctcctgcatgcaactaattcaataaaactgtcttgtgagctgatcgcttggagggtcctctttttatgttgagttgctgcttcccggcatgccttcattttgctatggggggcaggcaggggggatggaaaataagtagaaacaaaaaagcagtggctaagatggtatagggactgtcataccagtgaagaataaaagggtgaagaataaaagggatatgatgacaaggttgatccacttcaagaattgcttgctttcaggaagagagatgtgtttcaacaagccaactaaaatatattgctgcaaatggaagcttttctgttctattataaaactgtcgatgtattctgaccaaggtgcgacaatctcctaaaggaatacactgaaagttaaggagaagaatcagtaagtgtaaggtgtacttggtattataatgcataattgatgttttcgttatgaaaacatttggtgcccagaagtccaaattatcagttttatttgtaagagctattgcttttgcagcggttttatttgtaaaagctgttgatttcgagttgtaagagctcagcatcccaggggcatcttcttgactgtggcatttcctgtccaccgccggtttatatgatcttcatacctttccctggaccacaggcgtttctcggcttttagtctgaaccatagctgggctgcagtaccctacgctgccagcaggtggccatgactacccgtggtaccaatctcagtcttaaagctcaggcttttcgttcattaacattctctgatagaattctggtcatcagatgtactgcaatggaacaaaactcatctggctgcatcccaggtgtgtagcaaagtccacatgtaaatttatagcttagaatattcttaagtcactgtcccttgtctctctttgaagttataaacaacaaacttaaagcttagcttatgtccaaggtaagtattttagcatggctgtcaaggaaattcagagtaaagtcagtgtgattcacttaatgatatacattaattagaattatggggtcagaggtatttgcttaagtgatcataattgtaaagtatatgtcacattgtcacattaatgtcacactgtttcaaaagtt

SEQ ID NO: 7310 - protein, 51 aa, Homo sapiens; identical to SEQ ID NO: 7290

SEQ ID NO: 7311 - DNA, 1489 bp, Homo sapiens
ctcggacgttccttccggtgtcactgaggtggtcgtgaagctctttgactctgatcccatcactgtgacggtccctgtagaagtctccaggaagaaccctaaatttatggagaccgtggcggagaaagcgctgcaggaataccgcaaaaagcaccgggaggagtgagatgtggatgttgcttttgcacctacgggggcatctgagtccagctccccccaagatgagctgcagccccccagagagagctctgcacgtcaccaagtaaccaggccccagcctccaggcccccaactccgcccagcctctccccgctctggatcctgcactctaacactcgactctgctgctcatgggaagaacagaattgctcctgcatgcaactaattcaataaaactgtcttgtgagctgatcgcttggagggtcctctttttatgttgagttgctgcttcccggcatgccttcattttgctatggggggcaggcaggggggatggaaaataagtagaaacaaaaaagcagtggctaagatggtatagggactgtcataccagtgaagaataaaagggtgaagaataaaagggatatgatgacaaggttgatccacttcaagaattgcttgctttcaggaagagagatgtgtttcaacaagccaactaaaatatattgctgcaaatggaagcttttctgttctattataaaactgtcgatgtattctgaccaaggtgcgacaatctcctaaaggaatacactgaaagttaaggagaagaatcagtaagtgtaaggtgtacttggtattataatgcataattgatgttttcgttatgaaaacatttggtgcccagaagtccaaattatcagttttatttgtaagagctattgcttttgcagcggttttatttgtaaaagctgttgatttcgagttgtaagagctcagcatcccaggggcatcttcttgactgtggcatttcctgtccaccgccggtttatatgatcttcatacctttccctggaccacaggcgtttctcggcttttagtctgaaccatagctgggctgcagtaccctacgctgccagcaggtggccatgactacccgtggtaccaatctcagtcttaaagctcaggcttttcgttcattaacattctctgatagaattctggtcatcagatgtactgcaatggaacaaaactcatctggctgcatcccaggtgtgtagcaaagtccacatgtaaatttatagcttagaatattcttaagtcactgtcccttgtctctctttgaagttataaacaacaaacttaaagcttagcttatgtccaaggtaagtattttagcatggctgtcaaggaaattcagagtaaagtcagtgtgattcacttaatgatatacattaattagaattatggggtcagaggtatttgcttaagtgatcataattgtaaagtatatgtcacattgtcacattaatgtcacactgtttcaaaagtt

SEQ ID NO: 7312 - protein, 51 aa, Homo sapiens; identical to SEQ ID NO: 7290

SEQ ID NO: 7313 - DNA, 1679 bp, Homo sapiens
gtccactgagctgtacttacgtctagatgtataagaagcatggggtcagctctctaggtttccttggagaagcaggaggacttccttatcagaagcctgacttctgttgcagagcgcatgcattttgaccacagtgtttcagctcttcccttttctcttgttccatttaggtggcttcccacacttctgactcggacgttccttccggtgtcactgaggtggtcgtgaagctctttgactctgatcccatcactgtgacggtccctgtagaagtctccaggaagaaccctaaatttatggagaccgtggcggagaaagcgctgcaggaataccgcaaaaagcaccgggaggagtgagatgtggatgttgcttttgcacctacgggggcatctgagtccagctccccccaagatgagctgcagccccccagagagagctctgcacgtcaccaagtaaccaggccccagcctccaggcccccaactccgcccagcctctccccgctctggatcctgcactctaacactcgactctgctgctcatgggaagaacagaattgctcctgcatgcaactaattcaataaaactgtcttgtgagctgatcgcttggagggtcctctttttatgttgagttgctgcttcccggcatgccttcattttgctatggggggcaggcaggggggatggaaaataagtagaaacaaaaaagcagtggctaagatggtatagggactgtcataccagtgaagaataaaagggtgaagaataaaagggatatgatgacaaggttgatccacttcaagaattgcttgctttcaggaagagagatgtgtttcaacaagccaactaaaatatattgctgcaaatggaagcttttctgttctattataaaactgtcgatgtattctgaccaaggtgcgacaatctcctaaaggaatacactgaaagttaaggagaagaatcagtaagtgtaaggtgtacttggtattataatgcataattgatgttttcgttatgaaaacatttggtgcccagaagtccaaattatcagttttatttgtaagagctattgcttttgcagcggttttatttgtaaaagctgttgatttcgagttgtaagagctcagcatcccaggggcatcttcttgactgtggcatttcctgtccaccgccggtttatatgatcttcatacctttccctggaccacaggcgtttctcggcttttagtctgaaccatagctgggctgcagtaccctacgctgccagcaggtggccatgactacccgtggtaccaatctcagtcttaaagctcaggcttttcgttcattaacattctctgatagaattctggtcatcagatgtactgcaatggaacaaaactcatctggctgcatcccaggtgtgtagcaaagtccacatgtaaatttatagcttagaatattcttaagtcactgtcccttgtctctctttgaagttataaacaacaaacttaaagcttagcttatgtccaaggtaagtattttagcatggctgtcaaggaaattcagagtaaagtcagtgtgattcacttaatgatatacattaattagaattatggggtcagaggtatttgcttaagtgatcataattgtaaagtatatgtcacattgtcacattaatgtcacactgtttcaaaagtt

SEQ ID NO: 7314 - protein, 51 aa, Homo sapiens; identical to SEQ ID NO: 7290

SEQ ID NO: 7315 - DNA, 1902 bp, Homo sapiens
aaaaaatcaaataaaacttatttctagtactgggaactcttctttttcttttctttcttccctccaggccctctggattccttttctaccctactctgaccaagggctgcttctaaagcaaatgtttggaaaccacttttattctttggggtgctccctgggctggtcatttgcagatgacatttgccccaacacatgagtgtctgtgaaccaggtccgttctgtccactgagctgtacttacgtctagatgtataagaagcatggggtcagctctctaggtttccttggagaagcaggaggacttccttatcagaagcctgacttctgttgcagagcgcatgcattttgaccacagtgtttcagctcttcccttttctcttgttccatttaggtggcttcccacacttctgactcggacgttccttccggtgtcactgaggtggtcgtgaagctctttgactctgatcccatcactgtgacggtccctgtagaagtctccaggaagaaccctaaatttatggagaccgtggcggagaaagcgctgcaggaataccgcaaaaagcaccgggaggagtgagatgtggatgttgcttttgcacctacgggggcatctgagtccagctccccccaagatgagctgcagccccccagagagagctctgcacgtcaccaagtaaccaggccccagcctccaggcccccaactccgcccagcctctccccgctctggatcctgcactctaacactcgactctgctgctcatgggaagaacagaattgctcctgcatgcaactaattcaataaaactgtcttgtgagctgatcgcttggagggtcctctttttatgttgagttgctgcttcccggcatgccttcattttgctatggggggcaggcaggggggatggaaaataagtagaaacaaaaaagcagtggctaagatggtatagggactgtcataccagtgaagaataaaagggtgaagaataaaagggatatgatgacaaggttgatccacttcaagaattgcttgctttcaggaagagagatgtgtttcaacaagccaactaaaatatattgctgcaaatggaagcttttctgttctattataaaactgtcgatgtattctgaccaaggtgcgacaatctcctaaaggaatacactgaaagttaaggagaagaatcagtaagtgtaaggtgtacttggtattataatgcataattgatgttttcgttatgaaaacatttggtgcccagaagtccaaattatcagttttatttgtaagagctattgcttttgcagcggttttatttgtaaaagctgttgatttcgagttgtaagagctcagcatcccaggggcatcttcttgactgtggcatttcctgtccaccgccggtttatatgatcttcatacctttccctggaccacaggcgtttctcggcttttagtctgaaccatagctgggctgcagtaccctacgctgccagcaggtggccatgactacccgtggtaccaatctcagtcttaaagctcaggcttttcgttcattaacattctctgatagaattctggtcatcagatgtactgcaatggaacaaaactcatctggctgcatcccaggtgtgtagcaaagtccacatgtaaatttatagcttagaatattcttaagtcactgtcccttgtctctctttgaagttataaacaacaaacttaaagcttagcttatgtccaaggtaagtattttagcatggctgtcaaggaaattcagagtaaagtcagtgtgattcacttaatgatatacattaattagaattatggggtcagaggtatttgcttaagtgatcataattgtaaagtatatgtcacattgtcacattaatgtcacactgtttcaaaagtt

SEQ ID NO: 7316 - protein, 51 aa, Homo sapiens; identical to SEQ ID NO: 7290

SEQ ID NO: 7317 - DNA, 1740 bp, Homo sapiens
gactgttccaccaacaacccctcccaggctaagctgcggcgggagctcgacgaatccctccaggtcgctgagaggttgaccaggaaatacaacgagctgctaaagtcctaccagtggaagatgctcaacacctcctccttgctggagcagctgaacgagcagtttaactgggtgtcccggctggcaaacctcacgcaaggcgaagaccagtactatctgcgggtcaccacggtggcttcccacacttctgactcggacgttccttccggtgtcactgaggtggtcgtgaagctctttgactctgatcccatcactgtgacggtccctgtagaagtctccaggaagaaccctaaatttatggagaccgtggcggagaaagcgctgcaggaataccgcaaaaagcaccgggaggagtgagatgtggatgttgcttttgcacctacgggggcatctgagtccagctccccccaagatgagctgcagccccccagagagagctctgcacgtcaccaagtaaccaggccccagcctccaggcccccaactccgcccagcctctccccgctctggatcctgcactctaacactcgactctgctgctcatgggaagaacagaattgctcctgcatgcaactaattcaataaaactgtcttgtgagctgatcgcttggagggtcctctttttatgttgagttgctgcttcccggcatgccttcattttgctatggggggcaggcaggggggatggaaaataagtagaaacaaaaaagcagtggctaagatggtatagggactgtcataccagtgaagaataaaagggtgaagaataaaagggatatgatgacaaggttgatccacttcaagaattgcttgctttcaggaagagagatgtgtttcaacaagccaactaaaatatattgctgcaaatggaagcttttctgttctattataaaactgtcgatgtattctgaccaaggtgcgacaatctcctaaaggaatacactgaaagttaaggagaagaatcagtaagtgtaaggtgtacttggtattataatgcataattgatgttttcgttatgaaaacatttggtgcccagaagtccaaattatcagttttatttgtaagagctattgcttttgcagcggttttatttgtaaaagctgttgatttcgagttgtaagagctcagcatcccaggggcatcttcttgactgtggcatttcctgtccaccgccggtttatatgatcttcatacctttccctggaccacaggcgtttctcggcttttagtctgaaccatagctgggctgcagtaccctacgctgccagcaggtggccatgactacccgtggtaccaatctcagtcttaaagctcaggcttttcgttcattaacattctctgatagaattctggtcatcagatgtactgcaatggaacaaaactcatctggctgcatcccaggtgtgtagcaaagtccacatgtaaatttatagcttagaatattcttaagtcactgtcccttgtctctctttgaagttataaacaacaaacttaaagcttagcttatgtccaaggtaagtattttagcatggctgtcaaggaaattcagagtaaagtcagtgtgattcacttaatgatatacattaattagaattatggggtcagaggtatttgcttaagtgatcataattgtaaagtatatgtcacattgtcacattaatgtcacactgtttcaaaagtt

SEQ ID NO: 7318 - protein, 98 aa, Homo sapiens; identical to SEQ ID NO: 7300

SEQ ID NO: 7319 - DNA, 2247 bp, Homo sapiens
ttcctgaaccagagctcgcccttctacttctggatgaatggtgaccgcatcgactccctgctggagaacgaccggcagcagacgcacatgctggatgtcatgcaggaccacttcagccgcgcgtccagcatcatagacgagctcttccaggacaggttcttcacccgggagccccaggatacctaccactacctgcccttcagcctgccccaccggaggcctcacttcttctttcccaagtcccgcatcgtccgcagcttgatgcccttctctccgtacgagcccctgaacttccacgccatgttccagcccttccttgagatgatacacgaggctcagcaggccatggacatccacttccatagcccggccttccagcacccgccaacagaattcatacgagaaggcgacgatgaccggactgtgtgccgggagatccgccacaactccacgggctgcctgcggatgaaggaccagtgtgacaagtgccgggagatcttgtctgtggactgttccaccaacaacccctcccaggctaagctgcggcgggagctcgacgaatccctccaggtcgctgagaggttgaccaggaaatacaacgagctgctaaagtcctaccagtggaagatgctcaacacctcctccttgctggagcagctgaacgagcagtttaactgggtgtcccggctggcaaacctcacgcaaggcgaagaccagtactatctgcgggtcaccacggtggcttcccacacttctgactcggacgttccttccggtgtcactgaggtggtcgtgaagctctttgactctgatcccatcactgtgacggtccctgtagaagtctccaggaagaaccctaaatttatggagaccgtggcggagaaagcgctgcaggaataccgcaaaaagcaccgggaggagtgagatgtggatgttgcttttgcacctacgggggcatctgagtccagctccccccaagatgagctgcagccccccagagagagctctgcacgtcaccaagtaaccaggccccagcctccaggcccccaactccgcccagcctctccccgctctggatcctgcactctaacactcgactctgctgctcatgggaagaacagaattgctcctgcatgcaactaattcaataaaactgtcttgtgagctgatcgcttggagggtcctctttttatgttgagttgctgcttcccggcatgccttcattttgctatggggggcaggcaggggggatggaaaataagtagaaacaaaaaagcagtggctaagatggtatagggactgtcataccagtgaagaataaaagggtgaagaataaaagggatatgatgacaaggttgatccacttcaagaattgcttgctttcaggaagagagatgtgtttcaacaagccaactaaaatatattgctgcaaatggaagcttttctgttctattataaaactgtcgatgtattctgaccaaggtgcgacaatctcctaaaggaatacactgaaagttaaggagaagaatcagtaagtgtaaggtgtacttggtattataatgcataattgatgttttcgttatgaaaacatttggtgcccagaagtccaaattatcagttttatttgtaagagctattgcttttgcagcggttttatttgtaaaagctgttgatttcgagttgtaagagctcagcatcccaggggcatcttcttgactgtggcatttcctgtccaccgccggtttatatgatcttcatacctttccctggaccacaggcgtttctcggcttttagtctgaaccatagctgggctgcagtaccctacgctgccagcaggtggccatgactacccgtggtaccaatctcagtcttaaagctcaggcttttcgttcattaacattctctgatagaattctggtcatcagatgtactgcaatggaacaaaactcatctggctgcatcccaggtgtgtagcaaagtccacatgtaaatttatagcttagaatattcttaagtcactgtcccttgtctctctttgaagttataaacaacaaacttaaagcttagcttatgtccaaggtaagtattttagcatggctgtcaaggaaattcagagtaaagtcagtgtgattcacttaatgatatacattaattagaattatggggtcagaggtatttgcttaagtgatcataattgtaaagtatatgtcacattgtcacattaatgtcacactgtttcaaaagtt

SEQ ID NO: 7320 - protein, 296 aa, Homo sapiens [sequence omitted]

SEQ ID NO: 7321 - DNA, 2260 bp, Homo sapiens
ccagcttgaggagttcctgaaccagagctcgcccttctacttctggatgaatggtgaccgcatcgactccctgctggagaacgaccggcagcagacgcacatgctggatgtcatgcaggaccacttcagccgcgcgtccagcatcatagacgagctcttccaggacaggttcttcacccgggagccccaggatacctaccactacctgcccttcagcctgccccaccggaggcctcacttcttctttcccaagtcccgcatcgtccgcagcttgatgcccttctctccgtacgagcccctgaacttccacgccatgttccagcccttccttgagatgatacacgaggctcagcaggccatggacatccacttccatagcccggccttccagcacccgccaacagaattcatacgagaaggcgacgatgaccggactgtgtgccgggagatccgccacaactccacgggctgcctgcggatgaaggaccagtgtgacaagtgccgggagatcttgtctgtggactgttccaccaacaacccctcccaggctaagctgcggcgggagctcgacgaatccctccaggtcgctgagaggttgaccaggaaatacaacgagctgctaaagtcctaccagtggaagatgctcaacacctcctccttgctggagcagctgaacgagcagtttaactgggtgtcccggctggcaaacctcacgcaaggcgaagaccagtactatctgcgggtcaccacggtggcttcccacacttctgactcggacgttccttccggtgtcactgaggtggtcgtgaagctctttgactctgatcccatcactgtgacggtccctgtagaagtctccaggaagaaccctaaatttatggagaccgtggcggagaaagcgctgcaggaataccgcaaaaagcaccgggaggagtgagatgtggatgttgcttttgcacctacgggggcatctgagtccagctccccccaagatgagctgcagccccccagagagagctctgcacgtcaccaagtaaccaggccccagcctccaggcccccaactccgcccagcctctccccgctctggatcctgcactctaacactcgactctgctgctcatgggaagaacagaattgctcctgcatgcaactaattcaataaaactgtcttgtgagctgatcgcttggagggtcctctttttatgttgagttgctgcttcccggcatgccttcattttgctatggggggcaggcaggggggatggaaaataagtagaaacaaaaaagcagtggctaagatggtatagggactgtcataccagtgaagaataaaagggtgaagaataaaagggatatgatgacaaggttgatccacttcaagaattgcttgctttcaggaagagagatgtgtttcaacaagccaactaaaatatattgctgcaaatggaagcttttctgttctattataaaactgtcgatgtattctgaccaaggtgcgacaatctcctaaaggaatacactgaaagttaaggagaagaatcagtaagtgtaaggtgtacttggtattataatgcataattgatgttttcgttatgaaaacatttggtgcccagaagtccaaattatcagttttatttgtaagagctattgcttttgcagcggttttatttgtaaaagctgttgatttcgagttgtaagagctcagcatcccaggggcatcttcttgactgtggcatttcctgtccaccgccggtttatatgatcttcatacctttccctggaccacaggcgtttctcggcttttagtctgaaccatagctgggctgcagtaccctacgctgccagcaggtggccatgactacccgtggtaccaatctcagtcttaaagctcaggcttttcgttcattaacattctctgatagaattctggtcatcagatgtactgcaatggaacaaaactcatctggctgcatcccaggtgtgtagcaaagtccacatgtaaatttatagcttagaatattcttaagtcactgtcccttgtctctctttgaagttataaacaacaaacttaaagcttagcttatgtccaaggtaagtattttagcatggctgtcaaggaaattcagagtaaagtcagtgtgattcacttaatgatatacattaattagaattatggggtcagaggtatttgcttaagtgatcataattgtaaagtatatgtcacattgtcacattaatgtcacactgtttcaaaagtt

SEQ ID NO: 7322 - protein, 296 aa, Homo sapiens [sequence omitted]

SEQ ID NO: 7323 - DNA, 1663 bp, Homo sapiens
gtccaatcagggaagtaagtacgtcaataaggaaattcaaaatatgctcaacacctcctccttgctggagcagctgaacgagcagtttaactgggtgtcccggctggcaaacctcacgcaaggcgaagaccagtactatctgcgggtcaccacggtggcttcccacacttctgactcggacgttccttccggtgtcactgaggtggtcgtgaagctctttgactctgatcccatcactgtgacggtccctgtagaagtctccaggaagaaccctaaatttatggagaccgtggcggagaaagcgctgcaggaataccgcaaaaagcaccgggaggagtgagatgtggatgttgcttttgcacctacgggggcatctgagtccagctccccccaagatgagctgcagccccccagagagagctctgcacgtcaccaagtaaccaggccccagcctccaggcccccaactccgcccagcctctccccgctctggatcctgcactctaacactcgactctgctgctcatgggaagaacagaattgctcctgcatgcaactaattcaataaaactgtcttgtgagctgatcgcttggagggtcctctttttatgttgagttgctgcttcccggcatgccttcattttgctatggggggcaggcaggggggatggaaaataagtagaaacaaaaaagcagtggctaagatggtatagggactgtcataccagtgaagaataaaagggtgaagaataaaagggatatgatgacaaggttgatccacttcaagaattgcttgctttcaggaagagagatgtgtttcaacaagccaactaaaatatattgctgcaaatggaagcttttctgttctattataaaactgtcgatgtattctgaccaaggtgcgacaatctcctaaaggaatacactgaaagttaaggagaagaatcagtaagtgtaaggtgtacttggtattataatgcataattgatgttttcgttatgaaaacatttggtgcccagaagtccaaattatcagttttatttgtaagagctattgcttttgcagcggttttatttgtaaaagctgttgatttcgagttgtaagagctcagcatcccaggggcatcttcttgactgtggcatttcctgtccaccgccggtttatatgatcttcatacctttccctggaccacaggcgtttctcggcttttagtctgaaccatagctgggctgcagtaccctacgctgccagcaggtggccatgactacccgtggtaccaatctcagtcttaaagctcaggcttttcgttcattaacattctctgatagaattctggtcatcagatgtactgcaatggaacaaaactcatctggctgcatcccaggtgtgtagcaaagtccacatgtaaatttatagcttagaatattcttaagtcactgtcccttgtctctctttgaagttataaacaacaaacttaaagcttagcttatgtccaaggtaagtattttagcatggctgtcaaggaaattcagagtaaagtcagtgtgattcacttaatgatatacattaattagaattatggggtcagaggtatttgcttaagtgatcataattgtaaagtatatgtcacattgtcacattaatgtcacactgtttcaaaagtt

SEQ ID NO: 7324 - protein, 98 aa, Homo sapiens; identical to SEQ ID NO: 7300

SEQ ID NO: 7325 - DNA, 2994 bp, Homo sapiens
ggcaggaacactggcagggcagcctgctgtcggcttagaggggatgggcagtgtggagggcctggcagagcaagaggactcatccttccaaagggactttctctgggaagcctgctcctcgggccactgcgaaccctctctactctccgaagggaattgtccttcctggcttccactacttccacccctgaatgcacaggcagcccggcccaagtctcccactagggatgcagatggattcggtgtgaagggctggctgctgttgcctccggctcttgaaagtcaagttcagaggcgtgcaaagactccagaattggaggcatgatgaagactctgctgctgtttgtggggctgctgctgacctgggagagtgggcaggtcctgggggaccagacggtctcagacaatgagctccaggaaatgtccaatcagggaagtaagtacgtcaataaggaaattcaaaatgctgtcaacggggtgaaacagataaagactctcatagaaaaaacaaacgaagagcgcaagacactgctcagcaacctagaagaagccaagaagaagaaagaggatgccctaaatgagaccagggaatcagagacaaagctgaaggagctcccaggagtgtgcaatgagaccatgatggccctctgggaagagtgtaagccctgcctgaaacagacctgcatgaagttctacgcacgcgtctgcagaagtggctcaggcctggttggccgccagcttgaggagttcctgaaccagagctcgcccttctacttctggatgaatggtgaccgcatcgactccctgctggagaacgaccggcagcagacgcacatgctggatgtcatgcaggaccacttcagccgcgcgtccagcatcatagacgagctcttccaggacaggttcttcacccgggagccccaggatacctaccactacctgcccttcagcctgccccaccggaggcctcacttcttctttcccaagtcccgcatcgtccgcagcttgatgcccttctctccgtacgagcccctgaacttccacgccatgttccagcccttccttgagatgatacacgaggctcagcaggccatggacatccacttccatagcccggccttccagcacccgccaacagaattcatacgagaaggcgacgatgaccggactgtgtgccgggagatccgccacaactccacgggctgcctgcggatgaaggaccagtgtgacaagtgccgggagatcttgtctgtggactgttccaccaacaacccctcccaggctaagctgcggcgggagctcgacgaatccctccaggtcgctgagaggttgaccaggaaatacaacgagctgctaaagtcctaccagtggaagatgctcaacacctcctccttgctggagcagctgaacgagcagtttaactgggtgtcccggctggcaaacctcacgcaaggcgaagaccagtactatctgcgggtcaccacggtggcttcccacacttctgactcggacgttccttccggtgtcactgaggtggtcgtgaagctctttgactctgatcccatcactgtgacggtccctgtagaagtctccaggaagaaccctaaatttatggagaccgtggcggagaaagcgctgcaggaataccgcaaaaagcaccgggaggagtgagatgtggatgttgcttttgcacctacgggggcatctgagtccagctccccccaagatgagctgcagccccccagagagagctctgcacgtcaccaagtaaccaggccccagcctccaggcccccaactccgcccagcctctccccgctctggatcctgcactctaacactcgactctgctgctcatgggaagaacagaattgctcctgcatgcaactaattcaataaaactgtcttgtgagctgatcgcttggagggtcctctttttatgttgagttgctgcttcccggcatgccttcattttgctatggggggcaggcaggggggatggaaaataagtagaaacaaaaaagcagtggctaagatggtatagggactgtcataccagtgaagaataaaagggtgaagaataaaagggatatgatgacaaggttgatccacttcaagaattgcttgctttcaggaagagagatgtgtttcaacaagccaactaaaatatattgctgcaaatggaagcttttctgttctattataaaactgtcgatgtattctgaccaaggtgcgacaatctcctaaaggaatacactgaaagttaaggagaagaatcagtaagtgtaaggtgtacttggtattataatgcataattgatgttttcgttatgaaaacatttggtgcccagaagtccaaattatcagttttatttgtaagagctattgcttttgcagcggttttatttgtaaaagctgttgatttcgagttgtaagagctcagcatcccaggggcatcttcttgactgtggcatttcctgtccaccgccggtttatatgatcttcatacctttccctggaccacaggcgtttctcggcttttagtctgaaccatagctgggctgcagtaccctacgctgccagcaggtggccatgactacccgtggtaccaatctcagtcttaaagctcaggcttttcgttcattaacattctctgatagaattctggtcatcagatgtactgcaatggaacaaaactcatctggctgcatcccaggtgtgtagcaaagtccacatgtaaatttatagcttagaatattcttaagtcactgtcccttgtctctctttgaagttataaacaacaaacttaaagcttagcttatgtccaaggtaagtattttagcatggctgtcaaggaaattcagagtaaagtcagtgtgattcacttaatgatatacattaattagaattatggggtcagaggtatttgcttaagtgatcataattgtaaagtatatgtcacattgtcacattaatgtcacactgtttcaaaagtt

SEQ ID NO: 7326 - protein, 449 aa, Homo sapiens; identical to SEQ ID NO: 1024

SEQ ID NO: 7327 - DNA, 2858 bp, Homo sapiens
ctttccgcggcattctttgggcgtgagtcatgcaggtttgcagccagccccaaagggggtgtgtgcgcgagcagagcgctataaatacggcgcctcccagtgcccacaacgcggcgtcgccaggaggagcgcgcgggcacagggtgccgctgaccgaggcgtgcaaagactccagaattggaggcatgatgaagactctgctgctgtttgtggggctgctgctgacctgggagagtgggcaggtcctgggggaccagacggtctcagacaatgagctccaggaaatgtccaatcagggaagtaagtacgtcaataaggaaattcaaaatgctgtcaacggggtgaaacagataaagactctcatagaaaaaacaaacgaagagcgcaagacactgctcagcaacctagaagaagccaagaagaagaaagaggatgccctaaatgagaccagggaatcagagacaaagctgaaggagctcccaggagtgtgcaatgagaccatgatggccctctgggaagagtgtaagccctgcctgaaacagacctgcatgaagttctacgcacgcgtctgcagaagtggctcaggcctggttggccgccagcttgaggagttcctgaaccagagctcgcccttctacttctggatgaatggtgaccgcatcgactccctgctggagaacgaccggcagcagacgcacatgctggatgtcatgcaggaccacttcagccgcgcgtccagcatcatagacgagctcttccaggacaggttcttcacccgggagccccaggatacctaccactacctgcccttcagcctgccccaccggaggcctcacttcttctttcccaagtcccgcatcgtccgcagcttgatgcccttctctccgtacgagcccctgaacttccacgccatgttccagcccttccttgagatgatacacgaggctcagcaggccatggacatccacttccatagcccggccttccagcacccgccaacagaattcatacgagaaggcgacgatgaccggactgtgtgccgggagatccgccacaactccacgggctgcctgcggatgaaggaccagtgtgacaagtgccgggagatcttgtctgtggactgttccaccaacaacccctcccaggctaagctgcggcgggagctcgacgaatccctccaggtcgctgagaggttgaccaggaaatacaacgagctgctaaagtcctaccagtggaagatgctcaacacctcctccttgctggagcagctgaacgagcagtttaactgggtgtcccggctggcaaacctcacgcaaggcgaagaccagtactatctgcgggtcaccacggtggcttcccacacttctgactcggacgttccttccggtgtcactgaggtggtcgtgaagctctttgactctgatcccatcactgtgacggtccctgtagaagtctccaggaagaaccctaaatttatggagaccgtggcggagaaagcgctgcaggaataccgcaaaaagcaccgggaggagtgagatgtggatgttgcttttgcacctacgggggcatctgagtccagctccccccaagatgagctgcagccccccagagagagctctgcacgtcaccaagtaaccaggccccagcctccaggcccccaactccgcccagcctctccccgctctggatcctgcactctaacactcgactctgctgctcatgggaagaacagaattgctcctgcatgcaactaattcaataaaactgtcttgtgagctgatcgcttggagggtcctctttttatgttgagttgctgcttcccggcatgccttcattttgctatggggggcaggcaggggggatggaaaataagtagaaacaaaaaagcagtggctaagatggtatagggactgtcataccagtgaagaataaaagggtgaagaataaaagggatatgatgacaaggttgatccacttcaagaattgcttgctttcaggaagagagatgtgtttcaacaagccaactaaaatatattgctgcaaatggaagcttttctgttctattataaaactgtcgatgtattctgaccaaggtgcgacaatctcctaaaggaatacactgaaagttaaggagaagaatcagtaagtgtaaggtgtacttggtattataatgcataattgatgttttcgttatgaaaacatttggtgcccagaagtccaaattatcagttttatttgtaagagctattgcttttgcagcggttttatttgtaaaagctgttgatttcgagttgtaagagctcagcatcccaggggcatcttcttgactgtggcatttcctgtccaccgccggtttatatgatcttcatacctttccctggaccacaggcgtttctcggcttttagtctgaaccatagctgggctgcagtaccctacgctgccagcaggtggccatgactacccgtggtaccaatctcagtcttaaagctcaggcttttcgttcattaacattctctgatagaattctggtcatcagatgtactgcaatggaacaaaactcatctggctgcatcccaggtgtgtagcaaagtccacatgtaaatttatagcttagaatattcttaagtcactgtcccttgtctctctttgaagttataaacaacaaacttaaagcttagcttatgtccaaggtaagtattttagcatggctgtcaaggaaattcagagtaaagtcagtgtgattcacttaatgatatacattaattagaattatggggtcagaggtatttgcttaagtgatcataattgtaaagtatatgtcacattgtcacattaatgtcacactgtttcaaaagtt

SEQ ID NO: 7328 - protein, 501 aa, Homo sapiens; identical to SEQ ID NO: 1022

SEQ ID NO: 7329 - DNA, 587 bp, Homo sapiens
aagaaccctaaatttatggagaccgtggcggagaaagcgctgcaggaataccgcaaaaagcaccgggaggagtgagatgtggatgttgcttttgcacctacgggggcatctgagtccagctccccccaagatgagctgcagccccccagagagagctctgcacgtcaccaagtaaccaggccccagcctccaggcccccaactccgcccagcctctccccgctctggatcctgcactctaacactcgactctgctgctcatgggaagaacagaattgctcctgcatgcaactaattcaataaaactgtcttgtgagctgatcgcttggagggtcctctttttatgttgagttgctgcttcccggcatgccttcattttgctatggggggcaggcaggggggatggaaaataagtagaaacaaaaaagcagtggctaagatggtatagggactgtcataccagtgaagaataaaagggtgaagaataaaagggatatgatgacaaggttgatccacttcaagaattgcttgctttcaggaagagagatgtgtttcaacaagccaactaaaatatattgctgcaaatgg

SEQ ID NO: 7330 - protein, 34 aa, Homo sapiens
MLSCCFPACLHFAMGGRQGGWKISRNKKAVAKMV

SEQ ID NO: 7331 - DNA, 626 bp, Homo sapiens
gatcccatcactgtgacggtccctgtagaagtctccaggaagaaccctaaatttatggagaccgtggcggagaaagcgctgcaggaataccgcaaaaagcaccgggaggagtgagatgtggatgttgcttttgcacctacgggggcatctgagtccagctccccccaagatgagctgcagccccccagagagagctctgcacgtcaccaagtaaccaggccccagcctccaggcccccaactccgcccagcctctccccgctctggatcctgcactctaacactcgactctgctgctcatgggaagaacagaattgctcctgcatgcaactaattcaataaaactgtcttgtgagctgatcgcttggagggtcctctttttatgttgagttgctgcttcccggcatgccttcattttgctatggggggcaggcaggggggatggaaaataagtagaaacaaaaaagcagtggctaagatggtatagggactgtcataccagtgaagaataaaagggtgaagaataaaagggatatgatgacaaggttgatccacttcaagaattgcttgctttcaggaagagagatgtgtttcaacaagccaactaaaatatattgctgcaaatgg

SEQ ID NO: 7332 - protein, 34 aa, Homo sapiens; identical to SEQ ID NO: 7330

SEQ ID NO: 7333 - DNA, 678 bp, Homo sapiens
ctcggacgttccttccggtgtcactgaggtggtcgtgaagctctttgactctgatcccatcactgtgacggtccctgtagaagtctccaggaagaaccctaaatttatggagaccgtggcggagaaagcgctgcaggaataccgcaaaaagcaccgggaggagtgagatgtggatgttgcttttgcacctacgggggcatctgagtccagctccccccaagatgagctgcagccccccagagagagctctgcacgtcaccaagtaaccaggccccagcctccaggcccccaactccgcccagcctctccccgctctggatcctgcactctaacactcgactctgctgctcatgggaagaacagaattgctcctgcatgcaactaattcaataaaactgtcttgtgagctgatcgcttggagggtcctctttttatgttgagttgctgcttcccggcatgccttcattttgctatggggggcaggcaggggggatggaaaataagtagaaacaaaaaagcagtggctaagatggtatagggactgtcataccagtgaagaataaaagggtgaagaataaaagggatatgatgacaaggttgatccacttcaagaattgcttgctttcaggaagagagatgtgtttcaacaagccaactaaaatatattgctgcaaatgg

SEQ ID NO: 7334 - protein, 34 aa, Homo sapiens; identical to SEQ ID NO: 7330

SEQ ID NO: 7335 - DNA, 868 bp, Homo sapiens
gtccactgagctgtacttacgtctagatgtataagaagcatggggtcagctctctaggtttccttggagaagcaggaggacttccttatcagaagcctgacttctgttgcagagcgcatgcattttgaccacagtgtttcagctcttcccttttctcttgttccatttaggtggcttcccacacttctgactcggacgttccttccggtgtcactgaggtggtcgtgaagctctttgactctgatcccatcactgtgacggtccctgtagaagtctccaggaagaaccctaaatttatggagaccgtggcggagaaagcgctgcaggaataccgcaaaaagcaccgggaggagtgagatgtggatgttgcttttgcacctacgggggcatctgagtccagctccccccaagatgagctgcagccccccagagagagctctgcacgtcaccaagtaaccaggccccagcctccaggcccccaactccgcccagcctctccccgctctggatcctgcactctaacactcgactctgctgctcatgggaagaacagaattgctcctgcatgcaactaattcaataaaactgtcttgtgagctgatcgcttggagggtcctctttttatgttgagttgctgcttcccggcatgccttcattttgctatggggggcaggcaggggggatggaaaataagtagaaacaaaaaagcagtggctaagatggtatagggactgtcataccagtgaagaataaaagggtgaagaataaaagggatatgatgacaaggttgatccacttcaagaattgcttgctttcaggaagagagatgtgtttcaacaagccaactaaaatatattgctgcaaatgg

SEQ ID NO: 7336 - protein, 36 aa, Homo sapiens
MHFDHSVSALPFSLVPFRWLPTLLTRTFLPVSLRWS

SEQ ID NO: 7337 - DNA, 1091 bp, Homo sapiens
aaaaaatcaaataaaacttatttctagtactgggaactcttctttttcttttctttcttccctccaggccctctggattccttttctaccctactctgaccaagggctgcttctaaagcaaatgtttggaaaccacttttattctttggggtgctccctgggctggtcatttgcagatgacatttgccccaacacatgagtgtctgtgaaccaggtccgttctgtccactgagctgtacttacgtctagatgtataagaagcatggggtcagctctctaggtttccttggagaagcaggaggacttccttatcagaagcctgacttctgttgcagagcgcatgcattttgaccacagtgtttcagctcttcccttttctcttgttccatttaggtggcttcccacacttctgactcggacgttccttccggtgtcactgaggtggtcgtgaagctctttgactctgatcccatcactgtgacggtccctgtagaagtctccaggaagaaccctaaatttatggagaccgtggcggagaaagcgctgcaggaataccgcaaaaagcaccgggaggagtgagatgtggatgttgcttttgcacctacgggggcatctgagtccagctccccccaagatgagctgcagccccccagagagagctctgcacgtcaccaagtaaccaggccccagcctccaggcccccaactccgcccagcctctccccgctctggatcctgcactctaacactcgactctgctgctcatgggaagaacagaattgctcctgcatgcaactaattcaataaaactgtcttgtgagctgatcgcttggagggtcctctttttatgttgagttgctgcttcccggcatgccttcattttgctatggggggcaggcaggggggatggaaaataagtagaaacaaaaaagcagtggctaagatggtatagggactgtcataccagtgaagaataaaagggtgaagaataaaagggatatgatgacaaggttgatccacttcaagaattgcttgctttcaggaagagagatgtgtttcaacaagccaactaaaatatattgctgcaaatgg

SEQ ID NO: 7338 - protein, 36 aa, Homo sapiens; identical to SEQ ID NO: 7336

SEQ ID NO: 7339 - DNA, 929 bp, Homo sapiens
gactgttccaccaacaacccctcccaggctaagctgcggcgggagctcgacgaatccctccaggtcgctgagaggttgaccaggaaatacaacgagctgctaaagtcctaccagtggaagatgctcaacacctcctccttgctggagcagctgaacgagcagtttaactgggtgtcccggctggcaaacctcacgcaaggcgaagaccagtactatctgcgggtcaccacggtggcttcccacacttctgactcggacgttccttccggtgtcactgaggtggtcgtgaagctctttgactctgatcccatcactgtgacggtccctgtagaagtctccaggaagaaccctaaatttatggagaccgtggcggagaaagcgctgcaggaataccgcaaaaagcaccgggaggagtgagatgtggatgttgcttttgcacctacgggggcatctgagtccagctccccccaagatgagctgcagccccccagagagagctctgcacgtcaccaagtaaccaggccccagcctccaggcccccaactccgcccagcctctccccgctctggatcctgcactctaacactcgactctgctgctcatgggaagaacagaattgctcctgcatgcaactaattcaataaaactgtcttgtgagctgatcgcttggagggtcctctttttatgttgagttgctgcttcccggcatgccttcattttgctatggggggcaggcaggggggatggaaaataagtagaaacaaaaaagcagtggctaagatggtatagggactgtcataccagtgaagaataaaagggtgaagaataaaagggatatgatgacaaggttgatccacttcaagaattgcttgctttcaggaagagagatgtgtttcaacaagccaactaaaatatattgctgcaaatgg

SEQ ID NO: 7340 - protein, 98 aa, Homo sapiens; identical to SEQ ID NO: 7300

SEQ ID NO: 7341 - DNA, 1436 bp, Homo sapiens
ttcctgaaccagagctcgcccttctacttctggatgaatggtgaccgcatcgactccctgctggagaacgaccggcagcagacgcacatgctggatgtcatgcaggaccacttcagccgcgcgtccagcatcatagacgagctcttccaggacaggttcttcacccgggagccccaggatacctaccactacctgcccttcagcctgccccaccggaggcctcacttcttctttcccaagtcccgcatcgtccgcagcttgatgcccttctctccgtacgagcccctgaacttccacgccatgttccagcccttccttgagatgatacacgaggctcagcaggccatggacatccacttccatagcccggccttccagcacccgccaacagaattcatacgagaaggcgacgatgaccggactgtgtgccgggagatccgccacaactccacgggctgcctgcggatgaaggaccagtgtgacaagtgccgggagatcttgtctgtggactgttccaccaacaacccctcccaggctaagctgcggcgggagctcgacgaatccctccaggtcgctgagaggttgaccaggaaatacaacgagctgctaaagtcctaccagtggaagatgctcaacacctcctccttgctggagcagctgaacgagcagtttaactgggtgtcccggctggcaaacctcacgcaaggcgaagaccagtactatctgcgggtcaccacggtggcttcccacacttctgactcggacgttccttccggtgtcactgaggtggtcgtgaagctctttgactctgatcccatcactgtgacggtccctgtagaagtctccaggaagaaccctaaatttatggagaccgtggcggagaaagcgctgcaggaataccgcaaaaagcaccgggaggagtgagatgtggatgttgcttttgcacctacgggggcatctgagtccagctccccccaagatgagctgcagccccccagagagagctctgcacgtcaccaagtaaccaggccccagcctccaggcccccaactccgcccagcctctccccgctctggatcctgcactctaacactcgactctgctgctcatgggaagaacagaattgctcctgcatgcaactaattcaataaaactgtcttgtgagctgatcgcttggagggtcctctttttatgttgagttgctgcttcccggcatgccttcattttgctatggggggcaggcaggggggatggaaaataagtagaaacaaaaaagcagtggctaagatggtatagggactgtcataccagtgaagaataaaagggtgaagaataaaagggatatgatgacaaggttgatccacttcaagaattgcttgctttcaggaagagagatgtgtttcaacaagccaactaaaatatattgctgcaaatgg

SEQ ID NO: 7342 - protein, 296 aa, Homo sapiens [sequence omitted]

SEQ ID NO: 7343 - DNA, 844 bp, Homo sapiens
ccagcttgaggagttcctgaaccagagctcgcccttctacttctggatgaatggtgaccgcatcgactccctgctggagaacgaccggcagcagacgcacatgctggatgtcatgcaggaccacttcagccgcgcgtccagcatcatagacgagctcttccaggacaggttcttcacccgggagccccaggatacctaccactacctgcccttcagcctgccccaccggaggcctcacttcttctttcccaagtcccgcatcgtccgcagcttgatgcccttctctccgtacgagcccctgaacttccacgccatgttccagcccttccttgagatgatacacgaggctcagcaggccatggacatccacttccatagcccggccttccagcacccgccaacagaattcatacgagaaggcgacgatgaccggactgtgtgccgggagatccgccacaactccacgggctgcctgcggatgaaggaccagtgtgacaagtgccgggagatcttgtctgtggactgttccaccaacaacccctcccaggctaagctgcggcgggagctcgacgaatccctccaggtcgctgagaggttgaccaggaaatacaacgagctgctaaagtcctaccagtggaagatgctcaacacctcctccttgctggagcagctgaacgagcagtttaactgggtgtcccggctggcaaacctcacgcaagtgaagaataaaagggtgaagaataaaagggatatgatgacaaggttgatccacttcaagaattgcttgctttcaggaagagagatgtgtttcaacaagccaactaaaatatattgctgcaaatgg

SEQ ID NO: 7344 - protein, 265 aa, Homo sapiens
MNGDRIDSLLENDRQQTHMLDVMQDHFSRASSIIDELFQDRFFTREPQDTYHYLPFSLPHRRPHFFFPKSRIVRSLMPFSPYEPLNFHAMFQPFLEMIHEAQQAMDIHFHSPAFQHPPTEFIREGDDDRTVCREIRHNSTGCLRMKDQCDKCREILSVDCSTNNPSQAKLRRELDESLQVAERLTRKYNELLKSYQWKMLNTSSLLEQLNEQFNWVSRLANLTQVKNKRVKNKRDMMTRLIHFKNCLLSGREMCFNKPTKIYCCK

SEQ ID NO: 7345 - DNA, 1449 bp, Homo sapiens
ccagcttgaggagttcctgaaccagagctcgcccttctacttctggatgaatggtgaccgcatcgactccctgctggagaacgaccggcagcagacgcacatgctggatgtcatgcaggaccacttcagccgcgcgtccagcatcatagacgagctcttccaggacaggttcttcacccgggagccccaggatacctaccactacctgcccttcagcctgccccaccggaggcctcacttcttctttcccaagtcccgcatcgtccgcagcttgatgcccttctctccgtacgagcccctgaacttccacgccatgttccagcccttccttgagatgatacacgaggctcagcaggccatggacatccacttccatagcccggccttccagcacccgccaacagaattcatacgagaaggcgacgatgaccggactgtgtgccgggagatccgccacaactccacgggctgcctgcggatgaaggaccagtgtgacaagtgccgggagatcttgtctgtggactgttccaccaacaacccctcccaggctaagctgcggcgggagctcgacgaatccctccaggtcgctgagaggttgaccaggaaatacaacgagctgctaaagtcctaccagtggaagatgctcaacacctcctccttgctggagcagctgaacgagcagtttaactgggtgtcccggctggcaaacctcacgcaaggcgaagaccagtactatctgcgggtcaccacggtggcttcccacacttctgactcggacgttccttccggtgtcactgaggtggtcgtgaagctctttgactctgatcccatcactgtgacggtccctgtagaagtctccaggaagaaccctaaatttatggagaccgtggcggagaaagcgctgcaggaataccgcaaaaagcaccgggaggagtgagatgtggatgttgcttttgcacctacgggggcatctgagtccagctccccccaagatgagctgcagccccccagagagagctctgcacgtcaccaagtaaccaggccccagcctccaggcccccaactccgcccagcctctccccgctctggatcctgcactctaacactcgactctgctgctcatgggaagaacagaattgctcctgcatgcaactaattcaataaaactgtcttgtgagctgatcgcttggagggtcctctttttatgttgagttgctgcttcccggcatgccttcattttgctatggggggcaggcaggggggatggaaaataagtagaaacaaaaaagcagtggctaagatggtatagggactgtcataccagtgaagaataaaagggtgaagaataaaagggatatgatgacaaggttgatccacttcaagaattgcttgctttcaggaagagagatgtgtttcaacaagccaactaaaatatattgctgcaaatgg

SEQ ID NO: 7346 - protein, 296 aa, Homo sapiens [sequence omitted]

SEQ ID NO: 7347 - DNA, 852 bp, Homo sapiens
gtccaatcagggaagtaagtacgtcaataaggaaattcaaaatatgctcaacacctcctccttgctggagcagctgaacgagcagtttaactgggtgtcccggctggcaaacctcacgcaaggcgaagaccagtactatctgcgggtcaccacggtggcttcccacacttctgactcggacgttccttccggtgtcactgaggtggtcgtgaagctctttgactctgatcccatcactgtgacggtccctgtagaagtctccaggaagaaccctaaatttatggagaccgtggcggagaaagcgctgcaggaataccgcaaaaagcaccgggaggagtgagatgtggatgttgcttttgcacctacgggggcatctgagtccagctccccccaagatgagctgcagccccccagagagagctctgcacgtcaccaagtaaccaggccccagcctccaggcccccaactccgcccagcctctccccgctctggatcctgcactctaacactcgactctgctgctcatgggaagaacagaattgctcctgcatgcaactaattcaataaaactgtcttgtgagctgatcgcttggagggtcctctttttatgttgagttgctgcttcccggcatgccttcattttgctatggggggcaggcaggggggatggaaaataagtagaaacaaaaaagcagtggctaagatggtatagggactgtcataccagtgaagaataaaagggtgaagaataaaagggatatgatgacaaggttgatccacttcaagaattgcttgctttcaggaagagagatgtgtttcaacaagccaactaaaatatattgctgcaaatgg

SEQ ID NO: 7348 - protein, 98 aa, Homo sapiens; identical to SEQ ID NO: 7300

SEQ ID NO: 7349 - DNA, 508 bp, Homo sapiens
aagaaccctaaatttatggagaccgtggcggagaaagcgctgcaggaataccgcaaaaagcaccgggaggagtgagatgtggatgttgcttttgcacctacgggggcatctgagtccagctccccccaagatgagctgcagccccccagagagagctctgcacgtcaccaagtaaccaggccccagcctccaggcccccaactccgcccagcctctccccgctctggatcctgcactctaacactcgactctgctgctcatgggaagaacagaattgctcctgcatgcaactaattcaataaaactgtcttgtgagctgatcgcttggagggtcctctttttatgttgagttgctgcttcccggcatgccttcattttgctatggggggcaggcaggggggatggaaaataagtagaaacaaaaaagcagtggctaagatggtatagggactgtcataccagtgaagaataaaagggtgaagaataaaagggatatgatgacaaggtt

SEQ ID NO: 7350 - protein, 34 aa, Homo sapiens; identical to SEQ ID NO: 7330

SEQ ID NO: 7351 - DNA, 547 bp, Homo sapiens
gatcccatcactgtgacggtccctgtagaagtctccaggaagaaccctaaatttatggagaccgtggcggagaaagcgctgcaggaataccgcaaaaagcaccgggaggagtgagatgtggatgttgcttttgcacctacgggggcatctgagtccagctccccccaagatgagctgcagccccccagagagagctctgcacgtcaccaagtaaccaggccccagcctccaggcccccaactccgcccagcctctccccgctctggatcctgcactctaacactcgactctgctgctcatgggaagaacagaattgctcctgcatgcaactaattcaataaaactgtcttgtgagctgatcgcttggagggtcctctttttatgttgagttgctgcttcccggcatgccttcattttgctatggggggcaggcaggggggatggaaaataagtagaaacaaaaaagcagtggctaagatggtatagggactgtcataccagtgaagaataaaagggtgaagaataaaagggatatgatgacaaggtt

SEQ ID NO: 7352 - protein, 34 aa, Homo sapiens; identical to SEQ ID NO: 7330

SEQ ID NO: 7353 - DNA, 599 bp, Homo sapiens
ctcggacgttccttccggtgtcactgaggtggtcgtgaagctctttgactctgatcccatcactgtgacggtccctgtagaagtctccaggaagaaccctaaatttatggagaccgtggcggagaaagcgctgcaggaataccgcaaaaagcaccgggaggagtgagatgtggatgttgcttttgcacctacgggggcatctgagtccagctccccccaagatgagctgcagccccccagagagagctctgcacgtcaccaagtaaccaggccccagcctccaggcccccaactccgcccagcctctccccgctctggatcctgcactctaacactcgactctgctgctcatgggaagaacagaattgctcctgcatgcaactaattcaataaaactgtcttgtgagctgatcgcttggagggtcctctttttatgttgagttgctgcttcccggcatgccttcattttgctatggggggcaggcaggggggatggaaaataagtagaaacaaaaaagcagtggctaagatggtatagggactgtcataccagtgaagaataaaagggtgaagaataaaagggatatgatgacaaggtt

SEQ ID NO: 7354 - protein, 34 aa, Homo sapiens; identical to SEQ ID NO: 7330

SEQ ID NO: 7355 - DNA, 789 bp, Homo sapiens
gtccactgagctgtacttacgtctagatgtataagaagcatggggtcagctctctaggtttccttggagaagcaggaggacttccttatcagaagcctgacttctgttgcagagcgcatgcattttgaccacagtgtttcagctcttcccttttctcttgttccatttaggtggcttcccacacttctgactcggacgttccttccggtgtcactgaggtggtcgtgaagctctttgactctgatcccatcactgtgacggtccctgtagaagtctccaggaagaaccctaaatttatggagaccgtggcggagaaagcgctgcaggaataccgcaaaaagcaccgggaggagtgagatgtggatgttgcttttgcacctacgggggcatctgagtccagctccccccaagatgagctgcagccccccagagagagctctgcacgtcaccaagtaaccaggccccagcctccaggcccccaactccgcccagcctctccccgctctggatcctgcactctaacactcgactctgctgctcatgggaagaacagaattgctcctgcatgcaactaattcaataaaactgtcttgtgagctgatcgcttggagggtcctctttttatgttgagttgctgcttcccggcatgccttcattttgctatggggggcaggcaggggggatggaaaataagtagaaacaaaaaagcagtggctaagatggtatagggactgtcataccagtgaagaataaaagggtgaagaataaaagggatatgatgacaaggtt

SEQ ID NO: 7356 - protein, 36 aa, Homo sapiens; identical to SEQ ID NO: 7336

SEQ ID NO: 7357 - DNA, 1012 bp, Homo sapiens
aaaaaatcaaataaaacttatttctagtactgggaactcttctttttcttttctttcttccctccaggccctctggattccttttctaccctactctgaccaagggctgcttctaaagcaaatgtttggaaaccacttttattctttggggtgctccctgggctggtcatttgcagatgacatttgccccaacacatgagtgtctgtgaaccaggtccgttctgtccactgagctgtacttacgtctagatgtataagaagcatggggtcagctctctaggtttccttggagaagcaggaggacttccttatcagaagcctgacttctgttgcagagcgcatgcattttgaccacagtgtttcagctcttcccttttctcttgttccatttaggtggcttcccacacttctgactcggacgttccttccggtgtcactgaggtggtcgtgaagctctttgactctgatcccatcactgtgacggtccctgtagaagtctccaggaagaaccctaaatttatggagaccgtggcggagaaagcgctgcaggaataccgcaaaaagcaccgggaggagtgagatgtggatgttgcttttgcacctacgggggcatctgagtccagctccccccaagatgagctgcagccccccagagagagctctgcacgtcaccaagtaaccaggccccagcctccaggcccccaactccgcccagcctctccccgctctggatcctgcactctaacactcgactctgctgctcatgggaagaacagaattgctcctgcatgcaactaattcaataaaactgtcttgtgagctgatcgcttggagggtcctctttttatgttgagttgctgcttcccggcatgccttcattttgctatggggggcaggcaggggggatggaaaataagtagaaacaaaaaagcagtggctaagatggtatagggactgtcataccagtgaagaataaaagggtgaagaataaaagggatatgatgacaaggtt

SEQ ID NO: 7358 - protein, 36 aa, Homo sapiens; identical to SEQ ID NO: 7336

SEQ ID NO: 7359 - DNA, 850 bp, Homo sapiens
gactgttccaccaacaacccctcccaggctaagctgcggcgggagctcgacgaatccctccaggtcgctgagaggttgaccaggaaatacaacgagctgctaaagtcctaccagtggaagatgctcaacacctcctccttgctggagcagctgaacgagcagtttaactgggtgtcccggctggcaaacctcacgcaaggcgaagaccagtactatctgcgggtcaccacggtggcttcccacacttctgactcggacgttccttccggtgtcactgaggtggtcgtgaagctctttgactctgatcccatcactgtgacggtccctgtagaagtctccaggaagaaccctaaatttatggagaccgtggcggagaaagcgctgcaggaataccgcaaaaagcaccgggaggagtgagatgtggatgttgcttttgcacctacgggggcatctgagtccagctccccccaagatgagctgcagccccccagagagagctctgcacgtcaccaagtaaccaggccccagcctccaggcccccaactccgcccagcctctccccgctctggatcctgcactctaacactcgactctgctgctcatgggaagaacagaattgctcctgcatgcaactaattcaataaaactgtcttgtgagctgatcgcttggagggtcctctttttatgttgagttgctgcttcccggcatgccttcattttgctatggggggcaggcaggggggatggaaaataagtagaaacaaaaaagcagtggctaagatggtatagggactgtcataccagtgaagaataaaagggtgaagaataaaagggatatgatgacaaggtt

SEQ ID NO: 7360 - protein, 98 aa, Homo sapiens; identical to SEQ ID NO: 7300

SEQ ID NO: 7361 - DNA, 1357 bp, Homo sapiens
ttcctgaaccagagctcgcccttctacttctggatgaatggtgaccgcatcgactccctgctggagaacgaccggcagcagacgcacatgctggatgtcatgcaggaccacttcagccgcgcgtccagcatcatagacgagctcttccaggacaggttcttcacccgggagccccaggatacctaccactacctgcccttcagcctgccccaccggaggcctcacttcttctttcccaagtcccgcatcgtccgcagcttgatgcccttctctccgtacgagcccctgaacttccacgccatgttccagcccttccttgagatgatacacgaggctcagcaggccatggacatccacttccatagcccggccttccagcacccgccaacagaattcatacgagaaggcgacgatgaccggactgtgtgccgggagatccgccacaactccacgggctgcctgcggatgaaggaccagtgtgacaagtgccgggagatcttgtctgtggactgttccaccaacaacccctcccaggctaagctgcggcgggagctcgacgaatccctccaggtcgctgagaggttgaccaggaaatacaacgagctgctaaagtcctaccagtggaagatgctcaacacctcctccttgctggagcagctgaacgagcagtttaactgggtgtcccggctggcaaacctcacgcaaggcgaagaccagtactatctgcgggtcaccacggtggcttcccacacttctgactcggacgttccttccggtgtcactgaggtggtcgtgaagctctttgactctgatcccatcactgtgacggtccctgtagaagtctccaggaagaaccctaaatttatggagaccgtggcggagaaagcgctgcaggaataccgcaaaaagcaccgggaggagtgagatgtggatgttgcttttgcacctacgggggcatctgagtccagctccccccaagatgagctgcagccccccagagagagctctgcacgtcaccaagtaaccaggccccagcctccaggcccccaactccgcccagcctctccccgctctggatcctgcactctaacactcgactctgctgctcatgggaagaacagaattgctcctgcatgcaactaattcaataaaactgtcttgtgagctgatcgcttggagggtcctctttttatgttgagttgctgcttcccggcatgccttcattttgctatggggggcaggcaggggggatggaaaataagtagaaacaaaaaagcagtggctaagatggtatagggactgtcataccagtgaagaataaaagggtgaagaataaaagggatatgatgacaaggtt

SEQ ID NO: 7362 - protein, 296 aa, Homo sapiens [sequence omitted]

SEQ ID NO: 7363 - DNA, 1370 bp, Homo sapiens
ccagcttgaggagttcctgaaccagagctcgcccttctacttctggatgaatggtgaccgcatcgactccctgctggagaacgaccggcagcagacgcacatgctggatgtcatgcaggaccacttcagccgcgcgtccagcatcatagacgagctcttccaggacaggttcttcacccgggagccccaggatacctaccactacctgcccttcagcctgccccaccggaggcctcacttcttctttcccaagtcccgcatcgtccgcagcttgatgcccttctctccgtacgagcccctgaacttccacgccatgttccagcccttccttgagatgatacacgaggctcagcaggccatggacatccacttccatagcccggccttccagcacccgccaacagaattcatacgagaaggcgacgatgaccggactgtgtgccgggagatccgccacaactccacgggctgcctgcggatgaaggaccagtgtgacaagtgccgggagatcttgtctgtggactgttccaccaacaacccctcccaggctaagctgcggcgggagctcgacgaatccctccaggtcgctgagaggttgaccaggaaatacaacgagctgctaaagtcctaccagtggaagatgctcaacacctcctccttgctggagcagctgaacgagcagtttaactgggtgtcccggctggcaaacctcacgcaaggcgaagaccagtactatctgcgggtcaccacggtggcttcccacacttctgactcggacgttccttccggtgtcactgaggtggtcgtgaagctctttgactctgatcccatcactgtgacggtccctgtagaagtctccaggaagaaccctaaatttatggagaccgtggcggagaaagcgctgcaggaataccgcaaaaagcaccgggaggagtgagatgtggatgttgcttttgcacctacgggggcatctgagtccagctccccccaagatgagctgcagccccccagagagagctctgcacgtcaccaagtaaccaggccccagcctccaggcccccaactccgcccagcctctccccgctctggatcctgcactctaacactcgactctgctgctcatgggaagaacagaattgctcctgcatgcaactaattcaataaaactgtcttgtgagctgatcgcttggagggtcctctttttatgttgagttgctgcttcccggcatgccttcattttgctatggggggcaggcaggggggatggaaaataagtagaaacaaaaaagcagtggctaagatggtatagggactgtcataccagtgaagaataaaagggtgaagaataaaagggatatgatgacaaggtt

SEQ ID NO: 7364 - protein, 296 aa, Homo sapiens [sequence omitted]

SEQ ID NO: 7365 - DNA, 773 bp, Homo sapiens
gtccaatcagggaagtaagtacgtcaataaggaaattcaaaatatgctcaacacctcctccttgctggagcagctgaacgagcagtttaactgggtgtcccggctggcaaacctcacgcaaggcgaagaccagtactatctgcgggtcaccacggtggcttcccacacttctgactcggacgttccttccggtgtcactgaggtggtcgtgaagctctttgactctgatcccatcactgtgacggtccctgtagaagtctccaggaagaaccctaaatttatggagaccgtggcggagaaagcgctgcaggaataccgcaaaaagcaccgggaggagtgagatgtggatgttgcttttgcacctacgggggcatctgagtccagctccccccaagatgagctgcagccccccagagagagctctgcacgtcaccaagtaaccaggccccagcctccaggcccccaactccgcccagcctctccccgctctggatcctgcactctaacactcgactctgctgctcatgggaagaacagaattgctcctgcatgcaactaattcaataaaactgtcttgtgagctgatcgcttggagggtcctctttttatgttgagttgctgcttcccggcatgccttcattttgctatggggggcaggcaggggggatggaaaataagtagaaacaaaaaagcagtggctaagatggtatagggactgtcataccagtgaagaataaaagggtgaagaataaaagggatatgatgacaaggtt

SEQ ID NO: 7366 - protein, 98 aa, Homo sapiens; identical to SEQ ID NO: 7300

SEQ ID NO: 7367 - DNA, 666 bp, Homo sapiens
gactgttccaccaacaacccctcccaggctaagctgcggcgggagctcgacgaatccctccaggtcgctgagaggttgaccaggaaatacaacgagctgctaaagtcctaccagtggaagatgctcaacacctcctccttgctggagcagctgaacgagcagtttaactgggtgtcccggctggcaaacctcacgcaaggcgaagaccagtactatctgcgggtcaccacggtggcttcccacacttctgactcggacgttccttccggtgtcactgaggtggtcgtgaagctctttgactctgatcccatcactgtgacggtccctgtagaagtctccaggaagaaccctaaatttatggagaccgtggcggagaaagcgctgcaggaataccgcaaaaagcaccgggaggagtgagatgtggatgttgcttttgcacctacgggggcatctgagtccagctccccccaagatgagctgcagccccccagagagagctctgcacgtcaccaagtaaccaggccccagcctccaggcccccaactccgcccagcctctccccgctctggatcctgcactctaacactcgactctgctgctcatgggaagaacagaattgctcctgcatgcaactaattcaataaaactgtcttgtgagctgatcgc

SEQ ID NO: 7368 - protein, 98 aa, Homo sapiens; identical to SEQ ID NO: 7300

SEQ ID NO: 7369 - DNA, 1186 bp, Homo sapiens
ccagcttgaggagttcctgaaccagagctcgcccttctacttctggatgaatggtgaccgcatcgactccctgctggagaacgaccggcagcagacgcacatgctggatgtcatgcaggaccacttcagccgcgcgtccagcatcatagacgagctcttccaggacaggttcttcacccgggagccccaggatacctaccactacctgcccttcagcctgccccaccggaggcctcacttcttctttcccaagtcccgcatcgtccgcagcttgatgcccttctctccgtacgagcccctgaacttccacgccatgttccagcccttccttgagatgatacacgaggctcagcaggccatggacatccacttccatagcccggccttccagcacccgccaacagaattcatacgagaaggcgacgatgaccggactgtgtgccgggagatccgccacaactccacgggctgcctgcggatgaaggaccagtgtgacaagtgccgggagatcttgtctgtggactgttccaccaacaacccctcccaggctaagctgcggcgggagctcgacgaatccctccaggtcgctgagaggttgaccaggaaatacaacgagctgctaaagtcctaccagtggaagatgctcaacacctcctccttgctggagcagctgaacgagcagtttaactgggtgtcccggctggcaaacctcacgcaaggcgaagaccagtactatctgcgggtcaccacggtggcttcccacacttctgactcggacgttccttccggtgtcactgaggtggtcgtgaagctctttgactctgatcccatcactgtgacggtccctgtagaagtctccaggaagaaccctaaatttatggagaccgtggcggagaaagcgctgcaggaataccgcaaaaagcaccgggaggagtgagatgtggatgttgcttttgcacctacgggggcatctgagtccagctccccccaagatgagctgcagccccccagagagagctctgcacgtcaccaagtaaccaggccccagcctccaggcccccaactccgcccagcctctccccgctctggatcctgcactctaacactcgactctgctgctcatgggaagaacagaattgctcctgcatgcaactaattcaataaaactgtcttgtgagctgatcgc

SEQ ID NO: 7370 - protein, 296 aa, Homo sapiens [sequence omitted]

SEQ ID NO: 7371 - DNA, 2385 bp, Homo sapiens
catccttccaaagggactttctctgggaagcctgctcctcgggccactgcgaaccctctctactctccgaagggaattgtccttcctggcttccactacttccacccctgaatgcacaggcagcccggcccaagtctcccactagggatgcagatggattcggtgtgaagggctggctgctgttgcctccggctcttgaaagtcaagttcaggtggtgctgagactccctgggggctgcagcgctgtggtgaatggggagcgtctgctggggtgaaggtttaggtgcacattgcagaggacgtggctggtctctgggatgcagtccctctgtggaggtggcatggggagggacggatgcatgacctaaggggggtattttcagtgtctgacatgatcgataccactctggacaaggaggccaggatgcagaaagcctgtgtgcctcgctgattgtcggggaggatgtggcttggacaagagcctggttcctccgatgccagggttcttgtttcttccactcaacattgctgtcctgcagtccctccctccctgcacctcctgccttcgctttcattcgaggtgtccatggcaagtctggtcatttccccccatttcctcaggaataaaagtgcagcagtgcctgctgtggggacagctgagggcagtgaggccctggggagctgctgcaggcagcaggtgggcgggacgccagcaggctgtctagctgttcccatgatggtctcctgttctctgcagaggcgtgcaaagactccagaattggaggcatgatgaagactctgctgctgtttgtggggctgctgctgacctgggagagtgggcaggtcctgggggaccagacggtctcagacaatgagctccaggaaatgtccaatcagggaagtaagtacgtcaataaggaaattcaaaatgctgtcaacggggtgaaacagataaagactctcatagaaaaaacaaacgaagagcgcaagacactgctcagcaacctagaagaagccaagaagaagaaagaggatgccctaaatgagaccagggaatcagagacaaagctgaaggagctcccaggagtgtgcaatgagaccatgatggccctctgggaagagtgtaagccctgcctgaaacagacctgcatgaagttctacgcacgcgtctgcagaagtggctcaggcctggttggccgccagcttgaggagttcctgaaccagagctcgcccttctacttctggatgaatggtgaccgcatcgactccctgctggagaacgaccggcagcagacgcacatgctggatgtcatgcaggaccacttcagccgcgcgtccagcatcatagacgagctcttccaggacaggttcttcacccgggagccccaggatacctaccactacctgcccttcagcctgccccaccggaggcctcacttcttctttcccaagtcccgcatcgtccgcagcttgatgcccttctctccgtacgagcccctgaacttccacgccatgttccagcccttccttgagatgatacacgaggctcagcaggccatggacatccacttccatagcccggccttccagcacccgccaacagaattcatacgagaaggcgacgatgaccggactgtgtgccgggagatccgccacaactccacgggctgcctgcggatgaaggaccagtgtgacaagtgccgggagatcttgtctgtggactgttccaccaacaacccctcccaggctaagctgcggcgggagctcgacgaatccctccaggtcgctgagaggttgaccaggaaatacaacgagctgctaaagtcctaccagtggaagatgctcaacacctcctccttgctggagcagctgaacgagcagtttaactgggtgtcccggctggcaaacctcacgcaaggcgaagaccagtactatctgcgggtcaccacggtggcttcccacacttctgactcggacgttccttccggtgtcactgaggtggtcgtgaagctctttgactctgatcccatcactgtgacggtccctgtagaagtctccaggaagaaccctaaatttatggagaccgtggcggagaaagcgctgcaggaataccgcaaaaagcaccgggaggagtgagatgtggatgttgcttttgcacctacgggggcatctgagtccagctccccccaagatgagctgcagccccccagagagagctctgcacgtcaccaagtaaccaggccccagcctccaggcccccaactccgcccagcctctccccgctctggatcctgcactctaacactcgactctgctgctcatgggaagaacagaattgctcctgcatgcaactaattcaataaaactgtcttgtgagctgatcgc

SEQ ID NO: 7372 - protein, 449 aa, Homo sapiens; identical to SEQ ID NO: 1024

SEQ ID NO: 7373 - DNA, 1597 bp, Homo sapiens
aacgcggcgtcgccaggaggagcgcgcgggcacagggtgccgctgaccgaggcgtgcaaagactccagaattggaggcatgatgaagactctgctgctgtttgtggggctgctgctgacctgggagagtgggcaggtcctgggggaccagacggtctcagacaatgagctccaggaaatgtccaatcagggaagtaagtacgtcaataaggaaattcaaaatgctgtcaacggggtgaaacagataaagactctcatagaaaaaacaaacgaagagcgcaagacactgctcagcaacctagaagaagccaagaagaagaaagaggatgccctaaatgagaccagggaatcagagacaaagctgaaggagctcccaggagtgtgcaatgagaccatgatggccctctgggaagagtgtaagccctttcctgaaccagagctcgcccttctacttctggatgaatggtgaccgcatcgactccctgctggagaacgaccggcagcagacgcacatgctggatgtcatgcaggaccacttcagccgcgcgtccagcatcatagacgagctcttccaggacaggttcttcacccgggagccccaggatacctaccactacctgcccttcagcctgccccaccggaggcctcacttcttctttcccaagtcccgcatcgtccgcagcttgatgcccttctctccgtacgagcccctgaacttccacgccatgttccagcccttccttgagatgatacacgaggctcagcaggccatggacatccacttccatagcccggccttccagcacccgccaacagaattcatacgagaaggcgacgatgaccggactgtgtgccgggagatccgccacaactccacgggctgcctgcggatgaaggaccagtgtgacaagtgccgggagatcttgtctgtggactgttccaccaacaacccctcccaggctaagctgcggcgggagctcgacgaatccctccaggtcgctgagaggttgaccaggaaatacaacgagctgctaaagtcctaccagtggaagatgctcaacacctcctccttgctggagcagctgaacgagcagtttaactgggtgtcccggctggcaaacctcacgcaaggcgaagaccagtactatctgcgggtcaccacggtggcttcccacacttctgactcggacgttccttccggtgtcactgaggtggtcgtgaagctctttgactctgatcccatcactgtgacggtccctgtagaagtctccaggaagaaccctaaatttatggagaccgtggcggagaaagcgctgcaggaataccgcaaaaagcaccgggaggagtgagatgtggatgttgcttttgcacctacgggggcatctgagtccagctccccccaagatgagctgcagccccccagagagagctctgcacgtcaccaagtaaccaggccccagcctccaggcccccaactccgcccagcctctccccgctctggatcctgcactctaacactcgactctgctgctcatgggaagaacagaattgctcctgcatgcaactaattcaataaaactgtcttgtgagctgatcgc

SEQ ID NO: 7374 - protein, 296 aa, Homo sapiens [sequence omitted]

SEQ ID NO: 7375 - DNA, 1784 bp, Homo sapiens
ctttccgcggcattctttgggcgtgagtcatgcaggtttgcagccagccccaaagggggtgtgtgcgcgagcagagcgctataaatacggcgcctcccagtgcccacaacgcggcgtcgccaggaggagcgcgcgggcacagggtgccgctgaccgaggcgtgcaaagactccagaattggaggcatgatgaagactctgctgctgtttgtggggctgctgctgacctgggagagtgggcaggtcctgggggaccagacggtctcagacaatgagctccaggaaatgtccaatcagggaagtaagtacgtcaataaggaaattcaaaatgctgtcaacggggtgaaacagataaagactctcatagaaaaaacaaacgaagagcgcaagacactgctcagcaacctagaagaagccaagaagaagaaagaggatgccctaaatgagaccagggaatcagagacaaagctgaaggagctcccaggagtgtgcaatgagaccatgatggccctctgggaagagtgtaagccctgcctgaaacagacctgcatgaagttctacgcacgcgtctgcagaagtggctcaggcctggttggccgccagcttgaggagttcctgaaccagagctcgcccttctacttctggatgaatggtgaccgcatcgactccctgctggagaacgaccggcagcagacgcacatgctggatgtcatgcaggaccacttcagccgcgcgtccagcatcatagacgagctcttccaggacaggttcttcacccgggagccccaggatacctaccactacctgcccttcagcctgccccaccggaggcctcacttcttctttcccaagtcccgcatcgtccgcagcttgatgcccttctctccgtacgagcccctgaacttccacgccatgttccagcccttccttgagatgatacacgaggctcagcaggccatggacatccacttccatagcccggccttccagcacccgccaacagaattcatacgagaaggcgacgatgaccggactgtgtgccgggagatccgccacaactccacgggctgcctgcggatgaaggaccagtgtgacaagtgccgggagatcttgtctgtggactgttccaccaacaacccctcccaggctaagctgcggcgggagctcgacgaatccctccaggtcgctgagaggttgaccaggaaatacaacgagctgctaaagtcctaccagtggaagatgctcaacacctcctccttgctggagcagctgaacgagcagtttaactgggtgtcccggctggcaaacctcacgcaaggcgaagaccagtactatctgcgggtcaccacggtggcttcccacacttctgactcggacgttccttccggtgtcactgaggtggtcgtgaagctctttgactctgatcccatcactgtgacggtccctgtagaagtctccaggaagaaccctaaatttatggagaccgtggcggagaaagcgctgcaggaataccgcaaaaagcaccgggaggagtgagatgtggatgttgcttttgcacctacgggggcatctgagtccagctccccccaagatgagctgcagccccccagagagagctctgcacgtcaccaagtaaccaggccccagcctccaggcccccaactccgcccagcctctccccgctctggatcctgcactctaacactcgactctgctgctcatgggaagaacagaattgctcctgcatgcaactaattcaataaaactgtcttgtgagctgatcgc

SEQ ID NO: 7376 - protein, 501 aa, Homo sapiens; identical to SEQ ID NO: 1022

SEQ ID NO: 7377 - DNA, 603 bp, Homo sapiens
gtccactgagctgtacttacgtctagatgtataagaagcatggggtcagctctctaggtttccttggagaagcaggaggacttccttatcagaagcctgacttctgttgcagagcgcatgcattttgaccacagtgtttcagctcttcccttttctcttgttccatttaggtggcttcccacacttctgactcggacgttccttccggtgtcactgaggtggtcgtgaagctctttgactctgatcccatcactgtgacggtccctgtagaagtctccaggaagaaccctaaatttatggagaccgtggcggagaaagcgctgcaggaataccgcaaaaagcaccgggaggagtgagatgtggatgttgcttttgcacctacgggggcatctgagtccagctccccccaagatgagctgcagccccccagagagagctctgcacgtcaccaagtaaccaggccccagcctccaggcccccaactccgcccagcctctccccgctctggatcctgcactctaacactcgactctgctgctcatgggaagaacagaattgctcctgcatgcaactaattcaataaaactgtcttgtgagctgatc

SEQ ID NO: 7378 - protein, 36 aa, Homo sapiens; identical to SEQ ID NO: 7336

SEQ ID NO: 7379 - DNA, 524 bp, Homo sapiens
gactgttccaccaacaacccctcccaggctaagctgcggcgggagctcgacgaatccctccaggtcgctgagaggttgaccaggaaatacaacgagctgctaaagtcctaccagtggaagatgctcaacacctcctccttgctggagcagctgaacgagcagtttaactgggtgtcccggctggcaaacctcacgcaaggcgaagaaccctaaatttatggagaccgtggcggagaaagcgctgcaggaataccgcaaaaagcaccgggaggagtgagatgtggatgttgcttttgcacctacgggggcatctgagtccagctccccccaagatgagctgcagccccccagagagagctctgcacgtcaccaagtaaccaggccccagcctccaggcccccaactccgcccagcctctccccgctctggatcctgcactctaacactcgactctgctgctcatgggaagaacagaattgctcctgcatgcaactaattcaataaaactgtcttgtgagctgatc

SEQ ID NO: 7380 - protein, 30 aa, Homo sapiens
MLNTSSLLEQLNEQFNWVSRLANLTQGEEP

SEQ ID NO: 7381 - DNA, 600 bp, Homo sapiens
gactgttccaccaacaacccctcccaggctaagctgcggcgggagctcgacgaatccctccaggtcgctgagaggttgaccaggaaatacaacgagctgctaaagtcctaccagtggaagatgctcaacacctcctccttgctggagcagctgaacgagcagtttaactgggtgtcccggctggcaaacctcacgcaaggcgaagaccagtactatctgcgggtcaccacggtgagtctgatcccatcactgtgacggtccctgtagaagtctccaggaagaaccctaaatttatggagaccgtggcggagaaagcgctgcaggaataccgcaaaaagcaccgggaggagtgagatgtggatgttgcttttgcacctacgggggcatctgagtccagctccccccaagatgagctgcagccccccagagagagctctgcacgtcaccaagtaaccaggccccagcctccaggcccccaactccgcccagcctctccccgctctggatcctgcactctaacactcgactctgctgctcatgggaagaacagaattgctcctgcatgcaactaattcaataaaactgtcttgtgagctgatc

SEQ ID NO: 7382 - protein, 44 aa, Homo sapiens
MLNTSSLLEQLNEQFNWVSRLANLTQGEDQYYLRVTTVSLIPSL

SEQ ID NO: 7383 - DNA, 587 bp, Homo sapiens
gtccaatcagggaagtaagtacgtcaataaggaaattcaaaatatgctcaacacctcctccttgctggagcagctgaacgagcagtttaactgggtgtcccggctggcaaacctcacgcaaggcgaagaccagtactatctgcgggtcaccacggtggcttcccacacttctgactcggacgttccttccggtgtcactgaggtggtcgtgaagctctttgactctgatcccatcactgtgacggtccctgtagaagtctccaggaagaaccctaaatttatggagaccgtggcggagaaagcgctgcaggaataccgcaaaaagcaccgggaggagtgagatgtggatgttgcttttgcacctacgggggcatctgagtccagctccccccaagatgagctgcagccccccagagagagctctgcacgtcaccaagtaaccaggccccagcctccaggcccccaactccgcccagcctctccccgctctggatcctgcactctaacactcgactctgctgctcatgggaagaacagaattgctcctgcatgcaactaattcaataaaactgtcttgtgagctgatc

SEQ ID NO: 7384 - protein, 98 aa, Homo sapiens; identical to SEQ ID NO: 7300

SEQ ID NO: 7385 - DNA, 2926 bp, Homo sapiens
ctttccgcggcattctttgggcgtgagtcatgcaggtttgcagccagccccaaagggggtgtgtgcgcgagcagagcgctataaatacggcgcctcccagtgcccacaacgcggcgtcgccaggaggagcgcgcgggcacagggtgccgctgaccgaggcgtgcaaagactccagaattggaggcatgatgaagactctgctgctgtttgtggggctgctgctgacctgggagagtgggcaggtcctgggggaccagacggtctcagacaatgagctccaggaaatgtccaatcagggaagtaagtacgtcaataaggaaattcaaaatgctgtcaacggggtgaaacagataaagactctcatagaaaaaacaaacgaagagcgcaagacactgctcagcaacctagaagaagccaagaagaagaaagaggatgccctaaatgagaccagggaatcagagacaaagctgaaggagctcccaggagtgtgcaatgagaccatgatggccctctgggaagagtgtaagccctgcctgaaacagacctgcatgaagttctacgcacgcgtctgcagaagtggctcaggcctggttggccgccagcttgaggagttcctgaaccagagctcgcccttctacttctggatgaatggtgaccgcatcgactccctgctggagaacgaccggcagcagacgcacatgctggatgtcatgcaggaccacttcagccgcgcgtccagcatcatagacgagctcttccaggacaggttcttcacccgggagccccaggatacctaccactacctgcccttcagcctgccccaccggaggcctcacttcttctttcccaagtcccgcatcgtccgcagcttgatgcccttctctccgtacgagcccctgaacttccacgccatgttccagcccttccttgagatgatacacgaggctcagcaggccatggacatccacttccatagcccggccttccagcacccgccaacagaattcatacgagaaggcgacgatgaccggactgtgtgccgggagatccgccacaactccacgggctgcctgcggatgaaggaccagtgtgacaagtgccgggagatcttgtctgtggactgttccaccaacaacccctcccaggctaagctgcggcgggagctcgacgaatccctccaggtcgctgagaggttgaccaggaaatacaacgagctgctaaagtcctaccagtggaagatgctcaacacctcctccttgctggagcagctgaacgagcagtttaactgggtgtcccggctggcaaacctcacgcaaggcgaagaccagtactatctgcgggtcaccacggtgagctgtgtcccggccacatgctgtggctcgggagcccgagctgtgatcgggagcaggggcatgtgtgcttttgactgagcatttatcacacggcagaaaatagaaaactttaggcgcccctgttgccttgaagcctcatcacccactcagggaaaatataaccctgctttacaaaggagcaaagtaagagaggttccacagcttggccaaggtgtgatagctgacagatgacttggacgggtatttgaacctgactgcctggctgccaagcctgtattttgttgttgttgtttttgttttggtgcacaaatctgtgaataaaccagaagcctctgttcttttctcaaagctacaaggctgccctctggcatgtaaaatggcttatgaattagtacatcactctctgccagtgataaaaacttctctctaggccagacatggtggctcatgcctgtaatcccagcactttgggaggcagaggcaagaggattgcttgaggccaggaatttgagaccagcctgggcaacacagcaagattccctctctacaaaaaatacaaaaatcagtcaggtgtggtggcacacacttgtagtcccagctattcaggaggctgaggtgggaggattgcctgagccctgaagtggaggctgcagtgagctgtgatcacgccactgcactccagcctgggtgacagagtgagactctgtctcttaaaaaatatatatatataaaataataaaataaagttaaaaaatcaaataaaacttatttctagtactgggaactcttctttttcttttctttcttccctccaggccctctggattccttttctaccctactctgaccaagggctgcttctaaagcaaatgtttggaaaccacttttattctttggggtgctccctgggctggtcatttgcagatgacatttgccccaacacatgagtgtctgtgaaccaggtccgttctgtccactgagctgtacttacgtctagatgtataagaagcatggggtcagctctctaggtttccttggagaagcaggaggacttccttatcagaagcctgacttctgttgcagagcgcatgcattttgaccacagtgtttcagctcttcccttttctcttgttccatttaggtggcttcccacacttctgactcggacgttccttccggtgtcactgaggtggtcgtgaagctctttgactctgatcccatcactgtgacggtccctgtagaagtctccaggaagaaccctaaatttatggagaccgtggcggagaaagcgctgcaggaataccgcaaaaagcaccgggaggagtgagatgtggatgttgcttttgcacctacgggggcatctgagtccagctccccccaagatgagctgcagccccccagagagagctctgcacgtcaccaagtaaccaggccccagcctccaggcccccaactccgcccagcctctccccgctctggatcctgcactctaacactcgactctgctgctcatgggaagaacagaattgctcctgcatgcaactaattcaataaaactgtcttgtgagctgatc

SEQ ID NO: 7386 - protein, 466 aa, Homo sapiens
MQVCSQPQRGCVREQSAINTAPPSAHNAASPGGARGHRVPLTEACKDSRIGGMMKTLLLFVGLLLTWESGQVLGDQTVSDNELQEMSNQGSKYVNKEIQNAVNGVKQIKTLIEKTNEERKTLLSNLEEAKKKKEDALNETRESETKLKELPGVCNETMMALWEECKPCLKQTCMKFYARVCRSGSGLVGRQLEEFLNQSSPFYFWMNGDRIDSLLENDRQQTHMLDVMQDHFSRASSIIDELFQDRFFTREPQDTYHYLPFSLPHRRPHFFFPKSRIVRSLMPFSPYEPLNFHAMFQPFLEMIHEAQQAMDIHFHSPAFQHPPTEFIREGDDDRTVCREIRHNSTGCLRMKDQCDKCREILSVDCSTNNPSQAKLRRELDESLQVAERLTRKYNELLKSYQWKMLNTSSLLEQLNEQFNWVSRLANLTQGEDQYYLRVTTVSCVPATCCGSGARAVIGSRGMCAFD

SEQ ID NO: 7387 - DNA, 410 bp, Homo sapiens
gactgttccaccaacaacccctcccaggctaagctgcggcgggagctcgacgaatccctccaggtcgctgagaggttgaccaggaaatacaacgagctgctaaagtcctaccagtggaagatgctcaacacctcctccttgctggagcagctgaacgagcagtttaactgggtgtcccggctggcaaacctcacgcaaggcgaagaccagtactatctgcgggtcaccacggtggcttcccacacttctgactcggacgttccttccggtgtcactgaggtggtcgtgaagctctttgactctgatcccatcactgtgacggtccctgtagaagtctccaggaagaaccctaaatttatggagaccgtggcggagaaagcgctgcaggaataccgcaaaaagcaccggta

SEQ ID NO: 7388 - protein, 95 aa, Homo sapiens
MLNTSSLLEQLNEQFNWVSRLANLTQGEDQYYLRVTTVASHTSDSDVPSGVTEVVVKLFDSDPITVTVPVEVSRKNPKFMETVAEKALQEYRKKH

SEQ ID NO: 7389 - DNA, 516 bp, Homo sapiens
agaaggcgacgatgaccggactgtgtgccgggagatccgccacaactccacgggctgcctgcggatgaaggaccagtgtgacaagtgccgggagatcttgtctgtggactgttccaccaacaacccctcccaggctaagctgcggcgggagctcgacgaatccctccaggtcgctgagaggttgaccaggaaatacaacgagctgctaaagtcctaccagtggaagatgctcaacacctcctccttgctggagcagctgaacgagcagtttaactgggtgtcccggctggcaaacctcacgcaaggcgaagaccagtactatctgcgggtcaccacggtggcttcccacacttctgactcggacgttccttccggtgtcactgaggtggtcgtgaagctctttgactctgatcccatcactgtgacggtccctgtagaagtctccaggaagaaccctaaatttatggagaccgtggcggagaaagcgctgcaggaataccgcaaaaagcaccggta

SEQ ID NO: 7390 - protein, 149 aa, Homo sapiens
MKDQCDKCREILSVDCSTNNPSQAKLRRELDESLQVAERLTRKYNELLKSYQWKMLNTSSLLEQLNEQFNWVSRLANLTQGEDQYYLRVTTVASHTSDSDVPSGVTEVVVKLFDSDPITVTVPVEVSRKNPKFMETVAEKALQEYRKKH

SEQ ID NO: 7391 - DNA, 930 bp, Homo sapiens
ccagcttgaggagttcctgaaccagagctcgcccttctacttctggatgaatggtgaccgcatcgactccctgctggagaacgaccggcagcagacgcacatgctggatgtcatgcaggaccacttcagccgcgcgtccagcatcatagacgagctcttccaggacaggttcttcacccgggagccccaggatacctaccactacctgcccttcagcctgccccaccggaggcctcacttcttctttcccaagtcccgcatcgtccgcagcttgatgcccttctctccgtacgagcccctgaacttccacgccatgttccagcccttccttgagatgatacacgaggctcagcaggccatggacatccacttccatagcccggccttccagcacccgccaacagaattcatacgagaaggcgacgatgaccggactgtgtgccgggagatccgccacaactccacgggctgcctgcggatgaaggaccagtgtgacaagtgccgggagatcttgtctgtggactgttccaccaacaacccctcccaggctaagctgcggcgggagctcgacgaatccctccaggtcgctgagaggttgaccaggaaatacaacgagctgctaaagtcctaccagtggaagatgctcaacacctcctccttgctggagcagctgaacgagcagtttaactgggtgtcccggctggcaaacctcacgcaaggcgaagaccagtactatctgcgggtcaccacggtggcttcccacacttctgactcggacgttccttccggtgtcactgaggtggtcgtgaagctctttgactctgatcccatcactgtgacggtccctgtagaagtctccaggaagaaccctaaatttatggagaccgtggcggagaaagcgctgcaggaataccgcaaaaagcaccggta

SEQ ID NO: 7392 - protein, 293 aa, Homo sapiens
MNGDRIDSLLENDRQQTHMLDVMQDHFSRASSIIDELFQDRFFTREPQDTYHYLPFSLPHRRPHFFFPKSRIVRSLMPFSPYEPLNFHAMFQPFLEMIHEAQQAMDIHFHSPAFQHPPTEFIREGDDDRTVCREIRHNSTGCLRMKDQCDKCREILSVDCSTNNPSQAKLRRELDESLQVAERLTRKYNELLKSYQWKMLNTSSLLEQLNEQFNWVSRLANLTQGEDQYYLRVTTVASHTSDSDVPSGVTEVVVKLFDSDPITVTVPVEVSRKNPKFMETVAEKALQEYRKKH

SEQ ID NO: 7393 - DNA, 1363 bp, Homo sapiens
ccagcttgaggagttcctgaaccagagctcgcccttctacttctggatgaatggtgaccgcatcgactccctgctggagaacgaccggcagcagacgcacatgctggatgtcatgcaggaccacttcagccgcgcgtccagcatcatagacgagctcttccaggacaggttcttcacccgggagccccaggatacctaccactacctgcccttcagcctgccccaccggaggcctcacttcttctttcccaagtcccgcatcgtccgcagcttgatgcccttctctccgtacgagcccctgaacttccacgccatgttccagcccttccttgagatgatacacgaggctcagcaggccatggacatccacttccatagcccggccttccagcacccgccaacagaattcatacgagaaggcgacgatgaccggactgtgtgccgggagatccgccacaactccacgggctgcctgcggatgaaggaccagtgtgacaagtgccgggagatcttgtctgtggactgttccaccaacaacccctcccaggctaagctgcggcgggagctcgacgaatccctccaggtcgctgagaggttgaccaggaaatacaacgagctgctaaagtcctaccagtggaagatgctcaacacctcctccttgctggagcagctgaacgagcagtttaactgggtgtcccggctggcaaacctcacgcaaggcgaagaccagtactatctgcgggtcaccacggtgagctgtgtcccggccacatgctgtggctcgggagcccgagctgtgatcgggagcaggggcatgtgtgcttttgactgagcatttatcacacggcagaaaatagaaaactttaggcgcccctgttgccttgaagcctcatcacccactcagggaaaatataaccctgctttacaaaggagcaaagtaagagaggttccacagcttggccaaggtgtgatagctgacagatgacttggacgggtatttgaacctgactgcctggctgccaagcctgtattttgttgttgttgtttttgttttggtgcacaaatctgtgaataaaccagaagcctctgttcttttctcaaagctacaaggctgccctctggcatgtaaaatggcttatgaattagtacatcactctctgccagtgataaaaacttctctctaggccagacatggtggctcatgcctgtaatcccagcactttgggaggcagaggcaagaggattgcttgaggccaggaatttgagaccagcctgggcaacacagcaagattccctctctacaaaaaatacaaaaatcagtcaggtgtggtggcacacacttgtagtcccagctattcaggag

SEQ ID NO: 7394 - protein, 261 aa, Homo sapiens
MNGDRIDSLLENDRQQTHMLDVMQDHFSRASSIIDELFQDRFFTREPQDTYHYLPFSLPHRRPHFFFPKSRIVRSLMPFSPYEPLNFHAMFQPFLEMIHEAQQAMDIHFHSPAFQHPPTEFIREGDDDRTVCREIRHNSTGCLRMKDQCDKCREILSVDCSTNNPSQAKLRRELDESLQVAERLTRKYNELLKSYQWKMLNTSSLLEQLNEQFNWVSRLANLTQGEDQYYLRVTTVSCVPATCCGSGARAVIGSRGMCAFD

SEQ ID NO: 7395 - DNA, 1961 bp, Homo sapiens
ctttccgcggcattctttgggcgtgagtcatgcaggtttgcagccagccccaaagggggtgtgtgcgcgagcagagcgctataaatacggcgcctcccagtgcccacaacgcggcgtcgccaggaggagcgcgcgggcacagggtgccgctgaccgaggcgtgcaaagactccagaattggaggcatgatgaagactctgctgctgtttgtggggctgctgctgacctgggagagtgggcaggtcctgggggaccagacggtctcagacaatgagctccaggaaatgtccaatcagggaagtaagtacgtcaataaggaaattcaaaatgctgtcaacggggtgaaacagataaagactctcatagaaaaaacaaacgaagagcgcaagacactgctcagcaacctagaagaagccaagaagaagaaagaggatgccctaaatgagaccagggaatcagagacaaagctgaaggagctcccaggagtgtgcaatgagaccatgatggccctctgggaagagtgtaagccctgcctgaaacagacctgcatgaagttctacgcacgcgtctgcagaagtggctcaggcctggttggccgccagcttgaggagttcctgaaccagagctcgcccttctacttctggatgaatggtgaccgcatcgactccctgctggagaacgaccggcagcagacgcacatgctggatgtcatgcaggaccacttcagccgcgcgtccagcatcatagacgagctcttccaggacaggttcttcacccgggagccccaggatacctaccactacctgcccttcagcctgccccaccggaggcctcacttcttctttcccaagtcccgcatcgtccgcagcttgatgcccttctctccgtacgagcccctgaacttccacgccatgttccagcccttccttgagatgatacacgaggctcagcaggccatggacatccacttccatagcccggccttccagcacccgccaacagaattcatacgagaaggcgacgatgaccggactgtgtgccgggagatccgccacaactccacgggctgcctgcggatgaaggaccagtgtgacaagtgccgggagatcttgtctgtggactgttccaccaacaacccctcccaggctaagctgcggcgggagctcgacgaatccctccaggtcgctgagaggttgaccaggaaatacaacgagctgctaaagtcctaccagtggaagatgctcaacacctcctccttgctggagcagctgaacgagcagtttaactgggtgtcccggctggcaaacctcacgcaaggcgaagaccagtactatctgcgggtcaccacggtgagctgtgtcccggccacatgctgtggctcgggagcccgagctgtgatcgggagcaggggcatgtgtgcttttgactgagcatttatcacacggcagaaaatagaaaactttaggcgcccctgttgccttgaagcctcatcacccactcagggaaaatataaccctgctttacaaaggagcaaagtaagagaggttccacagcttggccaaggtgtgatagctgacagatgacttggacgggtatttgaacctgactgcctggctgccaagcctgtattttgttgttgttgtttttgttttggtgcacaaatctgtgaataaaccagaagcctctgttcttttctcaaagctacaaggctgccctctggcatgtaaaatggcttatgaattagtacatcactctctgccagtgataaaaacttctctctaggccagacatggtggctcatgcctgtaatcccagcactttgggaggcagaggcaagaggattgcttgaggccaggaatttgagaccagcctgggcaacacagcaagattccctctctacaaaaaatacaaaaatcagtcaggtgtggtggcacacacttgtagtcccagctattcaggag

SEQ ID NO: 7396 - protein, 466 aa, Homo sapiens; identical to SEQ ID NO: 7386

SEQ ID NO: 7397 - DNA, 601 bp, Homo sapiens
acgcggcgtcgccaggaggagcgcgcgggcacagggtgccgctgaccgaggcgtgcaaagactccagaattggaggcatgatgaagactctgctgctgtttgtggggctgctgctgacctgggagagtgggcaggtcctgggggaccagacggtctcagacaatgagctccaggaaatgtccaatcagggaagtaagtacgtcaataaggaaattcaaaatgctgtcaacggggtgaaacagataaagactctcatagaaaaaacaaacgaagagcgcaagacactgctcagcaacctagaagaagccaagaagaagaaagaggatgccctaaatgagaccagggaatcagagacaaagctgaaggagccccaggatacctaccactacctgcccttcagcctgccccaccggaggcctcacttcttctttcccaagtcccgcatcgtccgcagcttgatgcccttctctccgtacgagcccctgaacttccacgccatgttccagcccttccttgagatgatacacgaggctcagcaggccatggacatccacttccatagcccggccttccagcacccgccaacagaattcatacgagg

SEQ ID NO: 7398 - protein, 173 aa, Homo sapiens
MMKTLLLFVGLLLTWESGQVLGDQTVSDNELQEMSNQGSKYVNKEIQNAVNGVKQIKTLIEKTNEERKTLLSNLEEAKKKKEDALNETRESETKLKEPQDTYHYLPFSLPHRRPHFFFPKSRIVRSLMPFSPYEPLNFHAMFQPFLEMIHEAQQAMDIHFHSPAFQHPPTEFI

SEQ ID NO: 7399 - DNA, 347 bp, Homo sapiens
ccagcttgaggagttcctgaaccagagctcgcccttctacttctggatgaatggtgaccgcatcgactccctgctggagaacgaccggcagcagacgcacatgctggatgtcatgcaggaccacttcagccgcgcgtccagcatcatagacgagctcttccaggacaggttcttcacccgggagccccaggatacctaccactacctgcccttctctccgtacgagcccctgaacttccacgccatgttccagcccttccttgagatgatacacgaggctcagcaggccatggacatccacttccatagcccggccttccagcacccgccaacagaattcatacgag

SEQ ID NO: 7400 - protein, 99 aa, Homo sapiens
MNGDRIDSLLENDRQQTHMLDVMQDHFSRASSIIDELFQDRFFTREPQDTYHYLPFSPYEPLNFHAMFQPFLEMIHEAQQAMDIHFHSPAFQHPPTEFI

SEQ ID NO: 7401 - DNA, 542 bp, Homo sapiens
gatggattcggtgtgaagggctggctgctgttgcctccggctcttgaaagtcaagttcaggtggtgctgagactccctgggggctgcagcgctgtgaggcgtgcaaagactccagaattggaggcatgatgaagactctgctgctgtttgtggggctgctgctgacctgggagagtgggcaggtcctgggggaccagacggtctcagacaatgagctccaggaaatgtccaatcagggaagtaagtacgtcaataaggaaattcaaaatgctgtcaacggggtgaaacagataaagactctcatagaaaaaacaaacgaagagcgcaagacactgctcagcaacctagaagaagccaagaagaagaaagaggatgccctaaatgagaccagggaatcagagacaaagctgaaggagctcccaggagtgtgcaatgagaccatgatggccctctgggaagagtgtaagccctgcctgaaacagacctgcatgaagttctacgcacgcgtctgcagaagtggctcaggcctggttggccgccag

SEQ ID NO: 7402 - protein, 138 aa, Homo sapiens
MMKTLLLFVGLLLTWESGQVLGDQTVSDNELQEMSNQGSKYVNKEIQNAVNGVKQIKTLIEKTNEERKTLLSNLEEAKKKKEDALNETRESETKLKELPGVCNETMMALWEECKPCLKQTCMKFYARVCRSGSGLVGR

SEQ ID NO: 7403 - DNA, 692 bp, Homo sapiens
ggcagtgtggagggcctggcagagcaagaggactcatccttccaaagggactttctctgggaagcctgctcctcgggccactgcgaaccctctctactctccgaagggaattgtccttcctggcttccactacttccacccctgaatgcacaggcagcccggcccaagtctcccactagggatgcagatggattcggtgtgaagggctggctgctgttgcctccggctcttgaaagtcaagttcagaggcgtgcaaagactccagaattggaggcatgatgaagactctgctgctgtttgtggggctgctgctgacctgggagagtgggcaggtcctgggggaccagacggtctcagacaatgagctccaggaaatgtccaatcagggaagtaagtacgtcaataaggaaattcaaaatgctgtcaacggggtgaaacagataaagactctcatagaaaaaacaaacgaagagcgcaagacactgctcagcaacctagaagaagccaagaagaagaaagaggatgccctaaatgagaccagggaatcagagacaaagctgaaggagctcccaggagtgtgcaatgagaccatgatggccctctgggaagagtgtaagccctgcctgaaacagacctgcatgaagttctacgcacgcgtctgcagaagtggctcaggcctggttggccgccag

SEQ ID NO: 7404 - protein, 138 aa, Homo sapiens; identical to SEQ ID NO: 7402

SEQ ID NO: 7405 - DNA, 439 bp, Homo sapiens
cgcggcgtcgccaggaggagcgcgcgggcacagggtgccgctgaccgaggcgtgcaaagactccagaattggaggcatgatgaagactctgctgctgtttgtggggctgctgctgacctgggagagtgggcaggtcctgggggaccagacggtctcagacaatgagctccaggaaatgtccaatcagggaagtaagtacgtcaataaggaaattcaaaatgctgtcaacggggtgaaacagataaagactctcatagaaaaaacaaacgatgccctaaatgagaccagggaatcagagacaaagctgaaggagctcccaggagtgtgcaatgagaccatgatggccctctgggaagagtgtaagccctgcctgaaacagacctgcatgaagttctacgcacgcgtctgcagaagtggctcaggcctggttggccgccag

SEQ ID NO: 7406 - protein, 120 aa, Homo sapiens
MMKTLLLFVGLLLTWESGQVLGDQTVSDNELQEMSNQGSKYVNKEIQNAVNGVKQIKTLIEKTNDALNETRESETKLKELPGVCNETMMALWEECKPCLKQTCMKFYARVCRSGSGLVGR

SEQ ID NO: 7407 - DNA, 1313 bp, Homo sapiens
cgcggcgtcgccaggaggagcgcgcgggcacagggtgccgctgaccgaggcgtgcaaagactccagaattggaggcatgatgaagactctgctgctgtttgtggggctgctgctgacctgggagagtgggcaggtcctgggggaccagacggtctcagacaatgagctccaggaaatgtccaatcagggaagtaagtacgtcaataaggaaattcaaaatgctgtcaacggggtgaaacagataaagactctcatagaaaaaacaaacgaagagcgcaagacactgctcagcaacctagaagaagccaagaagaagaaagaggtcaggaggagccgctaccgcctccctgccttgaccatcccactggaggggagggagggggtcactgcgcggtgccctgctgggttgccatggtgacccgcagtcctcccaggctgtgtcagctgatgctgaggctgcaattaagaagcagggaaggttcatttgcttctgaaagcatcagggagtgagatcttggatctggttttgttatgagcctggcccagggcctaatgcccagattcatttcaatagatgtttctaagccctgatcacatgctagttccaagcaggctctggatggggtggcggcaggggcccagacaggcgtggcgtccaaccttcaggaagcttatctaataggggtgatatggttagggttaaggcaggcacacagcaccccacgtcttgctagagttctggactacttcataaagaaacatcttaagcccagtagtggatatagcaggtctagcctgtgcttaatgattcaacaaaactaaaacactataattcaatgaacaacttatttaagaaatcaagtctccttaagagtatcctacaaacctcctctcacggtcgccctacttcagatgctaagatgtagctacctgcaagcttcatgatccatcgtgcatgttaaaagcatttcaaaggctctgagaagttctgccgtaaagaaacctgtgtaactccatgaaacccagagttttccaaactgaccagggaattcatttttgtttttgtttttttttcctggccgctttgagcacagctccataggagccacttcagggattgctggcctggatgtggctctacctttttttcaagtttcatgccctttcttggccttagtatcagttctcaccattctatgagaatcctcaaatagctcctggggaaggggcatgacttgttctcacatttttgtggttatcactggagtttgacattcaacaattctggttttataataaagcacatcacatac

SEQ ID NO: 7408 - protein, 113 aa, Homo sapiens
MMKTLLLFVGLLLTWESGQVLGDQTVSDNELQEMSNQGSKYVNKEIQNAVNGVKQIKTLIEKTNEERKTLLSNLEEAKKKKEVRRSRYRLPALTIPLEGREGVTARCPAGLPW

SEQ ID NO: 7409 - DNA, 347 bp, Homo sapiens
gcaggcagcaggtgggcgggacgccagcaggctgtctagctgttcccatgatggtctcctgttctctgcagaggcgtgcaaagactccagaattggaggcatgatgaagactctgctgctgtttgtggggctgctgctgacctgggagagtgggcaggtcctgggggaccagacggtctcagacaatgagctccaggaaatgtccaatcagggaagtaagtacgtcaataaggaaattcaaaatgctgtcaacggggtgaaacagataaagactctcatagaaaaaacaaacgaagagcgcaagacactgctcagcaacctagaagaagccaagaagaagaaagagg

SEQ ID NO: 7410 - protein, 81 aa, Homo sapiens
MMKTLLLFVGLLLTWESGQVLGDQTVSDNELQEMSNQGSKYVNKEIQNAVNGVKQIKTLIEKTNEERKTLLSNLEEAKKKK

SEQ ID NO: 7411 - DNA, 744 bp, Homo sapiens
ggagggcctggcagagcaagaggactcatccttccaaagggactttctctgggaagcctgctcctcgggccactgcgaaccctctctactctccgaagggaattgtccttcctggcttccactacttccacccctgaatgcacaggcagcccggcccaagtctcccactagggatgcagatggattcggtgtgaagggctggctgctgttgcctccggctcttgaaagtcaagttcaggtggtgctgagactccctgggggctgcagcgctgtggtgaatggggagcgtctgctggggtgaaggtttaggtgcacattgcagaggacgtggctggtctctgggatgcagtccctctgtggaggtggcatggggagggacggatgcatgacctaaggggggtattttcagtgtctgacatgatcgataccactctggacaaggaggccaggatgcagaaagcctgtgtgcctcgctgattgtcggggaggatgtggcttggacaagagcctggttcctccgatgccagggttcttgtttcttccactcaacattgctgtcctgcagtccctccctccctgcacctcctgccttcgctttcattcgaggtgtccatggcaagcgtgcaaagactccagaattggaggcatgatgaagactctgctgctgtttgtggggctgctgctgacctgggagagtgggcaggtcctgggggaccagacggtctcagacaatgagctccaggg

SEQ ID NO: 7412 - protein, 81 aa, Homo sapiens
MWLGQEPGSSDARVLVSSTQHCCPAVPPSLHLLPSLSFEVSMASVQRLQNWRHDEDSAAVCGAAADLGEWAGPGGPDGLRQ

SEQ ID NO: 7413 - DNA, 3823 bp, Homo sapiens
gggaggaagggtgcgcggggcgaggggcggcggcagacctcgcggggccccagcgggaagcgcgggcggcggcgggatgcgcgctctgggcggcggggcgcggcgctaggcgcccggcggggcttccccaggctgcgaccccgcgggaccctccactcctcccgccgcctccgcagcccgcgcgccggagcatgagtcccggccggagccccacggccgcgggcggcgcctaggacggcgatccgcgccctggaggatccgccggccgcccggctccactacagctccagccgcctgcagcggggccctcctgaggccccagaggaagagaccatgaaagtgaggtcggccggcggcgatggagatgccttgtgcgttacagaagaggacctggcgggtgacgacgaggacatgccgaccttcccatgcacccagaagggccggccagggccccgctgcagccgctgccagaagaacctatctttgcacacatcggtgcggattctttacctcttcctggccctgctcctggtggccgtggctgtgttggcctctctggttttcagaaaagtggactctctctccgaagacatctccttgacccagtctatttatgacaagaagcttgtgttaatgcagaaaaatctccagggcctggatccgaaagccctgaacaactgctctttctgccatgaagctgggcagctggggccagagatccgaaaactgcaggaggagctggagggaattcagaagctgcttctggcccaggaggtgcagctggaccagaccttacaggcccaggaggtgctctccaccaccagcagacaaatctcccaggagatgggcagttgctccttctccatccaccaggttaaccagtctctggggctcttcctggcccaggtgagaggctggcaggccaccacagctggcctggacctctctctgaaggacctcacccaggagtgctacgatgtcaaggctgcagtgcaccagatcaacttcaccgtggggcagacttccgagtggatccacgggatccagcggaagacagacgaggagaccctgaccctccagaagattgtcaccgactggcagaactacacacggctcttcagcggcctgcgcaccacctccaccaagactggagaggcggtcaagaacatccaggccaccctgggggcctcctcacagcgcatcagccagaactcagagagcatgcacgacctggtactccaggtcatgggcttgcagctgcagctggataacatctcgtccttcctggatgaccacgaagagaacatgcatgatcttcagtaccatacccactacgcccagaaccgcactgtggagaggtttgagtctctggaaggacgcatggcttctcacgagattgaaattggcaccatcttcaccaacatcaatgccaccgacaaccacgtgcacagcatgctcaagtacctggatgacgtgcggctctcctgcacgctgggcttccacacccatgccgaggagctctactacctgaacaagtctgtctccatcatgctgggcaccacagacctgctccgggagcgcttcagcctgctcagtgcccggctggacctcaacgtccggaacctctccatgatcgtggaggagatgaaggcagtggacacacagcatggagaaatccttcgcaatgtcaccatcctacgaggtgcccccggccctccaggaccaagaggattcaaaggagatatgggcgtgaaagggcctgttggcggcagaggcccgaaaggagaccccggcagcttgggccccctgggaccccagggtcctcaggggcaacctggagaggccgggcctgtgggagaaaggggccctgttggccctcgagggttcccaggcctcaaaggctcaaagggcagctttggaactggagggccgagaggacagccaggcccaaaaggggacatagggcccccagggccagaagggcccccggggtctccagggccctcagggcctcagggaaaaccgggaattgcagggaagacagggtcaccaggccagcggggggccatggggcctaagggtgaaccagggatccagggtccccctggtctcccggggcctccaggtccaccaggaagccagagcttctactgaggagggctgtggcagagccactgtcacacagaatgccggaggggcgcagagcagatccaggccccagaaagcctcacctacagacagctgtggtcctctgattccaatgagggggctccccagggctgaccctgcagctttgggctcccccatagtgactgtgccataggaaagcagcccctcctcacacatacatgtgcacatgcacacacatgcatgcacacacatgcacacatacacgcacatgcacacatacacatgcatgcacacatacacaggcatacatgcatgcacacacacatgcacgcacacacacatgcacacatacacgtgcacacatacacaggcacacatgcatgcacacatacacatgcacacacacatgcacacatatatgcacaggcacacacatgtacgcacacacacatgcactgcacacatatccatgcacacaaacacatatatacacatgcacatacacagatttttctgctggccaggtgggccaactgggtttccctggctgggcaggaggagagggcagaggaagaccccctctcctgtgactgagcctgccagggaggcagctacctcgggaggaaggtctcacatctgtctctgggcacccatgctggccagcagtttcccagggctccctggggttgaaaagccccaaggaaacctttgcgggtggggcgttactgccaaaactccagaggcaaagtggacctggcaaccacaagaccctccccataagcaggggaccagcatacccgggagctgtccctgtctgtcacagcacagtggggccacgaggctgacattctctggccttgcacacagtgccccctgagaagttcaacatttatttcttcacgtgtccagaaaattcctcaattcatccttgcctctgcccttcaggagcagcctggaaggaatccaagcaggagtttcatctgcatgggggcactctgcaggccctggaacattgggcctgagtggagatgggagacagaggcaggccagaaggttctctctgcacagctgcctcccttgctctccctgaggctggcctgccccattccccaagggggctcctctggagtggtggggaggattaggctgcagaagggccaaccccttgcaacagggcagctctcgcctcccgcacacggctctcctgatcacagctgcatgccgaccttgtcccaccgggacccacaatggcccgagccctctttgcatgggcagccagctggactaggagtgggaagggcctggacactcacagaggccccctctgtcatcactccttggcacccaccaacttcctgcacacactggcagagaggggcgctgggaaatcaccccacagggtggaggtctcctgttggctacactctaaagctgctttgccttcatgttcaaacagattcaggcaccaccccctccaccgcccgcaaggttagggcatagagttgtctccttcccaacacggacccagagagcagcccttccctgctcaaagcctttccgcaccctcctgactgtcctggatgtgcaactggtttgcactgcacaccccacggccatgtaactctcctgtccacatatgataataccattctgcatagtattactgactcagtaaagagctatttccaggagt

SEQ ID NO: 7414 - protein, 606 aa, Homo sapiens; identical to SEQ ID NO: 1026

SEQ ID NO: 7415 - DNA, 1909 bp, Homo sapiens
gggaggaagggtgcgcggggcgaggggcggcggcagacctcgcggggccccagcgggaagcgcgggcggcggcgggatgcgcgctctgggcggcggggcgcggcgctaggcgcccggcggggcttccccaggctgcgaccccgcgggaccctccactcctcccgccgcctccgcagcccgcgcgccggagcatgagtcccggccggagccccacggccgcgggcggcgcctaggacggcgatccgcgccctggaggatccgccggccgcccggctccactacagctccagccgcctgcagcggggccctcctgaggccccagaggaagagaccatgaaagtgaggtcggccggcggcgatggagatgccttgtgcgttacagaagaggacctggcgggtgacgacgaggacatgccgaccttcccatgcacccagaagggccggccagggccccgctgcagccgctgccagaagaacctatctttgcacacatcggtgcggattctttacctcttcctggccctgctcctggtggccgtggctgtgttggcctctctggttttcagaaaagtggactctctctccgaagacatctccttgacccagtctatttatgacaagaagcttgtgttaatgcagaaaaatctccagggcctggatccgaaagccctgaacaactgctctttctgccatgaagctgggcagctggggccagagatccgaaaactgcaggaggagctggagggaattcagaagctgcttctggcccaggaggtgcagctggaccagaccttacaggcccaggaggtgctctccaccaccagcagacaaatctcccaggagatgggcagttgctccttctccatccaccaggttaaccagtctctggggctcttcctggcccaggtgagaggctggcaggccaccacagctggcctggacctctctctgaaggacctcacccaggagtgctacgatgtcaaggctgcagtgcaccagatcaacttcaccgtggggcagacttccgagtggatccacgggatccagcggaagacagacgaggagaccctgaccctccagaagattgtcaccgactggcagaactacacacggctcttcagcggcctgcgcaccacctccaccaagactggagaggcggtcaagaacatccaggccaccctgggggcctcctcacagcgcatcagccagaactcagagagcatgcacgacctggtactccaggtcatgggcttgcagctgcagctggataacatctcgtccttcctggatgaccacgaagagaacatgcatgatcttcagtaccatacccactacgcccagaaccgcactgtggagaggtttgagtctctggaaggacgcatggcttctcacgagattgaaattggcaccatcttcaccaacatcaatgccaccgacaaccacgtgcacagcatgctcaagtacctggatgacgtgcggctctcctgcacgctgggcttccacacccatgccgaggagctctactacctgaacaagtctgtctccatcatgctgggcaccacagacctgctccgggagcgcttcagcctgctcagtgcccggctggacctcaacgtccggaacctctccatgatcgtggaggagatgaaggcagtggacacacagcatggagaaatccttcgcaatgtcaccatcctacgaggtcacactttgttttcacataatcggatatgatatgaagccagccataaagcccaggatgaccaagaatataatttgaaaatgaatttgtttactatccttaatggtaagcatcaccttaagcacatattatgccttgagacactagccaattgtggtacatgaaaataatttataaataaataaatttacctatattaggaagatg

SEQ ID NO: 7416 - protein, 466 aa, Homo sapiens; identical to SEQ ID NO: 1028

SEQ ID NO: 7417 - DNA, 1960 bp, Homo sapiens
gggaggaagggtgcgcggggcgaggggcggcggcagacctcgcggggccccagcgggaagcgcgggcggcggcgggatgcgcgctctgggcggcggggcgcggcgctaggcgcccggcggggcttccccaggctgcgaccccgcgggaccctccactcctcccgccgcctccgcagcccgcgcgccggagcatgagtcccggccggagccccacggccgcgggcggcgcctaggacggcgatccgcgccctggaggatccgccggccgcccggctccactacagctccagccgcctgcagcggggccctcctgaggccccagaggaagagaccatgaaagtgaggtcggccggcggcgatggagatgccttgtgcgttacagaagaggacctggcgggtgacgacgaggacatgccgaccttcccatgcacccagaagggccggccagggccccgctgcagccgctgccagaagaacctatctttgcacacatcggtgcggattctttacctcttcctggccctgctcctggtggccgtggctgtgttggcctctctggttttcagaaaagtggactctctctccgaagacatctccttgacccagtctatttatgacaagaagcttgtgttaatgcagaaaaatctccagggcctggatccgaaagccctgaacaactgctctttctgccatgaagctgggcagctggggccagagatccgaaaactgcaggaggagctggagggaattcagaagctgcttctggcccaggaggtgcagctggaccagaccttacaggcccaggaggtgctctccaccaccagcagacaaatctcccaggagatgggcagttgctccttctccatccaccaggttaaccagtctctggggctcttcctggcccaggtgagaggctggcaggccaccacagctggcctggacctctctctgaaggacctcacccaggagtgctacgatgtcaaggctgcagtgcaccagatcaacttcaccgtggggcagacttccgagtggatccacgggatccagcggaagacagacgaggagaccctgaccctccagaagattgtcaccgactggcagaactacacacggctcttcagcggcctgcgcaccacctccaccaagactggagaggcggtcaagaacatccaggccaccctgggggcctcctcacagcgcatcagccagaactcagagagcatgcacgacctggtactccaggtcatgggcttgcagctgcagctggataacatctcgtccttcctggatgaccacgaagagaacatgcatgatcttcagtaccatacccactacgcccagaaccgcactgtggagaggtttgagtctctggaaggacgcatggcttctcacgagattgaaattggcaccatcttcaccaacatcaatgccaccgacaaccacgtgcacagcatgctcaagtacctggatgacgtgcggctctcctgcacgctgggcttccacacccatgccgaggagctctactacctgaacaagtctgtctccatcatgctgggcaccacagacctgctccgggagcgcttcagcctgctcagtgcccggctggacctcaacgtccggaacctctccatgatcgtggaggagatgaaggcagtggacacacagcatggagaaatccttcgcaatgtcaccatcctacgaggtcacactttgttttcacataatcggatatgatatgaagccagccataaagcccaggatgaccaagaatataatttgaaaatgaatttgtttactatccttaatggtaagcatcaccttaagcacatattatgccttgagacactagccaattgtggtacatgaaaataatttataaataaataaatttacctatattaggaagatgatttaaatgtttattttactaagggggatgtgattaaaatatttggacacc

SEQ ID NO: 7418 - protein, 466 aa, Homo sapiens; identical to SEQ ID NO: 1028

SEQ ID NO: 7419 - DNA, 1329 bp, Homo sapiens
gccaggctcgggctcttcctgctcctggaacaagctccggactcggggcattcgccgcagatgctgcatctccgaagctctcggctggtagagagcagccgccacatgctctggggcggcagggctgagctgccaagagctcctggccatgaccttggtgcatggagtccagagggggctggggaagaccttctcttcacactcgaggatgcacacctgcaaagatacgggtttcgaggtgggactaacccaggaagatgctaccaacgtaagatggtcaactgtggtgtctctcacttgagagtccaagggtatcagctggcagaagcacacccaatggcatggaaacttccagcaacttctcacagattccaccccctggcctccctgcaagaggcagacgtcattgtgaattttgtgtttgttactccctatgtacatgtatcgtaaataccattttgcttggttgatatttatatttgctattttaagcttcataaatcacaggcagcaagcctgcctgtccattccagaaggagacatggtcttcatgatactgcacagcatgcgcacctgacttgctctggaaggagatactctgtctaccacaggttttcaccgtacagacatccttgaaaagataccccggaagtaagggctctttctcaagatgtgcaggacttgagcagctcatgggtaagtgtctgtcaacaggaattcatcagcgagctacacaggcccgacctcttctgctctctgcaagctgacattttagttggggagaccggactttgcataaacaaactcaacagactgtctttagtgcactgaaggagttaacaaaagcatcaatgtgagactttttcaggaaaacatgactaagatgggatggttgagtgaggcctctctcattggagaggcaagcaaaagttaccagctggtggaagcaggccgcaggcagcgagaaccgcctgcacggctgttcagaggcacaggaagcgtggtgtgtgtgggagctgaaaggctggtgggtctggaaagcagcgagctggggaaaaaaagaggcttgaggccctgaagccatggtgagcagtctgagatttattgtgaatgggtataaaagggttttacacaggggagtgataacaatctgatttgcatttttgctaggcacactttgttgcccacacagaagggattggaggggcttttgaaatccttgacaagtctctgctgtttctgattgaatttttaatctattcattcaacctgacatcagatgggctttgacttccacattctcagaattaaaactgacttctaaatgtt

SEQ ID NO: 7420 - protein, 129 aa, Homo sapiens
MLHLRSSRLVESSRHMLWGGRAELPRAPGHDLGAWSPEGAGEDLLFTLEDAHLQRYGFRGGTNPGRCYQRKMVNCGVSHLRVQGYQLAEAHPMAWKLPATSHRFHPLASLQEADVIVNFVFVTPYVHVS

SEQ ID NO: 7421 - DNA, 372 bp, Homo sapiens
atggttcactattcacttgaccctgacaaccgcacaaaatcatgcaaatcaagaggttcaaatcttcgtgttctctttaagaacactcgtgaaactgcccaggccatcaaggagagtaatgctgaacttaagggtttagatgtagattctctggtcattgagcatatcctagtgaacaaagcacctaagatgcaccgttggacctacagagctcatggtcggattaatccatacatgagctctccctgccacattgagatgatccttactgaaaaggaacggattgttcctaaaccagaaaaggaagttgcccagaggaaaaagatatcccagaagaaattgaagaaacaaaaacttatggcaggggagtaa

SEQ ID NO: 7422 - protein, 123 aa, Homo sapiens
MVHYSLDPDNRTKSCKSRGSNLRVLFKNTRETAQAIKESNAELKGLDVDSLVIEHILVNKAPKMHRWTYRAHGRINPYMSSPCHIEMILTEKERIVPKPEKEVAQRKKISQKKLKKQKLMAGE

SEQ ID NO: 7423 - DNA, 590 bp, Homo sapiens
gtcacttttgcagaaaagcatttactgactgttgacttggccaaatccctgtgctgtgtttcctagtacggtaaatcaactgtatccagtagtgggacagatgcagcatgaaagaagaaagttacaattgctttatctgatgctgtcactcatgcctggtgttgagaggcgcacattttaaaaagtctaatagctccgacatatctaggaaacagatgggaaacaaatgaagcattgatggattcgcaaattccagttctttgatatttgtctgcccaggaatgggtgggacagagaaatgtaagggaataatgaggatacgggtggggaaaggcttgcaatttttcccgttcttctttggatatggactgaaggaaggatgtggggaggaggtgtttatcttttgcttgtactctgaacttttccaaagttactgcattccttgggatataaaactgtaatcaagagtctctaatggataactgcaattatgcattgagtcattcaacaaatacacattaatactgactaaattaagctcgaatggaacttcagggcaaaagaacagagaaaataaaataccactagag

SEQ ID NO: 7424 - protein, 59 aa, Homo sapiens
MGGTEKCKGIMRIRVGKGLQFFPFFFGYGLKEGCGEEVFIFCLYSELFQSYCIPWDIKL

SEQ ID NO: 7425 - DNA, 1396 bp, Homo sapiens
atgggaagatgtgcctacttcccctttgccttccaccgtgactgtacatttcctgaggactccctagccatgctttctgtacagcctgctgaactctctgcccaaatttcagctgtcacagaatgagtgatcctcatagtataatggaaatgcatcatctcagtttccccatggcctgaatgtccatacaaaatgagagccagtagagaaaaacagaggacgtgaggagtttttaaaaattgaggaaaagtggaaggaaaagtaaggatgaaggtgaagatgaaggaatatgtcagagatgctagcactggcatcccccaccacacagtaccatgtactgctaaagaactctagaacatacagggtgtagacggcagtcttcttggggaaaaagaggcttcaggattgcaagatttcagctactgtctctcctcggagcaggattccatcttttccatggctggggcccttgacacatgtcactgtgcactgctcttctcgctgggaaaaggaaactgaggcccagagagggcaagtgaatttcccaagagtgtccagatgatacggagctgagctggaaagtgagcctggatctctctggttctgaaagctttgctcgaaagcacaggatgacacctccattcaatcaataagcactgagacccttccatggactcagcaggtcctgctgtccctgaaggttgacactctcatttcaaaccacagcgagaaccccaaaaggaaacagtgcaaggaaaataatgtgatatttgagaggcagcatggattattggggacagggttcatgtcccttctctcccacacacgtggcatgatgttaagcgggtcacctcacctctccagggttgtttcctcaactgagaaaatgagggggttgagatgaacgccagccctggggtgctcaatgctgcagtctagggtggtgtggactggaatcagaattctttctcctccgctctgggtgctgacacatgatctctggctctcactccccacccctaatcttgcccatctgagtttcaggttattttttccttcctcctgctcttcaatttccttattgaggaagctctttcctgctgcctctgtccccgctggagctgtttgatccagtagagccagtcgaagccaaggggaccctgacttgaatcttgctttctgacatgctggctgtggcttgcttgggacctgaataagagcttgcttactcccggtgttcaccacagcggaaccatgggtgcagaaatgtaattctcaaccagcccagtttaatcagcgaaagacaatagagcttgcaggcggtgtcatgctgagtatctgaacacaccatggctgctgtcgcccttttcattaaaatgattgaaaatgtatttct

SEQ ID NO: 7426 - protein, 41 aa, Homo sapiens
MGRCAYFPFAFHRDCTFPEDSLAMLSVQPAELSAQISAVTE

SEQ ID NO: 7427 - DNA, 1253 bp, Homo sapiens
agtgacgcgcgacggttcgtgcgtgcgtgcgggcggctgcgtcgggctgcaggagaagatggcggtctccacaggagttaaagttcctcgtaattttcgcttgttggaagaacttgaagaaggacaaaaaggagtaggcgacggtacagttagctggggccttgaagatgatgaagatatgacacttacaaggtggacaggcatgattattgggccaccaaggacaaattatgaaaacagaatatatagcctgaaagtagaatgtggacctaaatacccagaagctcctccgtcagttagatttgtaacaaaaattaatatgaacggaataaataattccagtgggatggtggatgcccggagcataccagtgttagcaaaatggcaaaattcatatagcattaaagttgtacttcaagagctaagacgtctaatgatgtccaaagaaaatatgaagcttccacagccaccagaaggacaaacatacaacaattaattttagtggatctcaaacttgtcttaaatcaacaaccttctactcatgttaatgtcttgattaaatatcacaatgcaaaatacacattaagtaaaagaattccagctggtaaacatgacctggacatttgtaagaatatatttaatatatgtacacccattatgttttcaggtaacaggaggaaaaatgcagcacaattttttttctcttgaaaggcactgtcatttaaacataaacctggagtactcgaaatagaattcaggtttacaagatgaaagcgtgtggagaagtgtcagatggcagtggaagcatgtgtgtttctaaaaagtaaaaatctcaagaaaacagaaatggcatgctttacccatcttacttagtgaaagagagctgcagttgaaattgtttaaaaagtagcaggtacaatgaatattgtcacagatgtgttaatttttgaagcaatgtgggtgctgactactagtagtatcaaaaatatgttcaggattgttttgatacctgtatttataataaaaaatgttggggggagttgatgaattcctgttaaaagctgttcttgtgtgttacatgtaacagacatggtaaatatttgtttacagtctttgtttaacaaaccatgcatttaagtttaagtgaagtcaacaaaaaggaaataggtgtatggatatgtgattttgagattaaagttagtcttaaaatgtaaataaaatgtgaaacgtgtcctcagagactgtgccatttc

SEQ ID NO: 7428 - protein, 145 aa, Homo sapiens; identical to SEQ ID NO: 1031

SEQ ID NO: 7429 - DNA, 1560 bp, Homo sapiens
agtgacgcgcgacggttcgtgcgtgcgtgcgggcggctgcgtcgggctgcaggagaagatggcggtctccacaggagttaaagttcctcgtaattttcgcttgttggaagaacttgaagaaggacaaaaaggagtaggcgacggtacagttagctggggccttgaagatgatgaagatatgacacttacaaggtggacaggcatgattattgggccaccaaggacaaattatgaaaacagaatatatagcctgaaagtagaatgtggacctaaatacccagaagctcctccgtcagttagatttgtaacaaaaattaatatgaacggaataaataattccagtgggatggtggatgcccggagcataccagtgttagcaaaatggcaaaattcatatagcattaaagttgtacttcaagagctaagacgtctaatgatgtccaaagaaaatatgaagcttccacagccaccagaaggacaaacatacaacaattaattttagtggatctcaaacttgtcttaaatcaacaaccttctactcatgttaatgtcttgattaaatatcacaatgcaaaatacacattaagtaaaagaattccagctggtaaacatgacctggacatttgtaagaatatatttaatatatgtacacccattatgttttcaggtaacaggaggaaaaatgcagcacaattttttttctcttgaaaggcactgtcatttaaacataaacctggagtactcgaaatagaattcaggtttacaagatgaaagcgtgtggagaagtgtcagatggcagtggaagcatgtgtgtttctaaaaagtaaaaatctcaagaaaacagaaatggcatgctttacccatcttacttagtgaaagagagctgcagttgaaattgtttaaaaagtagcaggtacaatgaatattgtcacagatgtgttaatttttgaagcaatgtgggtgctgactactagtagtatcaaaaatatgttcaggattgttttgatacctgtatttataataaaaaatgttggggggagttgatgaattcctgttaaaagctgttcttgtgtgttacatgtaacagacatggtaaatatttgtttacagtctttgtttaacaaaccatgcatttaagtttaagtgaagtcaacaaaaaggaaataggtgtatggatatgtgattttgagattaaagttagtcttaaaatgtaaataaaatgtgaaacgtgtcctcagagactgtgccatttctattatgttgatgtatatgtacagtaccttgccagggaagcaaaaattggaattattgtagcttttcatgtatacacacttttatttaccctattttgtgtacttcttgtgaattataatttgcagactatttcagaaaagaaattatctagtttaatttcttctttggacaaggagtcctaggtattatattttgagtttgatttcaccagaaataataatattaaaaagatctttgcattctggcagttcttttaggattataggttgcaaattatccaaatatatatcccattttttaaagcat

SEQ ID NO: 7430 - protein, 145 aa, Homo sapiens; identical to SEQ ID NO: 1031

SEQ ID NO: 7431 - DNA, 4374 bp, Homo sapiens
agtgacgcgcgacggttcgtgcgtgcgtgcgggcggctgcgtcgggctgcaggagaagatggcggtctccacaggagttaaagttcctcgtaattttcgcttgttggaagaacttgaagaaggacaaaaaggagtaggcgacggtacagttagctggggccttgaagatgatgaagatatgacacttacaaggtggacaggcatgattattgggccaccaaggacaaattatgaaaacagaatatatagcctgaaagtagaatgtggacctaaatacccagaagctcctccgtcagttagatttgtaacaaaaattaatatgaacggaataaataattccagtgggatggtggatgcccggagcataccagtgttagcaaaatggcaaaattcatatagcattaaagttgtacttcaagagctaagacgtctaatgatgtccaaagaaaatatgaagcttccacagccaccagaaggacaaacatacaacaattaattttagtggatctcaaacttgtcttaaatcaacaaccttctactcatgttaatgtcttgattaaatatcacaatgcaaaatacacattaagtaaaagaattccagctggtaaacatgacctggacatttgtaagaatatatttaatatatgtacacccattatgttttcaggtaacaggaggaaaaatgcagcacaattttttttctcttgaaaggcactgtcatttaaacataaacctggagtactcgaaatagaattcaggtttacaagatgaaagcgtgtggagaagtgtcagatggcagtggaagcatgtgtgtttctaaaaagtaaaaatctcaagaaaacagaaatggcatgctttacccatcttacttagtgaaagagagctgcagttgaaattgtttaaaaagtagcaggtacaatgaatattgtcacagatgtgttaatttttgaagcaatgtgggtgctgactactagtagtatcaaaaatatgttcaggattgttttgatacctgtatttataataaaaaatgttggggggagttgatgaattcctgttaaaagctgttcttgtgtgttacatgtaacagacatggtaaatatttgtttacagtctttgtttaacaaaccatgcatttaagtttaagtgaagtcaacaaaaaggaaataggtgtatggatatgtgattttgagattaaagttagtcttaaaatgtaaataaaatgtgaaacgtgtcctcagagactgtgccatttctattatgttgatgtatatgtacagtaccttgccagggaagcaaaaattggaattattgtagcttttcatgtatacacacttttatttaccctattttgtgtacttcttgtgaattataatttgcagactatttcagaaaagaaattatctagtttaatttcttctttggacaaggagtcctaggtattatattttgagtttgatttcaccagaaataataatattaaaaagatctttgcattctggcagttcttttaggattataggttgcaaattatccaaatatatatcccattttttaaagcataatatcttttttagttgtttttctgtgaagcttttggttaataaatagggtcaactaattggagacttttctcttccaattagggcttttaatactaacaaggataactttattcattcctcgtattctctactctaacaaatatgaactctgaagttgaaaagtcatttatgttccgctttcaccaaagtgacgtgaggctttaggtcactgtttcacttcaaagtactggatccaaagctttgttgaaaatgctgtttgatgaattcactgaagaatatagaaaggtggtcaggtaaagtctacttttattttgtcaagcttaataatttgtgtcatactttaccccagtatatataggcaaaccaaaaccttatcaaatattaaattagttgtttaaactttgcttataaagtattggccatgtggtggctcatgccgctaatcccagcactttgggaggctgagacgggcagatcacttgaggtcaggagcttgagaccagcctggccaacatgatgaaaccctgtctctactaaaaatacaaaaaattagccaggtgtggtggtgggtacttgtagtcccagctactcgggaggctgggcaggagaactacttgaaactggcagacagaggttgcagtgccgagagcgcaccactgctccagcctgggcaacagagcaagactccatctcaaaaaaaaaaaaaaaaagaaaaatattaataattgaccttggctgtatattaaaatagttacttttatagtagagcacatttctcaaacatgccctgaaaggcttttatcaagctcatataaagttaaagctttgagctaccttttcttggccaataaagtcactgacagtttatgtaaacattaatttcaacatggctgttgcattttaattatcaaaaatgtttaaaatgctttaagatgacacatagagaacatacacatacatacaaattagtgcatttgtaatttgttaaatttgaaatgaactattaccttgaaatatagtctttaaaaatttttaatggttaaagattaaattgaatgaaactgtagtctaatggtaactgatgatctgaatccgtctctctgataacctcctttccattttgaaaatgtgtcttattatacatggaagctagtaactacgtgaatgctgttggcaggatgagggtctgggtacctcagtctcttgtcctgtttccttcccccaaatccaccattgtgaagttgccaaccccctgccgccttcccctgccaagtacatgttgtcagagtcagccctataatgttcatttcccctcttgtttgtgggattatggatctctgcagaaatctgcatgccaattaacccatttctaaagcagaatccattttgcatgtcacaatcaagatgtacttggcaatctaagacacactgggagactgtaagaggaattaatatagaaaagctcttaattataataacatttggaagaaatttttcctttgttttgtaaagtggctaaggttgtaggagtgtgtggtatttattaccttttaaatgaactgtaaatttgccttagaaatttgtttaaaaggctagcaagtgagacccttgaggatgatcatatactaataaagattaccaaaagaaacttcttgtcctgttaggtcagtgttatgatttaatggttttaattacttaaccaattttaagaattgacaatttttaaaaatatttttttctaccattctaaagtaatgtcttttgttgtgggtttatgtgtaactacaggattttggaacataaacattttgaaggatagtcaatggtatttagtcttggatataaaaatagagaaaatttatagctttatgttattaaaataatttatcacacagagtgatttgaggttttcgcagagtagatttgtttgactcatggtttattagtctggattacttaagaacaatatgttgattttaatgttaattcccactaaatatataatattgataaatacatgtgaaattaatattgtttggaaaatgtagaggacacagctgggaattatgaatgcttttttcttaataggtttggtgtgtgtggctttgaatggttctgctgatgcatcatggaaagacagcagggaactgtagcctgccatcaaaactgtatcaactcttttaatgagcatgtgactgtattaggtacattttgaagaatataagtactgatgataaagtctagtatgcataataggattttggaggcatttcaggaattttccttttatagtatgctttttaggcatctgtatgtgtaatatcatagtatcatttattgctgggatggatcgaaaagcactgcttttacttttctgataagtatcaaaatgattttccagtaccaacttgactggcttttaattattgtcacacacacacaaaattcaactcctcaaggtttgggaaaattgtgtatttttttgtatacaagataaaagtgtcataaaaaggaatggatgaattgttgataggaacattagcagttaatttttacctgatactgagtttactgtaaaataggaaatgcataggaaggaatacctcctaaataatatgccttatagaatgatgaaatcttaccatagttcatactgaaaatgttgtttatttaaaagtattgtggagtgttgaaaataaagatacacaataagtattttctgaagagaaaattaatgaaggtatttaatgatataggaaataagtgacaagttaaagtccattttgtttcaataaaggagttgtgcaaactc

SEQ ID NO: 7432 - protein, 145 aa, Homo sapiens; identical to SEQ ID NO: 1031

SEQ ID NO: 7433 - DNA, 1051 bp, Homo sapiens
gacgcgcgacggttcgtgcgtgcgtgcgggcggctgcgtcgggctgcaggagaagatggcggtctccacaggagttaaagttcctcgtaattttcgcttgttggaagaacttgaagaaggacaaaaaggagtaggcgacggtacagttagctggggccttgaagatgatgaagatatgacacttacaaggtggacaggcatgattattgggccaccaaggacaaattatgaaaacagaatatatagcctgaaagtagaatgtggacctaaatacccagaagctcctccgtcagttagatttgtaacaaaaattaatatgaacggaataaataattccagtgggatggtggatgcccggagcataccagtgttagcaaaatggcaaaattcatatagcattaaagttgtacttcaagagctaagacgtctaatgatgtccaaagaaaatatgaagcttccacagccaccagaaggacaaacatacaacaattaattttagtggatctcaaacttgtcttaaatcaacaaccttctactcatgttaatgtcttgattaaatatcacaatgcaaaatacacattaagtaaaagaattccagctggtaaacatgacctggacattttaaaaatctcaagaaaacagaaatggcatgctttacccatcttacttagtgaaagagagctgcagttgaaattgtttaaaaagtagcaggtacaatgaatattgtcacagatgtgttaatttttgaagcaatgtgggtgctgactactagtagtatcaaaaatatgttcaggattgttttgatacctgtatttataataaaaaatgttggggggagttgatgaattcctgttaaaagctgttcttgtgtgttacatgtaacagacatggtaaatatttgtttacagtctttgtttaacaaaccatgcatttaagtttaagtgaagtcaacaaaaaggaaataggtgtatggatatgtgattttgagattaaagttagtcttaaaatgtaaataaaatgtgaaacgtgtcctcagagactgtgccatttc

SEQ ID NO: 7434 - protein, 145 aa, Homo sapiens; identical to SEQ ID NO: 1031

SEQ ID NO: 7435 - DNA, 1358 bp, Homo sapiens
gacgcgcgacggttcgtgcgtgcgtgcgggcggctgcgtcgggctgcaggagaagatggcggtctccacaggagttaaagttcctcgtaattttcgcttgttggaagaacttgaagaaggacaaaaaggagtaggcgacggtacagttagctggggccttgaagatgatgaagatatgacacttacaaggtggacaggcatgattattgggccaccaaggacaaattatgaaaacagaatatatagcctgaaagtagaatgtggacctaaatacccagaagctcctccgtcagttagatttgtaacaaaaattaatatgaacggaataaataattccagtgggatggtggatgcccggagcataccagtgttagcaaaatggcaaaattcatatagcattaaagttgtacttcaagagctaagacgtctaatgatgtccaaagaaaatatgaagcttccacagccaccagaaggacaaacatacaacaattaattttagtggatctcaaacttgtcttaaatcaacaaccttctactcatgttaatgtcttgattaaatatcacaatgcaaaatacacattaagtaaaagaattccagctggtaaacatgacctggacattttaaaaatctcaagaaaacagaaatggcatgctttacccatcttacttagtgaaagagagctgcagttgaaattgtttaaaaagtagcaggtacaatgaatattgtcacagatgtgttaatttttgaagcaatgtgggtgctgactactagtagtatcaaaaatatgttcaggattgttttgatacctgtatttataataaaaaatgttggggggagttgatgaattcctgttaaaagctgttcttgtgtgttacatgtaacagacatggtaaatatttgtttacagtctttgtttaacaaaccatgcatttaagtttaagtgaagtcaacaaaaaggaaataggtgtatggatatgtgattttgagattaaagttagtcttaaaatgtaaataaaatgtgaaacgtgtcctcagagactgtgccatttctattatgttgatgtatatgtacagtaccttgccagggaagcaaaaattggaattattgtagcttttcatgtatacacacttttatttaccctattttgtgtacttcttgtgaattataatttgcagactatttcagaaaagaaattatctagtttaatttcttctttggacaaggagtcctaggtattatattttgagtttgatttcaccagaaataataatattaaaaagatctttgcattctggcagttcttttaggattataggttgcaaattatccaaatatatatcccattttttaaagcat

SEQ ID NO: 7436 - protein, 145 aa, Homo sapiens; identical to SEQ ID NO: 1031

SEQ ID NO: 7437 - DNA, 4172 bp, Homo sapiens
gacgcgcgacggttcgtgcgtgcgtgcgggcggctgcgtcgggctgcaggagaagatggcggtctccacaggagttaaagttcctcgtaattttcgcttgttggaagaacttgaagaaggacaaaaaggagtaggcgacggtacagttagctggggccttgaagatgatgaagatatgacacttacaaggtggacaggcatgattattgggccaccaaggacaaattatgaaaacagaatatatagcctgaaagtagaatgtggacctaaatacccagaagctcctccgtcagttagatttgtaacaaaaattaatatgaacggaataaataattccagtgggatggtggatgcccggagcataccagtgttagcaaaatggcaaaattcatatagcattaaagttgtacttcaagagctaagacgtctaatgatgtccaaagaaaatatgaagcttccacagccaccagaaggacaaacatacaacaattaattttagtggatctcaaacttgtcttaaatcaacaaccttctactcatgttaatgtcttgattaaatatcacaatgcaaaatacacattaagtaaaagaattccagctggtaaacatgacctggacattttaaaaatctcaagaaaacagaaatggcatgctttacccatcttacttagtgaaagagagctgcagttgaaattgtttaaaaagtagcaggtacaatgaatattgtcacagatgtgttaatttttgaagcaatgtgggtgctgactactagtagtatcaaaaatatgttcaggattgttttgatacctgtatttataataaaaaatgttggggggagttgatgaattcctgttaaaagctgttcttgtgtgttacatgtaacagacatggtaaatatttgtttacagtctttgtttaacaaaccatgcatttaagtttaagtgaagtcaacaaaaaggaaataggtgtatggatatgtgattttgagattaaagttagtcttaaaatgtaaataaaatgtgaaacgtgtcctcagagactgtgccatttctattatgttgatgtatatgtacagtaccttgccagggaagcaaaaattggaattattgtagcttttcatgtatacacacttttatttaccctattttgtgtacttcttgtgaattataatttgcagactatttcagaaaagaaattatctagtttaatttcttctttggacaaggagtcctaggtattatattttgagtttgatttcaccagaaataataatattaaaaagatctttgcattctggcagttcttttaggattataggttgcaaattatccaaatatatatcccattttttaaagcataatatcttttttagttgtttttctgtgaagcttttggttaataaatagggtcaactaattggagacttttctcttccaattagggcttttaatactaacaaggataactttattcattcctcgtattctctactctaacaaatatgaactctgaagttgaaaagtcatttatgttccgctttcaccaaagtgacgtgaggctttaggtcactgtttcacttcaaagtactggatccaaagctttgttgaaaatgctgtttgatgaattcactgaagaatatagaaaggtggtcaggtaaagtctacttttattttgtcaagcttaataatttgtgtcatactttaccccagtatatataggcaaaccaaaaccttatcaaatattaaattagttgtttaaactttgcttataaagtattggccatgtggtggctcatgccgctaatcccagcactttgggaggctgagacgggcagatcacttgaggtcaggagcttgagaccagcctggccaacatgatgaaaccctgtctctactaaaaatacaaaaaattagccaggtgtggtggtgggtacttgtagtcccagctactcgggaggctgggcaggagaactacttgaaactggcagacagaggttgcagtgccgagagcgcaccactgctccagcctgggcaacagagcaagactccatctcaaaaaaaaaaaaaaaaagaaaaatattaataattgaccttggctgtatattaaaatagttacttttatagtagagcacatttctcaaacatgccctgaaaggcttttatcaagctcatataaagttaaagctttgagctaccttttcttggccaataaagtcactgacagtttatgtaaacattaatttcaacatggctgttgcattttaattatcaaaaatgtttaaaatgctttaagatgacacatagagaacatacacatacatacaaattagtgcatttgtaatttgttaaatttgaaatgaactattaccttgaaatatagtctttaaaaatttttaatggttaaagattaaattgaatgaaactgtagtctaatggtaactgatgatctgaatccgtctctctgataacctcctttccattttgaaaatgtgtcttattatacatggaagctagtaactacgtgaatgctgttggcaggatgagggtctgggtacctcagtctcttgtcctgtttccttcccccaaatccaccattgtgaagttgccaaccccctgccgccttcccctgccaagtacatgttgtcagagtcagccctataatgttcatttcccctcttgtttgtgggattatggatctctgcagaaatctgcatgccaattaacccatttctaaagcagaatccattttgcatgtcacaatcaagatgtacttggcaatctaagacacactgggagactgtaagaggaattaatatagaaaagctcttaattataataacatttggaagaaatttttcctttgttttgtaaagtggctaaggttgtaggagtgtgtggtatttattaccttttaaatgaactgtaaatttgccttagaaatttgtttaaaaggctagcaagtgagacccttgaggatgatcatatactaataaagattaccaaaagaaacttcttgtcctgttaggtcagtgttatgatttaatggttttaattacttaaccaattttaagaattgacaatttttaaaaatatttttttctaccattctaaagtaatgtcttttgttgtgggtttatgtgtaactacaggattttggaacataaacattttgaaggatagtcaatggtatttagtcttggatataaaaatagagaaaatttatagctttatgttattaaaataatttatcacacagagtgatttgaggttttcgcagagtagatttgtttgactcatggtttattagtctggattacttaagaacaatatgttgattttaatgttaattcccactaaatatataatattgataaatacatgtgaaattaatattgtttggaaaatgtagaggacacagctgggaattatgaatgcttttttcttaataggtttggtgtgtgtggctttgaatggttctgctgatgcatcatggaaagacagcagggaactgtagcctgccatcaaaactgtatcaactcttttaatgagcatgtgactgtattaggtacattttgaagaatataagtactgatgataaagtctagtatgcataataggattttggaggcatttcaggaattttccttttatagtatgctttttaggcatctgtatgtgtaatatcatagtatcatttattgctgggatggatcgaaaagcactgcttttacttttctgataagtatcaaaatgattttccagtaccaacttgactggcttttaattattgtcacacacacacaaaattcaactcctcaaggtttgggaaaattgtgtatttttttgtatacaagataaaagtgtcataaaaaggaatggatgaattgttgataggaacattagcagttaatttttacctgatactgagtttactgtaaaataggaaatgcataggaaggaatacctcctaaataatatgccttatagaatgatgaaatcttaccatagttcatactgaaaatgttgtttatttaaaagtattgtggagtgttgaaaataaagatacacaataagtattttctgaagagaaaattaatgaaggtatttaatgatataggaaataagtgacaagttaaagtccattttgtttcaataaaggagttgtgcaaactc

SEQ ID NO: 7438 - protein, 145 aa, Homo sapiens; identical to SEQ ID NO: 1031

SEQ ID NO: 7439 - DNA, 1484 bp, Homo sapiens
gtgcgtgcgtgcgggcggctgcgtcgggctgcaggagaagatggcggtctccacaggagttaaagttcctcgtaattttcgcttgttggaagaacttgaagaaggacaaaaaggagtaggcgacggtacagttagctggggccttgaagatgatgaagatatgacacttacaaggtggacaggcatgattattgggccaccaaggacaaattatgaaaacagaatatatagcctgaaagtagaatgtggacctaaatacccagaagctcctccgtcagttagatttgtaacaaaaattaatatgaacggaataaataattccagtgggatgagtctcactctgtcacccaggctggagtacaattgtgcgatcttggctcactgcaacctctgcctcccggcttcaagtgattctcctgcctcaacctcccgagtagctgggattacaggcacctgccatcatgcccagttaatttttgtatttttgtagagacggggtttcacaatggccaggctggtctcgaactcctgaccttagttgatccgcccggctcggcctcccaaagtgctgggattacaggtggatgcccggagcataccagtgttagcaaaatggcaaaattcatatagcattaaagttgtacttcaagagctaagacgtctaatgatgtccaaagaaaatatgaagcttccacagccaccagaaggacaaacatacaacaattaattttagtggatctcaaacttgtcttaaatcaacaaccttctactcatgttaatgtcttgattaaatatcacaatgcaaaatacacattaagtaaaagaattccagctggtaaacatgacctggacatttgtaagaatatatttaatatatgtacacccattatgttttcaggtaacaggaggaaaaatgcagcacaattttttttctcttgaaaggcactgtcatttaaacataaacctggagtactcgaaatagaattcaggtttacaagatgaaagcgtgtggagaagtgtcagatggcagtggaagcatgtgtgtttctaaaaagtaaaaatctcaagaaaacagaaatggcatgctttacccatcttacttagtgaaagagagctgcagttgaaattgtttaaaaagtagcaggtacaatgaatattgtcacagatgtgttaatttttgaagcaatgtgggtgctgactactagtagtatcaaaaatatgttcaggattgttttgatacctgtatttataataaaaaatgttggggggagttgatgaattcctgttaaaagctgttcttgtgtgttacatgtaacagacatggtaaatatttgtttacagtctttgtttaacaaaccatgcatttaagtttaagtgaagtcaacaaaaaggaaataggtgtatggatatgtgattttgagattaaagttagtcttaaaatgtaaataaaatgtgaaacgtgtcctcagagactgtgccatttc

SEQ ID NO: 7440 - protein, 149 aa, Homo sapiens
MAVSTGVKVPRNFRLLEELEEGQKGVGDGTVSWGLEDDEDMTLTRWTGMIIGPPRTNYENRIYSLKVECGPKYPEAPPSVRFVTKINMNGINNSSGMSLTLSPRLEYNCAILAHCNLCLPASSDSPASTSRVAGITGTCHHAQLIFVFL

SEQ ID NO: 7441 - DNA, 1791 bp, Homo sapiens
gtgcgtgcgtgcgggcggctgcgtcgggctgcaggagaagatggcggtctccacaggagttaaagttcctcgtaattttcgcttgttggaagaacttgaagaaggacaaaaaggagtaggcgacggtacagttagctggggccttgaagatgatgaagatatgacacttacaaggtggacaggcatgattattgggccaccaaggacaaattatgaaaacagaatatatagcctgaaagtagaatgtggacctaaatacccagaagctcctccgtcagttagatttgtaacaaaaattaatatgaacggaataaataattccagtgggatgagtctcactctgtcacccaggctggagtacaattgtgcgatcttggctcactgcaacctctgcctcccggcttcaagtgattctcctgcctcaacctcccgagtagctgggattacaggcacctgccatcatgcccagttaatttttgtatttttgtagagacggggtttcacaatggccaggctggtctcgaactcctgaccttagttgatccgcccggctcggcctcccaaagtgctgggattacaggtggatgcccggagcataccagtgttagcaaaatggcaaaattcatatagcattaaagttgtacttcaagagctaagacgtctaatgatgtccaaagaaaatatgaagcttccacagccaccagaaggacaaacatacaacaattaattttagtggatctcaaacttgtcttaaatcaacaaccttctactcatgttaatgtcttgattaaatatcacaatgcaaaatacacattaagtaaaagaattccagctggtaaacatgacctggacatttgtaagaatatatttaatatatgtacacccattatgttttcaggtaacaggaggaaaaatgcagcacaattttttttctcttgaaaggcactgtcatttaaacataaacctggagtactcgaaatagaattcaggtttacaagatgaaagcgtgtggagaagtgtcagatggcagtggaagcatgtgtgtttctaaaaagtaaaaatctcaagaaaacagaaatggcatgctttacccatcttacttagtgaaagagagctgcagttgaaattgtttaaaaagtagcaggtacaatgaatattgtcacagatgtgttaatttttgaagcaatgtgggtgctgactactagtagtatcaaaaatatgttcaggattgttttgatacctgtatttataataaaaaatgttggggggagttgatgaattcctgttaaaagctgttcttgtgtgttacatgtaacagacatggtaaatatttgtttacagtctttgtttaacaaaccatgcatttaagtttaagtgaagtcaacaaaaaggaaataggtgtatggatatgtgattttgagattaaagttagtcttaaaatgtaaataaaatgtgaaacgtgtcctcagagactgtgccatttctattatgttgatgtatatgtacagtaccttgccagggaagcaaaaattggaattattgtagcttttcatgtatacacacttttatttaccctattttgtgtacttcttgtgaattataatttgcagactatttcagaaaagaaattatctagtttaatttcttctttggacaaggagtcctaggtattatattttgagtttgatttcaccagaaataataatattaaaaagatctttgcattctggcagttcttttaggattataggttgcaaattatccaaatatatatcccattttttaaagcat

SEQ ID NO: 7442 - protein, 149 aa, Homo sapiens; identical to SEQ ID NO: 7440

SEQ ID NO: 7443 - DNA, 4605 bp, Homo sapiens
gtgcgtgcgtgcgggcggctgcgtcgggctgcaggagaagatggcggtctccacaggagttaaagttcctcgtaattttcgcttgttggaagaacttgaagaaggacaaaaaggagtaggcgacggtacagttagctggggccttgaagatgatgaagatatgacacttacaaggtggacaggcatgattattgggccaccaaggacaaattatgaaaacagaatatatagcctgaaagtagaatgtggacctaaatacccagaagctcctccgtcagttagatttgtaacaaaaattaatatgaacggaataaataattccagtgggatgagtctcactctgtcacccaggctggagtacaattgtgcgatcttggctcactgcaacctctgcctcccggcttcaagtgattctcctgcctcaacctcccgagtagctgggattacaggcacctgccatcatgcccagttaatttttgtatttttgtagagacggggtttcacaatggccaggctggtctcgaactcctgaccttagttgatccgcccggctcggcctcccaaagtgctgggattacaggtggatgcccggagcataccagtgttagcaaaatggcaaaattcatatagcattaaagttgtacttcaagagctaagacgtctaatgatgtccaaagaaaatatgaagcttccacagccaccagaaggacaaacatacaacaattaattttagtggatctcaaacttgtcttaaatcaacaaccttctactcatgttaatgtcttgattaaatatcacaatgcaaaatacacattaagtaaaagaattccagctggtaaacatgacctggacatttgtaagaatatatttaatatatgtacacccattatgttttcaggtaacaggaggaaaaatgcagcacaattttttttctcttgaaaggcactgtcatttaaacataaacctggagtactcgaaatagaattcaggtttacaagatgaaagcgtgtggagaagtgtcagatggcagtggaagcatgtgtgtttctaaaaagtaaaaatctcaagaaaacagaaatggcatgctttacccatcttacttagtgaaagagagctgcagttgaaattgtttaaaaagtagcaggtacaatgaatattgtcacagatgtgttaatttttgaagcaatgtgggtgctgactactagtagtatcaaaaatatgttcaggattgttttgatacctgtatttataataaaaaatgttggggggagttgatgaattcctgttaaaagctgttcttgtgtgttacatgtaacagacatggtaaatatttgtttacagtctttgtttaacaaaccatgcatttaagtttaagtgaagtcaacaaaaaggaaataggtgtatggatatgtgattttgagattaaagttagtcttaaaatgtaaataaaatgtgaaacgtgtcctcagagactgtgccatttctattatgttgatgtatatgtacagtaccttgccagggaagcaaaaattggaattattgtagcttttcatgtatacacacttttatttaccctattttgtgtacttcttgtgaattataatttgcagactatttcagaaaagaaattatctagtttaatttcttctttggacaaggagtcctaggtattatattttgagtttgatttcaccagaaataataatattaaaaagatctttgcattctggcagttcttttaggattataggttgcaaattatccaaatatatatcccattttttaaagcataatatcttttttagttgtttttctgtgaagcttttggttaataaatagggtcaactaattggagacttttctcttccaattagggcttttaatactaacaaggataactttattcattcctcgtattctctactctaacaaatatgaactctgaagttgaaaagtcatttatgttccgctttcaccaaagtgacgtgaggctttaggtcactgtttcacttcaaagtactggatccaaagctttgttgaaaatgctgtttgatgaattcactgaagaatatagaaaggtggtcaggtaaagtctacttttattttgtcaagcttaataatttgtgtcatactttaccccagtatatataggcaaaccaaaaccttatcaaatattaaattagttgtttaaactttgcttataaagtattggccatgtggtggctcatgccgctaatcccagcactttgggaggctgagacgggcagatcacttgaggtcaggagcttgagaccagcctggccaacatgatgaaaccctgtctctactaaaaatacaaaaaattagccaggtgtggtggtgggtacttgtagtcccagctactcgggaggctgggcaggagaactacttgaaactggcagacagaggttgcagtgccgagagcgcaccactgctccagcctgggcaacagagcaagactccatctcaaaaaaaaaaaaaaaaagaaaaatattaataattgaccttggctgtatattaaaatagttacttttatagtagagcacatttctcaaacatgccctgaaaggcttttatcaagctcatataaagttaaagctttgagctaccttttcttggccaataaagtcactgacagtttatgtaaacattaatttcaacatggctgttgcattttaattatcaaaaatgtttaaaatgctttaagatgacacatagagaacatacacatacatacaaattagtgcatttgtaatttgttaaatttgaaatgaactattaccttgaaatatagtctttaaaaatttttaatggttaaagattaaattgaatgaaactgtagtctaatggtaactgatgatctgaatccgtctctctgataacctcctttccattttgaaaatgtgtcttattatacatggaagctagtaactacgtgaatgctgttggcaggatgagggtctgggtacctcagtctcttgtcctgtttccttcccccaaatccaccattgtgaagttgccaaccccctgccgccttcccctgccaagtacatgttgtcagagtcagccctataatgttcatttcccctcttgtttgtgggattatggatctctgcagaaatctgcatgccaattaacccatttctaaagcagaatccattttgcatgtcacaatcaagatgtacttggcaatctaagacacactgggagactgtaagaggaattaatatagaaaagctcttaattataataacatttggaagaaatttttcctttgttttgtaaagtggctaaggttgtaggagtgtgtggtatttattaccttttaaatgaactgtaaatttgccttagaaatttgtttaaaaggctagcaagtgagacccttgaggatgatcatatactaataaagattaccaaaagaaacttcttgtcctgttaggtcagtgttatgatttaatggttttaattacttaaccaattttaagaattgacaatttttaaaaatatttttttctaccattctaaagtaatgtcttttgttgtgggtttatgtgtaactacaggattttggaacataaacattttgaaggatagtcaatggtatttagtcttggatataaaaatagagaaaatttatagctttatgttattaaaataatttatcacacagagtgatttgaggttttcgcagagtagatttgtttgactcatggtttattagtctggattacttaagaacaatatgttgattttaatgttaattcccactaaatatataatattgataaatacatgtgaaattaatattgtttggaaaatgtagaggacacagctgggaattatgaatgcttttttcttaataggtttggtgtgtgtggctttgaatggttctgctgatgcatcatggaaagacagcagggaactgtagcctgccatcaaaactgtatcaactcttttaatgagcatgtgactgtattaggtacattttgaagaatataagtactgatgataaagtctagtatgcataataggattttggaggcatttcaggaattttccttttatagtatgctttttaggcatctgtatgtgtaatatcatagtatcatttattgctgggatggatcgaaaagcactgcttttacttttctgataagtatcaaaatgattttccagtaccaacttgactggcttttaattattgtcacacacacacaaaattcaactcctcaaggtttgggaaaattgtgtatttttttgtatacaagataaaagtgtcataaaaaggaatggatgaattgttgataggaacattagcagttaatttttacctgatactgagtttactgtaaaataggaaatgcataggaaggaatacctcctaaataatatgccttatagaatgatgaaatcttaccatagttcatactgaaaatgttgtttatttaaaagtattgtggagtgttgaaaataaagatacacaataagtattttctgaagagaaaattaatgaaggtatttaatgatataggaaataagtgacaagttaaagtccattttgtttcaataaaggagttgtgcaaactc

SEQ ID NO: 7444 - protein, 149 aa, Homo sapiens; identical to SEQ ID NO: 7440

SEQ ID NO: 7445 - DNA, 1076 bp, Homo sapiens
gcgggcggctgcgtcgggctgcaggagaagatggcggtctccacagacaaattatgaaaacagaatatatagcctgaaagtagaatgtggacctaaatacccagaagctcctccgtcagttagatttgtaacaaaaattaatatgaacggaataaataattccagtgggatggtggatgcccggagcataccagtgttagcaaaatggcaaaattcatatagcattaaagttgtacttcaagagctaagacgtctaatgatgtccaaagaaaatatgaagcttccacagccaccagaaggacaaacatacaacaattaattttagtggatctcaaacttgtcttaaatcaacaaccttctactcatgttaatgtcttgattaaatatcacaatgcaaaatacacattaagtaaaagaattccagctggtaaacatgacctggacatttgtaagaatatatttaatatatgtacacccattatgttttcaggtaacaggaggaaaaatgcagcacaattttttttctcttgaaaggcactgtcatttaaacataaacctggagtactcgaaatagaattcaggtttacaagatgaaagcgtgtggagaagtgtcagatggcagtggaagcatgtgtgtttctaaaaagtaaaaatctcaagaaaacagaaatggcatgctttacccatcttacttagtgaaagagagctgcagttgaaattgtttaaaaagtagcaggtacaatgaatattgtcacagatgtgttaatttttgaagcaatgtgggtgctgactactagtagtatcaaaaatatgttcaggattgttttgatacctgtatttataataaaaaatgttggggggagttgatgaattcctgttaaaagctgttcttgtgtgttacatgtaacagacatggtaaatatttgtttacagtctttgtttaacaaaccatgcatttaagtttaagtgaagtcaacaaaaaggaaataggtgtatggatatgtgattttgagattaaagttagtcttaaaatgtaaataaaatgtgaaacgtgtcctcagagactgtgccatttc

SEQ ID NO: 7446 - protein, 58 aa, Homo sapiens
MNGINNSSGMVDARSIPVLAKWQNSYSIKVVLQELRRLMMSKENMKLPQPPEGQTYNN

SEQ ID NO: 7447 - DNA, 1383 bp, Homo sapiens
gcgggcggctgcgtcgggctgcaggagaagatggcggtctccacagacaaattatgaaaacagaatatatagcctgaaagtagaatgtggacctaaatacccagaagctcctccgtcagttagatttgtaacaaaaattaatatgaacggaataaataattccagtgggatggtggatgcccggagcataccagtgttagcaaaatggcaaaattcatatagcattaaagttgtacttcaagagctaagacgtctaatgatgtccaaagaaaatatgaagcttccacagccaccagaaggacaaacatacaacaattaattttagtggatctcaaacttgtcttaaatcaacaaccttctactcatgttaatgtcttgattaaatatcacaatgcaaaatacacattaagtaaaagaattccagctggtaaacatgacctggacatttgtaagaatatatttaatatatgtacacccattatgttttcaggtaacaggaggaaaaatgcagcacaattttttttctcttgaaaggcactgtcatttaaacataaacctggagtactcgaaatagaattcaggtttacaagatgaaagcgtgtggagaagtgtcagatggcagtggaagcatgtgtgtttctaaaaagtaaaaatctcaagaaaacagaaatggcatgctttacccatcttacttagtgaaagagagctgcagttgaaattgtttaaaaagtagcaggtacaatgaatattgtcacagatgtgttaatttttgaagcaatgtgggtgctgactactagtagtatcaaaaatatgttcaggattgttttgatacctgtatttataataaaaaatgttggggggagttgatgaattcctgttaaaagctgttcttgtgtgttacatgtaacagacatggtaaatatttgtttacagtctttgtttaacaaaccatgcatttaagtttaagtgaagtcaacaaaaaggaaataggtgtatggatatgtgattttgagattaaagttagtcttaaaatgtaaataaaatgtgaaacgtgtcctcagagactgtgccatttctattatgttgatgtatatgtacagtaccttgccagggaagcaaaaattggaattattgtagcttttcatgtatacacacttttatttaccctattttgtgtacttcttgtgaattataatttgcagactatttcagaaaagaaattatctagtttaatttcttctttggacaaggagtcctaggtattatattttgagtttgatttcaccagaaataataatattaaaaagatctttgcattctggcagttcttttaggattataggttgcaaattatccaaatatatatcccattttttaaagcat

SEQ ID NO: 7448 - protein, 58 aa, Homo sapiens; identical to SEQ ID NO: 7446

SEQ ID NO: 7449 - DNA, 4197 bp, Homo sapiens
gcgggcggctgcgtcgggctgcaggagaagatggcggtctccacagacaaattatgaaaacagaatatatagcctgaaagtagaatgtggacctaaatacccagaagctcctccgtcagttagatttgtaacaaaaattaatatgaacggaataaataattccagtgggatggtggatgcccggagcataccagtgttagcaaaatggcaaaattcatatagcattaaagttgtacttcaagagctaagacgtctaatgatgtccaaagaaaatatgaagcttccacagccaccagaaggacaaacatacaacaattaattttagtggatctcaaacttgtcttaaatcaacaaccttctactcatgttaatgtcttgattaaatatcacaatgcaaaatacacattaagtaaaagaattccagctggtaaacatgacctggacatttgtaagaatatatttaatatatgtacacccattatgttttcaggtaacaggaggaaaaatgcagcacaattttttttctcttgaaaggcactgtcatttaaacataaacctggagtactcgaaatagaattcaggtttacaagatgaaagcgtgtggagaagtgtcagatggcagtggaagcatgtgtgtttctaaaaagtaaaaatctcaagaaaacagaaatggcatgctttacccatcttacttagtgaaagagagctgcagttgaaattgtttaaaaagtagcaggtacaatgaatattgtcacagatgtgttaatttttgaagcaatgtgggtgctgactactagtagtatcaaaaatatgttcaggattgttttgatacctgtatttataataaaaaatgttggggggagttgatgaattcctgttaaaagctgttcttgtgtgttacatgtaacagacatggtaaatatttgtttacagtctttgtttaacaaaccatgcatttaagtttaagtgaagtcaacaaaaaggaaataggtgtatggatatgtgattttgagattaaagttagtcttaaaatgtaaataaaatgtgaaacgtgtcctcagagactgtgccatttctattatgttgatgtatatgtacagtaccttgccagggaagcaaaaattggaattattgtagcttttcatgtatacacacttttatttaccctattttgtgtacttcttgtgaattataatttgcagactatttcagaaaagaaattatctagtttaatttcttctttggacaaggagtcctaggtattatattttgagtttgatttcaccagaaataataatattaaaaagatctttgcattctggcagttcttttaggattataggttgcaaattatccaaatatatatcccattttttaaagcataatatcttttttagttgtttttctgtgaagcttttggttaataaatagggtcaactaattggagacttttctcttccaattagggcttttaatactaacaaggataactttattcattcctcgtattctctactctaacaaatatgaactctgaagttgaaaagtcatttatgttccgctttcaccaaagtgacgtgaggctttaggtcactgtttcacttcaaagtactggatccaaagctttgttgaaaatgctgtttgatgaattcactgaagaatatagaaaggtggtcaggtaaagtctacttttattttgtcaagcttaataatttgtgtcatactttaccccagtatatataggcaaaccaaaaccttatcaaatattaaattagttgtttaaactttgcttataaagtattggccatgtggtggctcatgccgctaatcccagcactttgggaggctgagacgggcagatcacttgaggtcaggagcttgagaccagcctggccaacatgatgaaaccctgtctctactaaaaatacaaaaaattagccaggtgtggtggtgggtacttgtagtcccagctactcgggaggctgggcaggagaactacttgaaactggcagacagaggttgcagtgccgagagcgcaccactgctccagcctgggcaacagagcaagactccatctcaaaaaaaaaaaaaaaaagaaaaatattaataattgaccttggctgtatattaaaatagttacttttatagtagagcacatttctcaaacatgccctgaaaggcttttatcaagctcatataaagttaaagctttgagctaccttttcttggccaataaagtcactgacagtttatgtaaacattaatttcaacatggctgttgcattttaattatcaaaaatgtttaaaatgctttaagatgacacatagagaacatacacatacatacaaattagtgcatttgtaatttgttaaatttgaaatgaactattaccttgaaatatagtctttaaaaatttttaatggttaaagattaaattgaatgaaactgtagtctaatggtaactgatgatctgaatccgtctctctgataacctcctttccattttgaaaatgtgtcttattatacatggaagctagtaactacgtgaatgctgttggcaggatgagggtctgggtacctcagtctcttgtcctgtttccttcccccaaatccaccattgtgaagttgccaaccccctgccgccttcccctgccaagtacatgttgtcagagtcagccctataatgttcatttcccctcttgtttgtgggattatggatctctgcagaaatctgcatgccaattaacccatttctaaagcagaatccattttgcatgtcacaatcaagatgtacttggcaatctaagacacactgggagactgtaagaggaattaatatagaaaagctcttaattataataacatttggaagaaatttttcctttgttttgtaaagtggctaaggttgtaggagtgtgtggtatttattaccttttaaatgaactgtaaatttgccttagaaatttgtttaaaaggctagcaagtgagacccttgaggatgatcatatactaataaagattaccaaaagaaacttcttgtcctgttaggtcagtgttatgatttaatggttttaattacttaaccaattttaagaattgacaatttttaaaaatatttttttctaccattctaaagtaatgtcttttgttgtgggtttatgtgtaactacaggattttggaacataaacattttgaaggatagtcaatggtatttagtcttggatataaaaatagagaaaatttatagctttatgttattaaaataatttatcacacagagtgatttgaggttttcgcagagtagatttgtttgactcatggtttattagtctggattacttaagaacaatatgttgattttaatgttaattcccactaaatatataatattgataaatacatgtgaaattaatattgtttggaaaatgtagaggacacagctgggaattatgaatgcttttttcttaataggtttggtgtgtgtggctttgaatggttctgctgatgcatcatggaaagacagcagggaactgtagcctgccatcaaaactgtatcaactcttttaatgagcatgtgactgtattaggtacattttgaagaatataagtactgatgataaagtctagtatgcataataggattttggaggcatttcaggaattttccttttatagtatgctttttaggcatctgtatgtgtaatatcatagtatcatttattgctgggatggatcgaaaagcactgcttttacttttctgataagtatcaaaatgattttccagtaccaacttgactggcttttaattattgtcacacacacacaaaattcaactcctcaaggtttgggaaaattgtgtatttttttgtatacaagataaaagtgtcataaaaaggaatggatgaattgttgataggaacattagcagttaatttttacctgatactgagtttactgtaaaataggaaatgcataggaaggaatacctcctaaataatatgccttatagaatgatgaaatcttaccatagttcatactgaaaatgttgtttatttaaaagtattgtggagtgttgaaaataaagatacacaataagtattttctgaagagaaaattaatgaaggtatttaatgatataggaaataagtgacaagttaaagtccattttgtttcaataaaggagttgtgcaaactc

SEQ ID NO: 7450 - protein, 58 aa, Homo sapiens; identical to SEQ ID NO: 7446

SEQ ID NO: 7451 - DNA, 1093 bp, Homo sapiens
ggctgcgtcgggctgcaggagaagatggcggtctccacaggagttaaagttcctcgtaattttcgcttgttggaagaacttgaagaaggacaaaaaggagtaggcgacggtacagttagctggggccttgaagatgatgaagatatgacacttacaaggtggacaggcatgattattgggccaccaagggtggatgcccggagcataccagtgttagcaaaatggcaaaattcatatagcattaaagttgtacttcaagagctaagacgtctaatgatgtccaaagaaaatatgaagcttccacagccaccagaaggacaaacatacaacaattaattttagtggatctcaaacttgtcttaaatcaacaaccttctactcatgttaatgtcttgattaaatatcacaatgcaaaatacacattaagtaaaagaattccagctggtaaacatgacctggacatttgtaagaatatatttaatatatgtacacccattatgttttcaggtaacaggaggaaaaatgcagcacaattttttttctcttgaaaggcactgtcatttaaacataaacctggagtactcgaaatagaattcaggtttacaagatgaaagcgtgtggagaagtgtcagatggcagtggaagcatgtgtgtttctaaaaagtaaaaatctcaagaaaacagaaatggcatgctttacccatcttacttagtgaaagagagctgcagttgaaattgtttaaaaagtagcaggtacaatgaatattgtcacagatgtgttaatttttgaagcaatgtgggtgctgactactagtagtatcaaaaatatgttcaggattgttttgatacctgtatttataataaaaaatgttggggggagttgatgaattcctgttaaaagctgttcttgtgtgttacatgtaacagacatggtaaatatttgtttacagtctttgtttaacaaaccatgcatttaagtttaagtgaagtcaacaaaaaggaaataggtgtatggatatgtgattttgagattaaagttagtcttaaaatgtaaataaaatgtgaaacgtgtcctcagagactgtgccatttc

SEQ ID NO: 7452 - protein, 103 aa, Homo sapiens
MAVSTGVKVPRNFRLLEELEEGQKGVGDGTVSWGLEDDEDMTLTRWTGMIIGPPRVDARSIPVLAKWQNSYSIKVVLQELRRLMMSKENMKLPQPPEGQTYNN

SEQ ID NO: 7453 - DNA, 1543 bp, Homo sapiens
ggctgcgtcgggctgcaggagaagatggcggtctccacagagtcactcatgtggttgcatcagctggtgaagggataggcttgttgcccgggacgccttgctccccctccctgcagcctctccaggtggccagttaggacttcctcacatcccggtggtgtcagggtgttcagaattcttacatgatggttggcttccaaaagaacgaaagcagaagttagcattcctcttacaaggagttaaagttcctcgtaattttcgcttgttggaagaacttgaagaaggacaaaaaggagtaggcgacggtacagttagctggggccttgaagatgatgaagatatgacacttacaaggtggacaggcatgattattgggccaccaaggctggaataattgaggaaggctgaacagtggaggaagttgcctttggaatgatccctaaaggactgactggtaggatttcagaaggtggtgatggggatggagaacattccagatagagaggagaaaagacaaattatgaaaacagaatatatagcctgaaagtagaatgtggacctaaatacccagaagctcctccgtcagttagatttgtaacaaaaattaatatgaacggaataaataattccagtgggatggtggatgcccggagcataccagtgttagcaaaatggcaaaattcatatagcattaaagttgtacttcaagagctaagacgtctaatgatgtccaaagaaaatatgaagcttccacagccaccagaaggacaaacatacaacaattaattttagtggatctcaaacttgtcttaaatcaacaaccttctactcatgttaatgtcttgattaaatatcacaatgcaaaatacacattaagtaaaagaattccagctggtaaacatgacctggacatttgtaagaatatatttaatatatgtacacccattatgttttcaggtaacaggaggaaaaatgcagcacaattttttttctcttgaaaggcactgtcatttaaacataaacctggagtactcgaaatagaattcaggtttacaagatgaaagcgtgtggagaagtgtcagatggcagtggaagcatgtgtgtttctaaaaagtaaaaatctcaagaaaacagaaatggcatgctttacccatcttacttagtgaaagagagctgcagttgaaattgtttaaaaagtagcaggtacaatgaatattgtcacagatgtgttaatttttgaagcaatgtgggtgctgactactagtagtatcaaaaatatgttcaggattgttttgatacctgtatttataataaaaaatgttggggggagttgatgaattcctgttaaaagctgttcttgtgtgttacatgtaacagacatggtaaatatttgtttacagtctttgtttaacaaaccatgcatttaagtttaagtgaagtcaacaaaaaggaaataggtgtatggatatgtgattttgagattaaagttagtcttaaaatgtaaataaaatgtgaaacgtgtcctcagagactgtgccatttc

SEQ ID NO: 7454 - protein, 58 aa, Homo sapiens; identical to SEQ ID NO: 7446

SEQ ID NO: 7455 - DNA, 1415 bp, Homo sapiens
ggctgcgtcgggctgcaggagaagatggcggtctccacagagtcactcatgtggttgcatcagctggtgaagggataggcttgttgcccgggacgccttgctccccctccctgcagcctctccaggtggccagttaggacttcctcacatcccggtggtgtcagggtgttcagaattcttacatgatggttggcttccaaaagaacgaaagcagaagttagcattcctcttacaaggagttaaagttcctcgtaattttcgcttgttggaagaacttgaagaaggacaaaaaggagtaggcgacggtacagttagctggggccttgaagatgatgaagatatgacacttacaaggtggacaggcatgattattgggccaccaaggacaaattatgaaaacagaatatatagcctgaaagtagaatgtggacctaaatacccagaagctcctccgtcagttagatttgtaacaaaaattaatatgaacggaataaataattccagtgggatggtggatgcccggagcataccagtgttagcaaaatggcaaaattcatatagcattaaagttgtacttcaagagctaagacgtctaatgatgtccaaagaaaatatgaagcttccacagccaccagaaggacaaacatacaacaattaattttagtggatctcaaacttgtcttaaatcaacaaccttctactcatgttaatgtcttgattaaatatcacaatgcaaaatacacattaagtaaaagaattccagctggtaaacatgacctggacatttgtaagaatatatttaatatatgtacacccattatgttttcaggtaacaggaggaaaaatgcagcacaattttttttctcttgaaaggcactgtcatttaaacataaacctggagtactcgaaatagaattcaggtttacaagatgaaagcgtgtggagaagtgtcagatggcagtggaagcatgtgtgtttctaaaaagtaaaaatctcaagaaaacagaaatggcatgctttacccatcttacttagtgaaagagagctgcagttgaaattgtttaaaaagtagcaggtacaatgaatattgtcacagatgtgttaatttttgaagcaatgtgggtgctgactactagtagtatcaaaaatatgttcaggattgttttgatacctgtatttataataaaaaatgttggggggagttgatgaattcctgttaaaagctgttcttgtgtgttacatgtaacagacatggtaaatatttgtttacagtctttgtttaacaaaccatgcatttaagtttaagtgaagtcaacaaaaaggaaataggtgtatggatatgtgattttgagattaaagttagtcttaaaatgtaaataaaatgtgaaacgtgtcctcagagactgtgccatttc

SEQ ID NO: 7456 - protein, 105 aa, Homo sapiens
MTLTRWTGMIIGPPRTNYENRIYSLKVECGPKYPEAPPSVRFVTKINMNGINNSSGMVDARSIPVLAKWQNSYSIKVVLQELRRLMMSKENMKLPQPPEGQTYNN

SEQ ID NO: 7457 - DNA, 1850 bp, Homo sapiens
ggctgcgtcgggctgcaggagaagatggcggtctccacagagtcactcatgtggttgcatcagctggtgaagggataggcttgttgcccgggacgccttgctccccctccctgcagcctctccaggtggccagttaggacttcctcacatcccggtggtgtcagggtgttcagaattcttacatgatggttggcttccaaaagaacgaaagcagaagttagcattcctcttacaaggagttaaagttcctcgtaattttcgcttgttggaagaacttgaagaaggacaaaaaggagtaggcgacggtacagttagctggggccttgaagatgatgaagatatgacacttacaaggtggacaggcatgattattgggccaccaaggctggaataattgaggaaggctgaacagtggaggaagttgcctttggaatgatccctaaaggactgactggtaggatttcagaaggtggtgatggggatggagaacattccagatagagaggagaaaagacaaattatgaaaacagaatatatagcctgaaagtagaatgtggacctaaatacccagaagctcctccgtcagttagatttgtaacaaaaattaatatgaacggaataaataattccagtgggatggtggatgcccggagcataccagtgttagcaaaatggcaaaattcatatagcattaaagttgtacttcaagagctaagacgtctaatgatgtccaaagaaaatatgaagcttccacagccaccagaaggacaaacatacaacaattaattttagtggatctcaaacttgtcttaaatcaacaaccttctactcatgttaatgtcttgattaaatatcacaatgcaaaatacacattaagtaaaagaattccagctggtaaacatgacctggacatttgtaagaatatatttaatatatgtacacccattatgttttcaggtaacaggaggaaaaatgcagcacaattttttttctcttgaaaggcactgtcatttaaacataaacctggagtactcgaaatagaattcaggtttacaagatgaaagcgtgtggagaagtgtcagatggcagtggaagcatgtgtgtttctaaaaagtaaaaatctcaagaaaacagaaatggcatgctttacccatcttacttagtgaaagagagctgcagttgaaattgtttaaaaagtagcaggtacaatgaatattgtcacagatgtgttaatttttgaagcaatgtgggtgctgactactagtagtatcaaaaatatgttcaggattgttttgatacctgtatttataataaaaaatgttggggggagttgatgaattcctgttaaaagctgttcttgtgtgttacatgtaacagacatggtaaatatttgtttacagtctttgtttaacaaaccatgcatttaagtttaagtgaagtcaacaaaaaggaaataggtgtatggatatgtgattttgagattaaagttagtcttaaaatgtaaataaaatgtgaaacgtgtcctcagagactgtgccatttctattatgttgatgtatatgtacagtaccttgccagggaagcaaaaattggaattattgtagcttttcatgtatacacacttttatttaccctattttgtgtacttcttgtgaattataatttgcagactatttcagaaaagaaattatctagtttaatttcttctttggacaaggagtcctaggtattatattttgagtttgatttcaccagaaataataatattaaaaagatctttgcattctggcagttcttttaggattataggttgcaaattatccaaatatatatcccattttttaaagcat

SEQ ID NO: 7458 - protein, 58 aa, Homo sapiens; identical to SEQ ID NO: 7446

SEQ ID NO: 7459 - DNA, 1722 bp, Homo sapiens
ggctgcgtcgggctgcaggagaagatggcggtctccacagagtcactcatgtggttgcatcagctggtgaagggataggcttgttgcccgggacgccttgctccccctccctgcagcctctccaggtggccagttaggacttcctcacatcccggtggtgtcagggtgttcagaattcttacatgatggttggcttccaaaagaacgaaagcagaagttagcattcctcttacaaggagttaaagttcctcgtaattttcgcttgttggaagaacttgaagaaggacaaaaaggagtaggcgacggtacagttagctggggccttgaagatgatgaagatatgacacttacaaggtggacaggcatgattattgggccaccaaggacaaattatgaaaacagaatatatagcctgaaagtagaatgtggacctaaatacccagaagctcctccgtcagttagatttgtaacaaaaattaatatgaacggaataaataattccagtgggatggtggatgcccggagcataccagtgttagcaaaatggcaaaattcatatagcattaaagttgtacttcaagagctaagacgtctaatgatgtccaaagaaaatatgaagcttccacagccaccagaaggacaaacatacaacaattaattttagtggatctcaaacttgtcttaaatcaacaaccttctactcatgttaatgtcttgattaaatatcacaatgcaaaatacacattaagtaaaagaattccagctggtaaacatgacctggacatttgtaagaatatatttaatatatgtacacccattatgttttcaggtaacaggaggaaaaatgcagcacaattttttttctcttgaaaggcactgtcatttaaacataaacctggagtactcgaaatagaattcaggtttacaagatgaaagcgtgtggagaagtgtcagatggcagtggaagcatgtgtgtttctaaaaagtaaaaatctcaagaaaacagaaatggcatgctttacccatcttacttagtgaaagagagctgcagttgaaattgtttaaaaagtagcaggtacaatgaatattgtcacagatgtgttaatttttgaagcaatgtgggtgctgactactagtagtatcaaaaatatgttcaggattgttttgatacctgtatttataataaaaaatgttggggggagttgatgaattcctgttaaaagctgttcttgtgtgttacatgtaacagacatggtaaatatttgtttacagtctttgtttaacaaaccatgcatttaagtttaagtgaagtcaacaaaaaggaaataggtgtatggatatgtgattttgagattaaagttagtcttaaaatgtaaataaaatgtgaaacgtgtcctcagagactgtgccatttctattatgttgatgtatatgtacagtaccttgccagggaagcaaaaattggaattattgtagcttttcatgtatacacacttttatttaccctattttgtgtacttcttgtgaattataatttgcagactatttcagaaaagaaattatctagtttaatttcttctttggacaaggagtcctaggtattatattttgagtttgatttcaccagaaataataatattaaaaagatctttgcattctggcagttcttttaggattataggttgcaaattatccaaatatatatcccattttttaaagcat

SEQ ID NO: 7460 - protein, 105 aa, Homo sapiens; identical to SEQ ID NO: 7456

SEQ ID NO: 7461 - DNA, 1400 bp, Homo sapiens
ggctgcgtcgggctgcaggagaagatggcggtctccacaggagttaaagttcctcgtaattttcgcttgttggaagaacttgaagaaggacaaaaaggagtaggcgacggtacagttagctggggccttgaagatgatgaagatatgacacttacaaggtggacaggcatgattattgggccaccaagggtggatgcccggagcataccagtgttagcaaaatggcaaaattcatatagcattaaagttgtacttcaagagctaagacgtctaatgatgtccaaagaaaatatgaagcttccacagccaccagaaggacaaacatacaacaattaattttagtggatctcaaacttgtcttaaatcaacaaccttctactcatgttaatgtcttgattaaatatcacaatgcaaaatacacattaagtaaaagaattccagctggtaaacatgacctggacatttgtaagaatatatttaatatatgtacacccattatgttttcaggtaacaggaggaaaaatgcagcacaattttttttctcttgaaaggcactgtcatttaaacataaacctggagtactcgaaatagaattcaggtttacaagatgaaagcgtgtggagaagtgtcagatggcagtggaagcatgtgtgtttctaaaaagtaaaaatctcaagaaaacagaaatggcatgctttacccatcttacttagtgaaagagagctgcagttgaaattgtttaaaaagtagcaggtacaatgaatattgtcacagatgtgttaatttttgaagcaatgtgggtgctgactactagtagtatcaaaaatatgttcaggattgttttgatacctgtatttataataaaaaatgttggggggagttgatgaattcctgttaaaagctgttcttgtgtgttacatgtaacagacatggtaaatatttgtttacagtctttgtttaacaaaccatgcatttaagtttaagtgaagtcaacaaaaaggaaataggtgtatggatatgtgattttgagattaaagttagtcttaaaatgtaaataaaatgtgaaacgtgtcctcagagactgtgccatttctattatgttgatgtatatgtacagtaccttgccagggaagcaaaaattggaattattgtagcttttcatgtatacacacttttatttaccctattttgtgtacttcttgtgaattataatttgcagactatttcagaaaagaaattatctagtttaatttcttctttggacaaggagtcctaggtattatattttgagtttgatttcaccagaaataataatattaaaaagatctttgcattctggcagttcttttaggattataggttgcaaattatccaaatatatatcccattttttaaagcat

SEQ ID NO: 7462 - protein, 103 aa, Homo sapiens; identical to SEQ ID NO: 7452

SEQ ID NO: 7463 - DNA, 4664 bp, Homo sapiens
ggctgcgtcgggctgcaggagaagatggcggtctccacagagtcactcatgtggttgcatcagctggtgaagggataggcttgttgcccgggacgccttgctccccctccctgcagcctctccaggtggccagttaggacttcctcacatcccggtggtgtcagggtgttcagaattcttacatgatggttggcttccaaaagaacgaaagcagaagttagcattcctcttacaaggagttaaagttcctcgtaattttcgcttgttggaagaacttgaagaaggacaaaaaggagtaggcgacggtacagttagctggggccttgaagatgatgaagatatgacacttacaaggtggacaggcatgattattgggccaccaaggctggaataattgaggaaggctgaacagtggaggaagttgcctttggaatgatccctaaaggactgactggtaggatttcagaaggtggtgatggggatggagaacattccagatagagaggagaaaagacaaattatgaaaacagaatatatagcctgaaagtagaatgtggacctaaatacccagaagctcctccgtcagttagatttgtaacaaaaattaatatgaacggaataaataattccagtgggatggtggatgcccggagcataccagtgttagcaaaatggcaaaattcatatagcattaaagttgtacttcaagagctaagacgtctaatgatgtccaaagaaaatatgaagcttccacagccaccagaaggacaaacatacaacaattaattttagtggatctcaaacttgtcttaaatcaacaaccttctactcatgttaatgtcttgattaaatatcacaatgcaaaatacacattaagtaaaagaattccagctggtaaacatgacctggacatttgtaagaatatatttaatatatgtacacccattatgttttcaggtaacaggaggaaaaatgcagcacaattttttttctcttgaaaggcactgtcatttaaacataaacctggagtactcgaaatagaattcaggtttacaagatgaaagcgtgtggagaagtgtcagatggcagtggaagcatgtgtgtttctaaaaagtaaaaatctcaagaaaacagaaatggcatgctttacccatcttacttagtgaaagagagctgcagttgaaattgtttaaaaagtagcaggtacaatgaatattgtcacagatgtgttaatttttgaagcaatgtgggtgctgactactagtagtatcaaaaatatgttcaggattgttttgatacctgtatttataataaaaaatgttggggggagttgatgaattcctgttaaaagctgttcttgtgtgttacatgtaacagacatggtaaatatttgtttacagtctttgtttaacaaaccatgcatttaagtttaagtgaagtcaacaaaaaggaaataggtgtatggatatgtgattttgagattaaagttagtcttaaaatgtaaataaaatgtgaaacgtgtcctcagagactgtgccatttctattatgttgatgtatatgtacagtaccttgccagggaagcaaaaattggaattattgtagcttttcatgtatacacacttttatttaccctattttgtgtacttcttgtgaattataatttgcagactatttcagaaaagaaattatctagtttaatttcttctttggacaaggagtcctaggtattatattttgagtttgatttcaccagaaataataatattaaaaagatctttgcattctggcagttcttttaggattataggttgcaaattatccaaatatatatcccattttttaaagcataatatcttttttagttgtttttctgtgaagcttttggttaataaatagggtcaactaattggagacttttctcttccaattagggcttttaatactaacaaggataactttattcattcctcgtattctctactctaacaaatatgaactctgaagttgaaaagtcatttatgttccgctttcaccaaagtgacgtgaggctttaggtcactgtttcacttcaaagtactggatccaaagctttgttgaaaatgctgtttgatgaattcactgaagaatatagaaaggtggtcaggtaaagtctacttttattttgtcaagcttaataatttgtgtcatactttaccccagtatatataggcaaaccaaaaccttatcaaatattaaattagttgtttaaactttgcttataaagtattggccatgtggtggctcatgccgctaatcccagcactttgggaggctgagacgggcagatcacttgaggtcaggagcttgagaccagcctggccaacatgatgaaaccctgtctctactaaaaatacaaaaaattagccaggtgtggtggtgggtacttgtagtcccagctactcgggaggctgggcaggagaactacttgaaactggcagacagaggttgcagtgccgagagcgcaccactgctccagcctgggcaacagagcaagactccatctcaaaaaaaaaaaaaaaaagaaaaatattaataattgaccttggctgtatattaaaatagttacttttatagtagagcacatttctcaaacatgccctgaaaggcttttatcaagctcatataaagttaaagctttgagctaccttttcttggccaataaagtcactgacagtttatgtaaacattaatttcaacatggctgttgcattttaattatcaaaaatgtttaaaatgctttaagatgacacatagagaacatacacatacatacaaattagtgcatttgtaatttgttaaatttgaaatgaactattaccttgaaatatagtctttaaaaatttttaatggttaaagattaaattgaatgaaactgtagtctaatggtaactgatgatctgaatccgtctctctgataacctcctttccattttgaaaatgtgtcttattatacatggaagctagtaactacgtgaatgctgttggcaggatgagggtctgggtacctcagtctcttgtcctgtttccttcccccaaatccaccattgtgaagttgccaaccccctgccgccttcccctgccaagtacatgttgtcagagtcagccctataatgttcatttcccctcttgtttgtgggattatggatctctgcagaaatctgcatgccaattaacccatttctaaagcagaatccattttgcatgtcacaatcaagatgtacttggcaatctaagacacactgggagactgtaagaggaattaatatagaaaagctcttaattataataacatttggaagaaatttttcctttgttttgtaaagtggctaaggttgtaggagtgtgtggtatttattaccttttaaatgaactgtaaatttgccttagaaatttgtttaaaaggctagcaagtgagacccttgaggatgatcatatactaataaagattaccaaaagaaacttcttgtcctgttaggtcagtgttatgatttaatggttttaattacttaaccaattttaagaattgacaatttttaaaaatatttttttctaccattctaaagtaatgtcttttgttgtgggtttatgtgtaactacaggattttggaacataaacattttgaaggatagtcaatggtatttagtcttggatataaaaatagagaaaatttatagctttatgttattaaaataatttatcacacagagtgatttgaggttttcgcagagtagatttgtttgactcatggtttattagtctggattacttaagaacaatatgttgattttaatgttaattcccactaaatatataatattgataaatacatgtgaaattaatattgtttggaaaatgtagaggacacagctgggaattatgaatgcttttttcttaataggtttggtgtgtgtggctttgaatggttctgctgatgcatcatggaaagacagcagggaactgtagcctgccatcaaaactgtatcaactcttttaatgagcatgtgactgtattaggtacattttgaagaatataagtactgatgataaagtctagtatgcataataggattttggaggcatttcaggaattttccttttatagtatgctttttaggcatctgtatgtgtaatatcatagtatcatttattgctgggatggatcgaaaagcactgcttttacttttctgataagtatcaaaatgattttccagtaccaacttgactggcttttaattattgtcacacacacacaaaattcaactcctcaaggtttgggaaaattgtgtatttttttgtatacaagataaaagtgtcataaaaaggaatggatgaattgttgataggaacattagcagttaatttttacctgatactgagtttactgtaaaataggaaatgcataggaaggaatacctcctaaataatatgccttatagaatgatgaaatcttaccatagttcatactgaaaatgttgtttatttaaaagtattgtggagtgttgaaaataaagatacacaataagtattttctgaagagaaaattaatgaaggtatttaatgatataggaaataagtgacaagttaaagtccattttgtttcaataaaggagttgtgcaaactc

SEQ ID NO: 7464 - protein, 58 aa, Homo sapiens; identical to SEQ ID NO: 7446

SEQ ID NO: 7465 - DNA, 4536 bp, Homo sapiens
ggctgcgtcgggctgcaggagaagatggcggtctccacagagtcactcatgtggttgcatcagctggtgaagggataggcttgttgcccgggacgccttgctccccctccctgcagcctctccaggtggccagttaggacttcctcacatcccggtggtgtcagggtgttcagaattcttacatgatggttggcttccaaaagaacgaaagcagaagttagcattcctcttacaaggagttaaagttcctcgtaattttcgcttgttggaagaacttgaagaaggacaaaaaggagtaggcgacggtacagttagctggggccttgaagatgatgaagatatgacacttacaaggtggacaggcatgattattgggccaccaaggacaaattatgaaaacagaatatatagcctgaaagtagaatgtggacctaaatacccagaagctcctccgtcagttagatttgtaacaaaaattaatatgaacggaataaataattccagtgggatggtggatgcccggagcataccagtgttagcaaaatggcaaaattcatatagcattaaagttgtacttcaagagctaagacgtctaatgatgtccaaagaaaatatgaagcttccacagccaccagaaggacaaacatacaacaattaattttagtggatctcaaacttgtcttaaatcaacaaccttctactcatgttaatgtcttgattaaatatcacaatgcaaaatacacattaagtaaaagaattccagctggtaaacatgacctggacatttgtaagaatatatttaatatatgtacacccattatgttttcaggtaacaggaggaaaaatgcagcacaattttttttctcttgaaaggcactgtcatttaaacataaacctggagtactcgaaatagaattcaggtttacaagatgaaagcgtgtggagaagtgtcagatggcagtggaagcatgtgtgtttctaaaaagtaaaaatctcaagaaaacagaaatggcatgctttacccatcttacttagtgaaagagagctgcagttgaaattgtttaaaaagtagcaggtacaatgaatattgtcacagatgtgttaatttttgaagcaatgtgggtgctgactactagtagtatcaaaaatatgttcaggattgttttgatacctgtatttataataaaaaatgttggggggagttgatgaattcctgttaaaagctgttcttgtgtgttacatgtaacagacatggtaaatatttgtttacagtctttgtttaacaaaccatgcatttaagtttaagtgaagtcaacaaaaaggaaataggtgtatggatatgtgattttgagattaaagttagtcttaaaatgtaaataaaatgtgaaacgtgtcctcagagactgtgccatttctattatgttgatgtatatgtacagtaccttgccagggaagcaaaaattggaattattgtagcttttcatgtatacacacttttatttaccctattttgtgtacttcttgtgaattataatttgcagactatttcagaaaagaaattatctagtttaatttcttctttggacaaggagtcctaggtattatattttgagtttgatttcaccagaaataataatattaaaaagatctttgcattctggcagttcttttaggattataggttgcaaattatccaaatatatatcccattttttaaagcataatatcttttttagttgtttttctgtgaagcttttggttaataaatagggtcaactaattggagacttttctcttccaattagggcttttaatactaacaaggataactttattcattcctcgtattctctactctaacaaatatgaactctgaagttgaaaagtcatttatgttccgctttcaccaaagtgacgtgaggctttaggtcactgtttcacttcaaagtactggatccaaagctttgttgaaaatgctgtttgatgaattcactgaagaatatagaaaggtggtcaggtaaagtctacttttattttgtcaagcttaataatttgtgtcatactttaccccagtatatataggcaaaccaaaaccttatcaaatattaaattagttgtttaaactttgcttataaagtattggccatgtggtggctcatgccgctaatcccagcactttgggaggctgagacgggcagatcacttgaggtcaggagcttgagaccagcctggccaacatgatgaaaccctgtctctactaaaaatacaaaaaattagccaggtgtggtggtgggtacttgtagtcccagctactcgggaggctgggcaggagaactacttgaaactggcagacagaggttgcagtgccgagagcgcaccactgctccagcctgggcaacagagcaagactccatctcaaaaaaaaaaaaaaaaagaaaaatattaataattgaccttggctgtatattaaaatagttacttttatagtagagcacatttctcaaacatgccctgaaaggcttttatcaagctcatataaagttaaagctttgagctaccttttcttggccaataaagtcactgacagtttatgtaaacattaatttcaacatggctgttgcattttaattatcaaaaatgtttaaaatgctttaagatgacacatagagaacatacacatacatacaaattagtgcatttgtaatttgttaaatttgaaatgaactattaccttgaaatatagtctttaaaaatttttaatggttaaagattaaattgaatgaaactgtagtctaatggtaactgatgatctgaatccgtctctctgataacctcctttccattttgaaaatgtgtcttattatacatggaagctagtaactacgtgaatgctgttggcaggatgagggtctgggtacctcagtctcttgtcctgtttccttcccccaaatccaccattgtgaagttgccaaccccctgccgccttcccctgccaagtacatgttgtcagagtcagccctataatgttcatttcccctcttgtttgtgggattatggatctctgcagaaatctgcatgccaattaacccatttctaaagcagaatccattttgcatgtcacaatcaagatgtacttggcaatctaagacacactgggagactgtaagaggaattaatatagaaaagctcttaattataataacatttggaagaaatttttcctttgttttgtaaagtggctaaggttgtaggagtgtgtggtatttattaccttttaaatgaactgtaaatttgccttagaaatttgtttaaaaggctagcaagtgagacccttgaggatgatcatatactaataaagattaccaaaagaaacttcttgtcctgttaggtcagtgttatgatttaatggttttaattacttaaccaattttaagaattgacaatttttaaaaatatttttttctaccattctaaagtaatgtcttttgttgtgggtttatgtgtaactacaggattttggaacataaacattttgaaggatagtcaatggtatttagtcttggatataaaaatagagaaaatttatagctttatgttattaaaataatttatcacacagagtgatttgaggttttcgcagagtagatttgtttgactcatggtttattagtctggattacttaagaacaatatgttgattttaatgttaattcccactaaatatataatattgataaatacatgtgaaattaatattgtttggaaaatgtagaggacacagctgggaattatgaatgcttttttcttaataggtttggtgtgtgtggctttgaatggttctgctgatgcatcatggaaagacagcagggaactgtagcctgccatcaaaactgtatcaactcttttaatgagcatgtgactgtattaggtacattttgaagaatataagtactgatgataaagtctagtatgcataataggattttggaggcatttcaggaattttccttttatagtatgctttttaggcatctgtatgtgtaatatcatagtatcatttattgctgggatggatcgaaaagcactgcttttacttttctgataagtatcaaaatgattttccagtaccaacttgactggcttttaattattgtcacacacacacaaaattcaactcctcaaggtttgggaaaattgtgtatttttttgtatacaagataaaagtgtcataaaaaggaatggatgaattgttgataggaacattagcagttaatttttacctgatactgagtttactgtaaaataggaaatgcataggaaggaatacctcctaaataatatgccttatagaatgatgaaatcttaccatagttcatactgaaaatgttgtttatttaaaagtattgtggagtgttgaaaataaagatacacaataagtattttctgaagagaaaattaatgaaggtatttaatgatataggaaataagtgacaagttaaagtccattttgtttcaataaaggagttgtgcaaactc

SEQ ID NO: 7466 - protein, 105 aa, Homo sapiens; identical to SEQ ID NO: 7456

SEQ ID NO: 7467 - DNA, 4214 bp, Homo sapiens
ggctgcgtcgggctgcaggagaagatggcggtctccacaggagttaaagttcctcgtaattttcgcttgttggaagaacttgaagaaggacaaaaaggagtaggcgacggtacagttagctggggccttgaagatgatgaagatatgacacttacaaggtggacaggcatgattattgggccaccaagggtggatgcccggagcataccagtgttagcaaaatggcaaaattcatatagcattaaagttgtacttcaagagctaagacgtctaatgatgtccaaagaaaatatgaagcttccacagccaccagaaggacaaacatacaacaattaattttagtggatctcaaacttgtcttaaatcaacaaccttctactcatgttaatgtcttgattaaatatcacaatgcaaaatacacattaagtaaaagaattccagctggtaaacatgacctggacatttgtaagaatatatttaatatatgtacacccattatgttttcaggtaacaggaggaaaaatgcagcacaattttttttctcttgaaaggcactgtcatttaaacataaacctggagtactcgaaatagaattcaggtttacaagatgaaagcgtgtggagaagtgtcagatggcagtggaagcatgtgtgtttctaaaaagtaaaaatctcaagaaaacagaaatggcatgctttacccatcttacttagtgaaagagagctgcagttgaaattgtttaaaaagtagcaggtacaatgaatattgtcacagatgtgttaatttttgaagcaatgtgggtgctgactactagtagtatcaaaaatatgttcaggattgttttgatacctgtatttataataaaaaatgttggggggagttgatgaattcctgttaaaagctgttcttgtgtgttacatgtaacagacatggtaaatatttgtttacagtctttgtttaacaaaccatgcatttaagtttaagtgaagtcaacaaaaaggaaataggtgtatggatatgtgattttgagattaaagttagtcttaaaatgtaaataaaatgtgaaacgtgtcctcagagactgtgccatttctattatgttgatgtatatgtacagtaccttgccagggaagcaaaaattggaattattgtagcttttcatgtatacacacttttatttaccctattttgtgtacttcttgtgaattataatttgcagactatttcagaaaagaaattatctagtttaatttcttctttggacaaggagtcctaggtattatattttgagtttgatttcaccagaaataataatattaaaaagatctttgcattctggcagttcttttaggattataggttgcaaattatccaaatatatatcccattttttaaagcataatatcttttttagttgtttttctgtgaagcttttggttaataaatagggtcaactaattggagacttttctcttccaattagggcttttaatactaacaaggataactttattcattcctcgtattctctactctaacaaatatgaactctgaagttgaaaagtcatttatgttccgctttcaccaaagtgacgtgaggctttaggtcactgtttcacttcaaagtactggatccaaagctttgttgaaaatgctgtttgatgaattcactgaagaatatagaaaggtggtcaggtaaagtctacttttattttgtcaagcttaataatttgtgtcatactttaccccagtatatataggcaaaccaaaaccttatcaaatattaaattagttgtttaaactttgcttataaagtattggccatgtggtggctcatgccgctaatcccagcactttgggaggctgagacgggcagatcacttgaggtcaggagcttgagaccagcctggccaacatgatgaaaccctgtctctactaaaaatacaaaaaattagccaggtgtggtggtgggtacttgtagtcccagctactcgggaggctgggcaggagaactacttgaaactggcagacagaggttgcagtgccgagagcgcaccactgctccagcctgggcaacagagcaagactccatctcaaaaaaaaaaaaaaaaagaaaaatattaataattgaccttggctgtatattaaaatagttacttttatagtagagcacatttctcaaacatgccctgaaaggcttttatcaagctcatataaagttaaagctttgagctaccttttcttggccaataaagtcactgacagtttatgtaaacattaatttcaacatggctgttgcattttaattatcaaaaatgtttaaaatgctttaagatgacacatagagaacatacacatacatacaaattagtgcatttgtaatttgttaaatttgaaatgaactattaccttgaaatatagtctttaaaaatttttaatggttaaagattaaattgaatgaaactgtagtctaatggtaactgatgatctgaatccgtctctctgataacctcctttccattttgaaaatgtgtcttattatacatggaagctagtaactacgtgaatgctgttggcaggatgagggtctgggtacctcagtctcttgtcctgtttccttcccccaaatccaccattgtgaagttgccaaccccctgccgccttcccctgccaagtacatgttgtcagagtcagccctataatgttcatttcccctcttgtttgtgggattatggatctctgcagaaatctgcatgccaattaacccatttctaaagcagaatccattttgcatgtcacaatcaagatgtacttggcaatctaagacacactgggagactgtaagaggaattaatatagaaaagctcttaattataataacatttggaagaaatttttcctttgttttgtaaagtggctaaggttgtaggagtgtgtggtatttattaccttttaaatgaactgtaaatttgccttagaaatttgtttaaaaggctagcaagtgagacccttgaggatgatcatatactaataaagattaccaaaagaaacttcttgtcctgttaggtcagtgttatgatttaatggttttaattacttaaccaattttaagaattgacaatttttaaaaatatttttttctaccattctaaagtaatgtcttttgttgtgggtttatgtgtaactacaggattttggaacataaacattttgaaggatagtcaatggtatttagtcttggatataaaaatagagaaaatttatagctttatgttattaaaataatttatcacacagagtgatttgaggttttcgcagagtagatttgtttgactcatggtttattagtctggattacttaagaacaatatgttgattttaatgttaattcccactaaatatataatattgataaatacatgtgaaattaatattgtttggaaaatgtagaggacacagctgggaattatgaatgcttttttcttaataggtttggtgtgtgtggctttgaatggttctgctgatgcatcatggaaagacagcagggaactgtagcctgccatcaaaactgtatcaactcttttaatgagcatgtgactgtattaggtacattttgaagaatataagtactgatgataaagtctagtatgcataataggattttggaggcatttcaggaattttccttttatagtatgctttttaggcatctgtatgtgtaatatcatagtatcatttattgctgggatggatcgaaaagcactgcttttacttttctgataagtatcaaaatgattttccagtaccaacttgactggcttttaattattgtcacacacacacaaaattcaactcctcaaggtttgggaaaattgtgtatttttttgtatacaagataaaagtgtcataaaaaggaatggatgaattgttgataggaacattagcagttaatttttacctgatactgagtttactgtaaaataggaaatgcataggaaggaatacctcctaaataatatgccttatagaatgatgaaatcttaccatagttcatactgaaaatgttgtttatttaaaagtattgtggagtgttgaaaataaagatacacaataagtattttctgaagagaaaattaatgaaggtatttaatgatataggaaataagtgacaagttaaagtccattttgtttcaataaaggagttgtgcaaactc

SEQ ID NO: 7468 - protein, 103 aa, Homo sapiens; identical to SEQ ID NO: 7452

SEQ ID NO: 7469 - DNA, 1346 bp, Homo sapiens
gctgcgtcgggctgcaggagaagatggcggtctccacaggagttaaagttcctcgtaattttcgcttgttggaagaacttgaagaaggacaaaaaggagtaggcgacggtacagttagctggggccttgaagatgatgaagatatgacacttacaaggtggacaggcatgattattgggccaccaaggctggaataattgaggaaggctgaacagtggaggaagttgcctttggaatgatccctaaaggactgactggtaggatttcagaaggtggtgatggggatggagaacattccagatagagaggagaaaagacaaattatgaaaacagaatatatagcctgaaagtagaatgtggacctaaatacccagaagctcctccgtcagttagatttgtaacaaaaattaatatgaacggaataaataattccagtgggatggtggatgcccggagcataccagtgttagcaaaatggcaaaattcatatagcattaaagttgtacttcaagagctaagacgtctaatgatgtccaaagaaaatatgaagcttccacagccaccagaaggacaaacatacaacaattaattttagtggatctcaaacttgtcttaaatcaacaaccttctactcatgttaatgtcttgattaaatatcacaatgcaaaatacacattaagtaaaagaattccagctggtaaacatgacctggacatttgtaagaatatatttaatatatgtacacccattatgttttcaggtaacaggaggaaaaatgcagcacaattttttttctcttgaaaggcactgtcatttaaacataaacctggagtactcgaaatagaattcaggtttacaagatgaaagcgtgtggagaagtgtcagatggcagtggaagcatgtgtgtttctaaaaagtaaaaatctcaagaaaacagaaatggcatgctttacccatcttacttagtgaaagagagctgcagttgaaattgtttaaaaagtagcaggtacaatgaatattgtcacagatgtgttaatttttgaagcaatgtgggtgctgactactagtagtatcaaaaatatgttcaggattgttttgatacctgtatttataataaaaaatgttggggggagttgatgaattcctgttaaaagctgttcttgtgtgttacatgtaacagacatggtaaatatttgtttacagtctttgtttaacaaaccatgcatttaagtttaagtgaagtcaacaaaaaggaaataggtgtatggatatgtgattttgagattaaagttagtcttaaaatgtaaataaaatgtgaaacgtgtcctcagagactgtgccatttc

SEQ ID NO: 7470 - protein, 58 aa, Homo sapiens; identical to SEQ ID NO: 7446

SEQ ID NO: 7471 - DNA, 1653 bp, Homo sapiens
gctgcgtcgggctgcaggagaagatggcggtctccacaggagttaaagttcctcgtaattttcgcttgttggaagaacttgaagaaggacaaaaaggagtaggcgacggtacagttagctggggccttgaagatgatgaagatatgacacttacaaggtggacaggcatgattattgggccaccaaggctggaataattgaggaaggctgaacagtggaggaagttgcctttggaatgatccctaaaggactgactggtaggatttcagaaggtggtgatggggatggagaacattccagatagagaggagaaaagacaaattatgaaaacagaatatatagcctgaaagtagaatgtggacctaaatacccagaagctcctccgtcagttagatttgtaacaaaaattaatatgaacggaataaataattccagtgggatggtggatgcccggagcataccagtgttagcaaaatggcaaaattcatatagcattaaagttgtacttcaagagctaagacgtctaatgatgtccaaagaaaatatgaagcttccacagccaccagaaggacaaacatacaacaattaattttagtggatctcaaacttgtcttaaatcaacaaccttctactcatgttaatgtcttgattaaatatcacaatgcaaaatacacattaagtaaaagaattccagctggtaaacatgacctggacatttgtaagaatatatttaatatatgtacacccattatgttttcaggtaacaggaggaaaaatgcagcacaattttttttctcttgaaaggcactgtcatttaaacataaacctggagtactcgaaatagaattcaggtttacaagatgaaagcgtgtggagaagtgtcagatggcagtggaagcatgtgtgtttctaaaaagtaaaaatctcaagaaaacagaaatggcatgctttacccatcttacttagtgaaagagagctgcagttgaaattgtttaaaaagtagcaggtacaatgaatattgtcacagatgtgttaatttttgaagcaatgtgggtgctgactactagtagtatcaaaaatatgttcaggattgttttgatacctgtatttataataaaaaatgttggggggagttgatgaattcctgttaaaagctgttcttgtgtgttacatgtaacagacatggtaaatatttgtttacagtctttgtttaacaaaccatgcatttaagtttaagtgaagtcaacaaaaaggaaataggtgtatggatatgtgattttgagattaaagttagtcttaaaatgtaaataaaatgtgaaacgtgtcctcagagactgtgccatttctattatgttgatgtatatgtacagtaccttgccagggaagcaaaaattggaattattgtagcttttcatgtatacacacttttatttaccctattttgtgtacttcttgtgaattataatttgcagactatttcagaaaagaaattatctagtttaatttcttctttggacaaggagtcctaggtattatattttgagtttgatttcaccagaaataataatattaaaaagatctttgcattctggcagttcttttaggattataggttgcaaattatccaaatatatatcccattttttaaagcat

SEQ ID NO: 7472 - protein, 58 aa, Homo sapiens; identical to SEQ ID NO: 7446

SEQ ID NO: 7473 - DNA, 4467 bp, Homo sapiens
gctgcgtcgggctgcaggagaagatggcggtctccacaggagttaaagttcctcgtaattttcgcttgttggaagaacttgaagaaggacaaaaaggagtaggcgacggtacagttagctggggccttgaagatgatgaagatatgacacttacaaggtggacaggcatgattattgggccaccaaggctggaataattgaggaaggctgaacagtggaggaagttgcctttggaatgatccctaaaggactgactggtaggatttcagaaggtggtgatggggatggagaacattccagatagagaggagaaaagacaaattatgaaaacagaatatatagcctgaaagtagaatgtggacctaaatacccagaagctcctccgtcagttagatttgtaacaaaaattaatatgaacggaataaataattccagtgggatggtggatgcccggagcataccagtgttagcaaaatggcaaaattcatatagcattaaagttgtacttcaagagctaagacgtctaatgatgtccaaagaaaatatgaagcttccacagccaccagaaggacaaacatacaacaattaattttagtggatctcaaacttgtcttaaatcaacaaccttctactcatgttaatgtcttgattaaatatcacaatgcaaaatacacattaagtaaaagaattccagctggtaaacatgacctggacatttgtaagaatatatttaatatatgtacacccattatgttttcaggtaacaggaggaaaaatgcagcacaattttttttctcttgaaaggcactgtcatttaaacataaacctggagtactcgaaatagaattcaggtttacaagatgaaagcgtgtggagaagtgtcagatggcagtggaagcatgtgtgtttctaaaaagtaaaaatctcaagaaaacagaaatggcatgctttacccatcttacttagtgaaagagagctgcagttgaaattgtttaaaaagtagcaggtacaatgaatattgtcacagatgtgttaatttttgaagcaatgtgggtgctgactactagtagtatcaaaaatatgttcaggattgttttgatacctgtatttataataaaaaatgttggggggagttgatgaattcctgttaaaagctgttcttgtgtgttacatgtaacagacatggtaaatatttgtttacagtctttgtttaacaaaccatgcatttaagtttaagtgaagtcaacaaaaaggaaataggtgtatggatatgtgattttgagattaaagttagtcttaaaatgtaaataaaatgtgaaacgtgtcctcagagactgtgccatttctattatgttgatgtatatgtacagtaccttgccagggaagcaaaaattggaattattgtagcttttcatgtatacacacttttatttaccctattttgtgtacttcttgtgaattataatttgcagactatttcagaaaagaaattatctagtttaatttcttctttggacaaggagtcctaggtattatattttgagtttgatttcaccagaaataataatattaaaaagatctttgcattctggcagttcttttaggattataggttgcaaattatccaaatatatatcccattttttaaagcataatatcttttttagttgtttttctgtgaagcttttggttaataaatagggtcaactaattggagacttttctcttccaattagggcttttaatactaacaaggataactttattcattcctcgtattctctactctaacaaatatgaactctgaagttgaaaagtcatttatgttccgctttcaccaaagtgacgtgaggctttaggtcactgtttcacttcaaagtactggatccaaagctttgttgaaaatgctgtttgatgaattcactgaagaatatagaaaggtggtcaggtaaagtctacttttattttgtcaagcttaataatttgtgtcatactttaccccagtatatataggcaaaccaaaaccttatcaaatattaaattagttgtttaaactttgcttataaagtattggccatgtggtggctcatgccgctaatcccagcactttgggaggctgagacgggcagatcacttgaggtcaggagcttgagaccagcctggccaacatgatgaaaccctgtctctactaaaaatacaaaaaattagccaggtgtggtggtgggtacttgtagtcccagctactcgggaggctgggcaggagaactacttgaaactggcagacagaggttgcagtgccgagagcgcaccactgctccagcctgggcaacagagcaagactccatctcaaaaaaaaaaaaaaaaagaaaaatattaataattgaccttggctgtatattaaaatagttacttttatagtagagcacatttctcaaacatgccctgaaaggcttttatcaagctcatataaagttaaagctttgagctaccttttcttggccaataaagtcactgacagtttatgtaaacattaatttcaacatggctgttgcattttaattatcaaaaatgtttaaaatgctttaagatgacacatagagaacatacacatacatacaaattagtgcatttgtaatttgttaaatttgaaatgaactattaccttgaaatatagtctttaaaaatttttaatggttaaagattaaattgaatgaaactgtagtctaatggtaactgatgatctgaatccgtctctctgataacctcctttccattttgaaaatgtgtcttattatacatggaagctagtaactacgtgaatgctgttggcaggatgagggtctgggtacctcagtctcttgtcctgtttccttcccccaaatccaccattgtgaagttgccaaccccctgccgccttcccctgccaagtacatgttgtcagagtcagccctataatgttcatttcccctcttgtttgtgggattatggatctctgcagaaatctgcatgccaattaacccatttctaaagcagaatccattttgcatgtcacaatcaagatgtacttggcaatctaagacacactgggagactgtaagaggaattaatatagaaaagctcttaattataataacatttggaagaaatttttcctttgttttgtaaagtggctaaggttgtaggagtgtgtggtatttattaccttttaaatgaactgtaaatttgccttagaaatttgtttaaaaggctagcaagtgagacccttgaggatgatcatatactaataaagattaccaaaagaaacttcttgtcctgttaggtcagtgttatgatttaatggttttaattacttaaccaattttaagaattgacaatttttaaaaatatttttttctaccattctaaagtaatgtcttttgttgtgggtttatgtgtaactacaggattttggaacataaacattttgaaggatagtcaatggtatttagtcttggatataaaaatagagaaaatttatagctttatgttattaaaataatttatcacacagagtgatttgaggttttcgcagagtagatttgtttgactcatggtttattagtctggattacttaagaacaatatgttgattttaatgttaattcccactaaatatataatattgataaatacatgtgaaattaatattgtttggaaaatgtagaggacacagctgggaattatgaatgcttttttcttaataggtttggtgtgtgtggctttgaatggttctgctgatgcatcatggaaagacagcagggaactgtagcctgccatcaaaactgtatcaactcttttaatgagcatgtgactgtattaggtacattttgaagaatataagtactgatgataaagtctagtatgcataataggattttggaggcatttcaggaattttccttttatagtatgctttttaggcatctgtatgtgtaatatcatagtatcatttattgctgggatggatcgaaaagcactgcttttacttttctgataagtatcaaaatgattttccagtaccaacttgactggcttttaattattgtcacacacacacaaaattcaactcctcaaggtttgggaaaattgtgtatttttttgtatacaagataaaagtgtcataaaaaggaatggatgaattgttgataggaacattagcagttaatttttacctgatactgagtttactgtaaaataggaaatgcataggaaggaatacctcctaaataatatgccttatagaatgatgaaatcttaccatagttcatactgaaaatgttgtttatttaaaagtattgtggagtgttgaaaataaagatacacaataagtattttctgaagagaaaattaatgaaggtatttaatgatataggaaataagtgacaagttaaagtccattttgtttcaataaaggagttgtgcaaactc

SEQ ID NO: 7474 - protein, 58 aa, Homo sapiens; identical to SEQ ID NO: 7446

SEQ ID NO: 7475 - DNA, 1275 bp, Homo sapiens
agagacgggggtttcaccatgttatccaggatggtctcaatctcctgacctcatgatccacccgccttggcctcccaaagtgctgggattgcaggtgagttaaagttcctcgtaattttcgcttgttggaagaacttgaagaaggacaaaaaggagtaggcgacggtacagttagctggggccttgaagatgatgaagatatgacacttacaaggtggacaggcatgattattgggccaccaaggacaaattatgaaaacagaatatatagcctgaaagtagaatgtggacctaaatacccagaagctcctccgtcagttagatttgtaacaaaaattaatatgaacggaataaataattccagtgggatggtggatgcccggagcataccagtgttagcaaaatggcaaaattcatatagcattaaagttgtacttcaagagctaagacgtctaatgatgtccaaagaaaatatgaagcttccacagccaccagaaggacaaacatacaacaattaattttagtggatctcaaacttgtcttaaatcaacaaccttctactcatgttaatgtcttgattaaatatcacaatgcaaaatacacattaagtaaaagaattccagctggtaaacatgacctggacatttgtaagaatatatttaatatatgtacacccattatgttttcaggtaacaggaggaaaaatgcagcacaattttttttctcttgaaaggcactgtcatttaaacataaacctggagtactcgaaatagaattcaggtttacaagatgaaagcgtgtggagaagtgtcagatggcagtggaagcatgtgtgtttctaaaaagtaaaaatctcaagaaaacagaaatggcatgctttacccatcttacttagtgaaagagagctgcagttgaaattgtttaaaaagtagcaggtacaatgaatattgtcacagatgtgttaatttttgaagcaatgtgggtgctgactactagtagtatcaaaaatatgttcaggattgttttgatacctgtatttataataaaaaatgttggggggagttgatgaattcctgttaaaagctgttcttgtgtgttacatgtaacagacatggtaaatatttgtttacagtctttgtttaacaaaccatgcatttaagtttaagtgaagtcaacaaaaaggaaataggtgtatggatatgtgattttgagattaaagttagtcttaaaatgtaaataaaatgtgaaacgtgtcctcagagactgtgccatttc

SEQ ID NO: 7476 - protein, 105 aa, Homo sapiens; identical to SEQ ID NO: 7456

SEQ ID NO: 7477 - DNA, 1582 bp, Homo sapiens
agagacgggggtttcaccatgttatccaggatggtctcaatctcctgacctcatgatccacccgccttggcctcccaaagtgctgggattgcaggtgagttaaagttcctcgtaattttcgcttgttggaagaacttgaagaaggacaaaaaggagtaggcgacggtacagttagctggggccttgaagatgatgaagatatgacacttacaaggtggacaggcatgattattgggccaccaaggacaaattatgaaaacagaatatatagcctgaaagtagaatgtggacctaaatacccagaagctcctccgtcagttagatttgtaacaaaaattaatatgaacggaataaataattccagtgggatggtggatgcccggagcataccagtgttagcaaaatggcaaaattcatatagcattaaagttgtacttcaagagctaagacgtctaatgatgtccaaagaaaatatgaagcttccacagccaccagaaggacaaacatacaacaattaattttagtggatctcaaacttgtcttaaatcaacaaccttctactcatgttaatgtcttgattaaatatcacaatgcaaaatacacattaagtaaaagaattccagctggtaaacatgacctggacatttgtaagaatatatttaatatatgtacacccattatgttttcaggtaacaggaggaaaaatgcagcacaattttttttctcttgaaaggcactgtcatttaaacataaacctggagtactcgaaatagaattcaggtttacaagatgaaagcgtgtggagaagtgtcagatggcagtggaagcatgtgtgtttctaaaaagtaaaaatctcaagaaaacagaaatggcatgctttacccatcttacttagtgaaagagagctgcagttgaaattgtttaaaaagtagcaggtacaatgaatattgtcacagatgtgttaatttttgaagcaatgtgggtgctgactactagtagtatcaaaaatatgttcaggattgttttgatacctgtatttataataaaaaatgttggggggagttgatgaattcctgttaaaagctgttcttgtgtgttacatgtaacagacatggtaaatatttgtttacagtctttgtttaacaaaccatgcatttaagtttaagtgaagtcaacaaaaaggaaataggtgtatggatatgtgattttgagattaaagttagtcttaaaatgtaaataaaatgtgaaacgtgtcctcagagactgtgccatttctattatgttgatgtatatgtacagtaccttgccagggaagcaaaaattggaattattgtagcttttcatgtatacacacttttatttaccctattttgtgtacttcttgtgaattataatttgcagactatttcagaaaagaaattatctagtttaatttcttctttggacaaggagtcctaggtattatattttgagtttgatttcaccagaaataataatattaaaaagatctttgcattctggcagttcttttaggattataggttgcaaattatccaaatatatatcccattttttaaagcat

SEQ ID NO: 7478 - protein, 105 aa, Homo sapiens; identical to SEQ ID NO: 7456

SEQ ID NO: 7479 - DNA, 4396 bp, Homo sapiens
agagacgggggtttcaccatgttatccaggatggtctcaatctcctgacctcatgatccacccgccttggcctcccaaagtgctgggattgcaggtgagttaaagttcctcgtaattttcgcttgttggaagaacttgaagaaggacaaaaaggagtaggcgacggtacagttagctggggccttgaagatgatgaagatatgacacttacaaggtggacaggcatgattattgggccaccaaggacaaattatgaaaacagaatatatagcctgaaagtagaatgtggacctaaatacccagaagctcctccgtcagttagatttgtaacaaaaattaatatgaacggaataaataattccagtgggatggtggatgcccggagcataccagtgttagcaaaatggcaaaattcatatagcattaaagttgtacttcaagagctaagacgtctaatgatgtccaaagaaaatatgaagcttccacagccaccagaaggacaaacatacaacaattaattttagtggatctcaaacttgtcttaaatcaacaaccttctactcatgttaatgtcttgattaaatatcacaatgcaaaatacacattaagtaaaagaattccagctggtaaacatgacctggacatttgtaagaatatatttaatatatgtacacccattatgttttcaggtaacaggaggaaaaatgcagcacaattttttttctcttgaaaggcactgtcatttaaacataaacctggagtactcgaaatagaattcaggtttacaagatgaaagcgtgtggagaagtgtcagatggcagtggaagcatgtgtgtttctaaaaagtaaaaatctcaagaaaacagaaatggcatgctttacccatcttacttagtgaaagagagctgcagttgaaattgtttaaaaagtagcaggtacaatgaatattgtcacagatgtgttaatttttgaagcaatgtgggtgctgactactagtagtatcaaaaatatgttcaggattgttttgatacctgtatttataataaaaaatgttggggggagttgatgaattcctgttaaaagctgttcttgtgtgttacatgtaacagacatggtaaatatttgtttacagtctttgtttaacaaaccatgcatttaagtttaagtgaagtcaacaaaaaggaaataggtgtatggatatgtgattttgagattaaagttagtcttaaaatgtaaataaaatgtgaaacgtgtcctcagagactgtgccatttctattatgttgatgtatatgtacagtaccttgccagggaagcaaaaattggaattattgtagcttttcatgtatacacacttttatttaccctattttgtgtacttcttgtgaattataatttgcagactatttcagaaaagaaattatctagtttaatttcttctttggacaaggagtcctaggtattatattttgagtttgatttcaccagaaataataatattaaaaagatctttgcattctggcagttcttttaggattataggttgcaaattatccaaatatatatcccattttttaaagcataatatcttttttagttgtttttctgtgaagcttttggttaataaatagggtcaactaattggagacttttctcttccaattagggcttttaatactaacaaggataactttattcattcctcgtattctctactctaacaaatatgaactctgaagttgaaaagtcatttatgttccgctttcaccaaagtgacgtgaggctttaggtcactgtttcacttcaaagtactggatccaaagctttgttgaaaatgctgtttgatgaattcactgaagaatatagaaaggtggtcaggtaaagtctacttttattttgtcaagcttaataatttgtgtcatactttaccccagtatatataggcaaaccaaaaccttatcaaatattaaattagttgtttaaactttgcttataaagtattggccatgtggtggctcatgccgctaatcccagcactttgggaggctgagacgggcagatcacttgaggtcaggagcttgagaccagcctggccaacatgatgaaaccctgtctctactaaaaatacaaaaaattagccaggtgtggtggtgggtacttgtagtcccagctactcgggaggctgggcaggagaactacttgaaactggcagacagaggttgcagtgccgagagcgcaccactgctccagcctgggcaacagagcaagactccatctcaaaaaaaaaaaaaaaaagaaaaatattaataattgaccttggctgtatattaaaatagttacttttatagtagagcacatttctcaaacatgccctgaaaggcttttatcaagctcatataaagttaaagctttgagctaccttttcttggccaataaagtcactgacagtttatgtaaacattaatttcaacatggctgttgcattttaattatcaaaaatgtttaaaatgctttaagatgacacatagagaacatacacatacatacaaattagtgcatttgtaatttgttaaatttgaaatgaactattaccttgaaatatagtctttaaaaatttttaatggttaaagattaaattgaatgaaactgtagtctaatggtaactgatgatctgaatccgtctctctgataacctcctttccattttgaaaatgtgtcttattatacatggaagctagtaactacgtgaatgctgttggcaggatgagggtctgggtacctcagtctcttgtcctgtttccttcccccaaatccaccattgtgaagttgccaaccccctgccgccttcccctgccaagtacatgttgtcagagtcagccctataatgttcatttcccctcttgtttgtgggattatggatctctgcagaaatctgcatgccaattaacccatttctaaagcagaatccattttgcatgtcacaatcaagatgtacttggcaatctaagacacactgggagactgtaagaggaattaatatagaaaagctcttaattataataacatttggaagaaatttttcctttgttttgtaaagtggctaaggttgtaggagtgtgtggtatttattaccttttaaatgaactgtaaatttgccttagaaatttgtttaaaaggctagcaagtgagacccttgaggatgatcatatactaataaagattaccaaaagaaacttcttgtcctgttaggtcagtgttatgatttaatggttttaattacttaaccaattttaagaattgacaatttttaaaaatatttttttctaccattctaaagtaatgtcttttgttgtgggtttatgtgtaactacaggattttggaacataaacattttgaaggatagtcaatggtatttagtcttggatataaaaatagagaaaatttatagctttatgttattaaaataatttatcacacagagtgatttgaggttttcgcagagtagatttgtttgactcatggtttattagtctggattacttaagaacaatatgttgattttaatgttaattcccactaaatatataatattgataaatacatgtgaaattaatattgtttggaaaatgtagaggacacagctgggaattatgaatgcttttttcttaataggtttggtgtgtgtggctttgaatggttctgctgatgcatcatggaaagacagcagggaactgtagcctgccatcaaaactgtatcaactcttttaatgagcatgtgactgtattaggtacattttgaagaatataagtactgatgataaagtctagtatgcataataggattttggaggcatttcaggaattttccttttatagtatgctttttaggcatctgtatgtgtaatatcatagtatcatttattgctgggatggatcgaaaagcactgcttttacttttctgataagtatcaaaatgattttccagtaccaacttgactggcttttaattattgtcacacacacacaaaattcaactcctcaaggtttgggaaaattgtgtatttttttgtatacaagataaaagtgtcataaaaaggaatggatgaattgttgataggaacattagcagttaatttttacctgatactgagtttactgtaaaataggaaatgcataggaaggaatacctcctaaataatatgccttatagaatgatgaaatcttaccatagttcatactgaaaatgttgtttatttaaaagtattgtggagtgttgaaaataaagatacacaataagtattttctgaagagaaaattaatgaaggtatttaatgatataggaaataagtgacaagttaaagtccattttgtttcaataaaggagttgtgcaaactc

SEQ ID NO: 7480 - protein, 105 aa, Homo sapiens; identical to SEQ ID NO: 7456

SEQ ID NO: 7481 - DNA, 2465 bp, Homo sapiens
ctgaataaactcttaaaaagcagacacactttacttgtgtaaacactcttcttttttttttttttaaatggaatttctctcttgttgcccaggctggtgtgcaatggtgtgatcttggctcaccgcaacctccacctcccgggttcaagcgattctcctgcctcagcctcccgagtagctgggattccaggcatgtgccaccatgcccggctaatttcgtatttctaatagagatggggttcctccatgttggtcaggctggtcacgaactcccaatctcaggtgatctgcctgcctcggcctcccaaagtgctgggattacaggcccagccgtatccactcttttaaatttaggcatccatgtcactggaattatgtttttcacaggatcacttttaaattcattaagaagtttctttatgtatataagcctattcattttacttgaaaggttttctgtcttcccaaagtcaaatccttactaactaaaattaggaattttgaaaaaccatccatgaaaatctcacaaacacattaaaaaatgtattatctaaggtgcataaaattaaactccatattaccaatagcatttaagaaactcatataaaatgataatgttttctttaaagagacatactgaaagccaagtcagttgttcacaggaggtggttttgcaccattatttgaactttgatgtgtgaatttgctttagaagtccatggtctgtttactctctgacagattctgttttcacatgcccctcacatgaaggttcactcctcattcttttttttttttttttgagacaggttgggtgggactgcttcaggattctaaaagacagtaccttctggtgcactttctaagatggaacataattctactctttgaaaatcattagagagtatatattaatgaactttggcttctatgaactttctgggcatgcctgtttgattggtgcagagtccttggctgtaacagaaacatcaaatagggaaaacgatttccttatggttgattgacttacatcagtataaaattgatgaggaatttatatacacgttgtatactgctgttaatgtttggtacagtgctttctttagtgttttcattttgaggggttattagattcagcattttctggagcagaatgctttttaaaggggatttggtctttttgggaaataatttataaaggttaatttggaaaaagctgaatttaaatacgtgtagctcttataattatgagctttttacatttacactgacgttcttttgtataggagttaaagttcctcgtaattttcgcttgttggaagaacttgaagaaggacaaaaaggagtaggcgacggtacagttagctggggccttgaagatgatgaagatatgacacttacaaggtggacaggcatgattattgggccaccaaggacaaattatgaaaacagaatatatagcctgaaagtagaatgtggacctaaatacccagaagctcctccgtcagttagatttgtaacaaaaattaatatgaacggaataaataattccagtgggatggtggatgcccggagcataccagtgttagcaaaatggcaaaattcatatagcattaaagttgtacttcaagagctaagacgtctaatgatgtccaaagaaaatatgaagcttccacagccaccagaaggacaaacatacaacaattaattttagtggatctcaaacttgtcttaaatcaacaaccttctactcatgttaatgtcttgattaaatatcacaatgcaaaatacacattaagtaaaagaattccagctggtaaacatgacctggacatttgtaagaatatatttaatatatgtacacccattatgttttcaggtaacaggaggaaaaatgcagcacaattttttttctcttgaaaggcactgtcatttaaacataaacctggagtactcgaaatagaattcaggtttacaagatgaaagcgtgtggagaagtgtcagatggcagtggaagcatgtgtgtttctaaaaagtaaaaatctcaagaaaacagaaatggcatgctttacccatcttacttagtgaaagagagctgcagttgaaattgtttaaaaagtagcaggtacaatgaatattgtcacagatgtgttaatttttgaagcaatgtgggtgctgactactagtagtatcaaaaatatgttcaggattgttttgatacctgtatttataataaaaaatgttggggggagttgatgaattcctgttaaaagctgttcttgtgtgttacatgtaacagacatggtaaatatttgtttacagtctttgtttaacaaaccatgcatttaagtttaagtgaagtcaacaaaaaggaaataggtgtatggatatgtgattttgagattaaagttagtcttaaaatgtaaataaaatgtgaaacgtgtcctcagagactgtgccatttc

SEQ ID NO: 7482 - protein, 105 aa, Homo sapiens; identical to SEQ ID NO: 7456

SEQ ID NO: 7483 - DNA, 2772 bp, Homo sapiens
ctgaataaactcttaaaaagcagacacactttacttgtgtaaacactcttcttttttttttttttaaatggaatttctctcttgttgcccaggctggtgtgcaatggtgtgatcttggctcaccgcaacctccacctcccgggttcaagcgattctcctgcctcagcctcccgagtagctgggattccaggcatgtgccaccatgcccggctaatttcgtatttctaatagagatggggttcctccatgttggtcaggctggtcacgaactcccaatctcaggtgatctgcctgcctcggcctcccaaagtgctgggattacaggcccagccgtatccactcttttaaatttaggcatccatgtcactggaattatgtttttcacaggatcacttttaaattcattaagaagtttctttatgtatataagcctattcattttacttgaaaggttttctgtcttcccaaagtcaaatccttactaactaaaattaggaattttgaaaaaccatccatgaaaatctcacaaacacattaaaaaatgtattatctaaggtgcataaaattaaactccatattaccaatagcatttaagaaactcatataaaatgataatgttttctttaaagagacatactgaaagccaagtcagttgttcacaggaggtggttttgcaccattatttgaactttgatgtgtgaatttgctttagaagtccatggtctgtttactctctgacagattctgttttcacatgcccctcacatgaaggttcactcctcattcttttttttttttttttgagacaggttgggtgggactgcttcaggattctaaaagacagtaccttctggtgcactttctaagatggaacataattctactctttgaaaatcattagagagtatatattaatgaactttggcttctatgaactttctgggcatgcctgtttgattggtgcagagtccttggctgtaacagaaacatcaaatagggaaaacgatttccttatggttgattgacttacatcagtataaaattgatgaggaatttatatacacgttgtatactgctgttaatgtttggtacagtgctttctttagtgttttcattttgaggggttattagattcagcattttctggagcagaatgctttttaaaggggatttggtctttttgggaaataatttataaaggttaatttggaaaaagctgaatttaaatacgtgtagctcttataattatgagctttttacatttacactgacgttcttttgtataggagttaaagttcctcgtaattttcgcttgttggaagaacttgaagaaggacaaaaaggagtaggcgacggtacagttagctggggccttgaagatgatgaagatatgacacttacaaggtggacaggcatgattattgggccaccaaggacaaattatgaaaacagaatatatagcctgaaagtagaatgtggacctaaatacccagaagctcctccgtcagttagatttgtaacaaaaattaatatgaacggaataaataattccagtgggatggtggatgcccggagcataccagtgttagcaaaatggcaaaattcatatagcattaaagttgtacttcaagagctaagacgtctaatgatgtccaaagaaaatatgaagcttccacagccaccagaaggacaaacatacaacaattaattttagtggatctcaaacttgtcttaaatcaacaaccttctactcatgttaatgtcttgattaaatatcacaatgcaaaatacacattaagtaaaagaattccagctggtaaacatgacctggacatttgtaagaatatatttaatatatgtacacccattatgttttcaggtaacaggaggaaaaatgcagcacaattttttttctcttgaaaggcactgtcatttaaacataaacctggagtactcgaaatagaattcaggtttacaagatgaaagcgtgtggagaagtgtcagatggcagtggaagcatgtgtgtttctaaaaagtaaaaatctcaagaaaacagaaatggcatgctttacccatcttacttagtgaaagagagctgcagttgaaattgtttaaaaagtagcaggtacaatgaatattgtcacagatgtgttaatttttgaagcaatgtgggtgctgactactagtagtatcaaaaatatgttcaggattgttttgatacctgtatttataataaaaaatgttggggggagttgatgaattcctgttaaaagctgttcttgtgtgttacatgtaacagacatggtaaatatttgtttacagtctttgtttaacaaaccatgcatttaagtttaagtgaagtcaacaaaaaggaaataggtgtatggatatgtgattttgagattaaagttagtcttaaaatgtaaataaaatgtgaaacgtgtcctcagagactgtgccatttctattatgttgatgtatatgtacagtaccttgccagggaagcaaaaattggaattattgtagcttttcatgtatacacacttttatttaccctattttgtgtacttcttgtgaattataatttgcagactatttcagaaaagaaattatctagtttaatttcttctttggacaaggagtcctaggtattatattttgagtttgatttcaccagaaataataatattaaaaagatctttgcattctggcagttcttttaggattataggttgcaaattatccaaatatatatcccattttttaaagcat

SEQ ID NO: 7484 - protein, 105 aa, Homo sapiens; identical to SEQ ID NO: 7456

SEQ ID NO: 7485 - DNA, 5586 bp, Homo sapiens
ctgaataaactcttaaaaagcagacacactttacttgtgtaaacactcttcttttttttttttttaaatggaatttctctcttgttgcccaggctggtgtgcaatggtgtgatcttggctcaccgcaacctccacctcccgggttcaagcgattctcctgcctcagcctcccgagtagctgggattccaggcatgtgccaccatgcccggctaatttcgtatttctaatagagatggggttcctccatgttggtcaggctggtcacgaactcccaatctcaggtgatctgcctgcctcggcctcccaaagtgctgggattacaggcccagccgtatccactcttttaaatttaggcatccatgtcactggaattatgtttttcacaggatcacttttaaattcattaagaagtttctttatgtatataagcctattcattttacttgaaaggttttctgtcttcccaaagtcaaatccttactaactaaaattaggaattttgaaaaaccatccatgaaaatctcacaaacacattaaaaaatgtattatctaaggtgcataaaattaaactccatattaccaatagcatttaagaaactcatataaaatgataatgttttctttaaagagacatactgaaagccaagtcagttgttcacaggaggtggttttgcaccattatttgaactttgatgtgtgaatttgctttagaagtccatggtctgtttactctctgacagattctgttttcacatgcccctcacatgaaggttcactcctcattcttttttttttttttttgagacaggttgggtgggactgcttcaggattctaaaagacagtaccttctggtgcactttctaagatggaacataattctactctttgaaaatcattagagagtatatattaatgaactttggcttctatgaactttctgggcatgcctgtttgattggtgcagagtccttggctgtaacagaaacatcaaatagggaaaacgatttccttatggttgattgacttacatcagtataaaattgatgaggaatttatatacacgttgtatactgctgttaatgtttggtacagtgctttctttagtgttttcattttgaggggttattagattcagcattttctggagcagaatgctttttaaaggggatttggtctttttgggaaataatttataaaggttaatttggaaaaagctgaatttaaatacgtgtagctcttataattatgagctttttacatttacactgacgttcttttgtataggagttaaagttcctcgtaattttcgcttgttggaagaacttgaagaaggacaaaaaggagtaggcgacggtacagttagctggggccttgaagatgatgaagatatgacacttacaaggtggacaggcatgattattgggccaccaaggacaaattatgaaaacagaatatatagcctgaaagtagaatgtggacctaaatacccagaagctcctccgtcagttagatttgtaacaaaaattaatatgaacggaataaataattccagtgggatggtggatgcccggagcataccagtgttagcaaaatggcaaaattcatatagcattaaagttgtacttcaagagctaagacgtctaatgatgtccaaagaaaatatgaagcttccacagccaccagaaggacaaacatacaacaattaattttagtggatctcaaacttgtcttaaatcaacaaccttctactcatgttaatgtcttgattaaatatcacaatgcaaaatacacattaagtaaaagaattccagctggtaaacatgacctggacatttgtaagaatatatttaatatatgtacacccattatgttttcaggtaacaggaggaaaaatgcagcacaattttttttctcttgaaaggcactgtcatttaaacataaacctggagtactcgaaatagaattcaggtttacaagatgaaagcgtgtggagaagtgtcagatggcagtggaagcatgtgtgtttctaaaaagtaaaaatctcaagaaaacagaaatggcatgctttacccatcttacttagtgaaagagagctgcagttgaaattgtttaaaaagtagcaggtacaatgaatattgtcacagatgtgttaatttttgaagcaatgtgggtgctgactactagtagtatcaaaaatatgttcaggattgttttgatacctgtatttataataaaaaatgttggggggagttgatgaattcctgttaaaagctgttcttgtgtgttacatgtaacagacatggtaaatatttgtttacagtctttgtttaacaaaccatgcatttaagtttaagtgaagtcaacaaaaaggaaataggtgtatggatatgtgattttgagattaaagttagtcttaaaatgtaaataaaatgtgaaacgtgtcctcagagactgtgccatttctattatgttgatgtatatgtacagtaccttgccagggaagcaaaaattggaattattgtagcttttcatgtatacacacttttatttaccctattttgtgtacttcttgtgaattataatttgcagactatttcagaaaagaaattatctagtttaatttcttctttggacaaggagtcctaggtattatattttgagtttgatttcaccagaaataataatattaaaaagatctttgcattctggcagttcttttaggattataggttgcaaattatccaaatatatatcccattttttaaagcataatatcttttttagttgtttttctgtgaagcttttggttaataaatagggtcaactaattggagacttttctcttccaattagggcttttaatactaacaaggataactttattcattcctcgtattctctactctaacaaatatgaactctgaagttgaaaagtcatttatgttccgctttcaccaaagtgacgtgaggctttaggtcactgtttcacttcaaagtactggatccaaagctttgttgaaaatgctgtttgatgaattcactgaagaatatagaaaggtggtcaggtaaagtctacttttattttgtcaagcttaataatttgtgtcatactttaccccagtatatataggcaaaccaaaaccttatcaaatattaaattagttgtttaaactttgcttataaagtattggccatgtggtggctcatgccgctaatcccagcactttgggaggctgagacgggcagatcacttgaggtcaggagcttgagaccagcctggccaacatgatgaaaccctgtctctactaaaaatacaaaaaattagccaggtgtggtggtgggtacttgtagtcccagctactcgggaggctgggcaggagaactacttgaaactggcagacagaggttgcagtgccgagagcgcaccactgctccagcctgggcaacagagcaagactccatctcaaaaaaaaaaaaaaaaagaaaaatattaataattgaccttggctgtatattaaaatagttacttttatagtagagcacatttctcaaacatgccctgaaaggcttttatcaagctcatataaagttaaagctttgagctaccttttcttggccaataaagtcactgacagtttatgtaaacattaatttcaacatggctgttgcattttaattatcaaaaatgtttaaaatgctttaagatgacacatagagaacatacacatacatacaaattagtgcatttgtaatttgttaaatttgaaatgaactattaccttgaaatatagtctttaaaaatttttaatggttaaagattaaattgaatgaaactgtagtctaatggtaactgatgatctgaatccgtctctctgataacctcctttccattttgaaaatgtgtcttattatacatggaagctagtaactacgtgaatgctgttggcaggatgagggtctgggtacctcagtctcttgtcctgtttccttcccccaaatccaccattgtgaagttgccaaccccctgccgccttcccctgccaagtacatgttgtcagagtcagccctataatgttcatttcccctcttgtttgtgggattatggatctctgcagaaatctgcatgccaattaacccatttctaaagcagaatccattttgcatgtcacaatcaagatgtacttggcaatctaagacacactgggagactgtaagaggaattaatatagaaaagctcttaattataataacatttggaagaaatttttcctttgttttgtaaagtggctaaggttgtaggagtgtgtggtatttattaccttttaaatgaactgtaaatttgccttagaaatttgtttaaaaggctagcaagtgagacccttgaggatgatcatatactaataaagattaccaaaagaaacttcttgtcctgttaggtcagtgttatgatttaatggttttaattacttaaccaattttaagaattgacaatttttaaaaatatttttttctaccattctaaagtaatgtcttttgttgtgggtttatgtgtaactacaggattttggaacataaacattttgaaggatagtcaatggtatttagtcttggatataaaaatagagaaaatttatagctttatgttattaaaataatttatcacacagagtgatttgaggttttcgcagagtagatttgtttgactcatggtttattagtctggattacttaagaacaatatgttgattttaatgttaattcccactaaatatataatattgataaatacatgtgaaattaatattgtttggaaaatgtagaggacacagctgggaattatgaatgcttttttcttaataggtttggtgtgtgtggctttgaatggttctgctgatgcatcatggaaagacagcagggaactgtagcctgccatcaaaactgtatcaactcttttaatgagcatgtgactgtattaggtacattttgaagaatataagtactgatgataaagtctagtatgcataataggattttggaggcatttcaggaattttccttttatagtatgctttttaggcatctgtatgtgtaatatcatagtatcatttattgctgggatggatcgaaaagcactgcttttacttttctgataagtatcaaaatgattttccagtaccaacttgactggcttttaattattgtcacacacacacaaaattcaactcctcaaggtttgggaaaattgtgtatttttttgtatacaagataaaagtgtcataaaaaggaatggatgaattgttgataggaacattagcagttaatttttacctgatactgagtttactgtaaaataggaaatgcataggaaggaatacctcctaaataatatgccttatagaatgatgaaatcttaccatagttcatactgaaaatgttgtttatttaaaagtattgtggagtgttgaaaataaagatacacaataagtattttctgaagagaaaattaatgaaggtatttaatgatataggaaataagtgacaagttaaagtccattttgtttcaataaaggagttgtgcaaactc

SEQ ID NO: 7486 - protein, 105 aa, Homo sapiens; identical to SEQ ID NO: 7456

SEQ ID NO: 7487 - DNA, 389 bp, Homo sapiens
ggtagacagtgctgctcccagaccccagctgagaggagatggaactgcgtcactggctgcttcaccatccacagcctggactgagctgggtgggcctgctactggaagtacaggtgggcatggctcttcccacatccctggcttggcagatggtgccagttgcaggatcaagctctgcccaccattgagcagcccaggcatcatggagcctcagtactcttccttcgggccacatggcgcactccttggctagaccattcgtcaaccgcacccgaggttttctaaagttcctagattgagaccagaccttctcaaggatcttccaatcttatctgcccccatttcaggggctctcttgcataaatcaagtaataaataatgtgcaacca

SEQ ID NO: 7488 - protein, 49 aa, Homo sapiens
MELRHWLLHHPQPGLSWVGLLLEVQVGMALPTSLAWQMVPVAGSSSAHH

SEQ ID NO: 7489 - DNA, 5423 bp, Homo sapiens
ggagtcacaggttcgtacacgcgaggccgggcgcgcgcagccggcaggcgggtgaagtcttcccaggtgctgcaggcggtgctgaggcacagggtctgctgcaggagcagcggcccgaacccgctccagcggcccgccgccgccagcggttcccgcgtcgcgtgtgtacccccgcgcactgaaggaggtccgccagccctcaccagcccccgcggaccgtgcaatggcccagcgtaagaatgccaagagcagcggcaacagcagcagcagcggctccggcagcggtagcacgagtgcgggcagcagcagccccggggcccggagagagacaaagcatggaggacacaagaatgggaggaaaggcggactctcaggaacttcattcttcacgtggtttatggtgattgcattgctgggcgtctggacatctgtagctgtcgtttggtttgatcttgttgactatgaggaagttctaggaaaactaggaatctatgatgctgatggtgatggagattttgatgtggatgatgccaaagttttattaggacttaaagagagatctacttcagagccagcagtcccgccagaagaggctgagccacacactgagcccgaggagcaggttcctgtggaggcagaaccccagaatatcgaagatgaagcaaaagaacaaattcagtcccttctccatgaaatggtacacgcagaacatgttgagggagaagacttgcaacaagaagatggacccacaggagaaccacaacaagaggatgatgagtttcttatggcgactgatgtagatgatagatttgagaccctggaacctgaagtatctcatgaagaaaccgagcatagttaccacgtggaagagacagtttcacaagactgtaatcaggatatggaagagatgatgtctgagcaggaaaatccagattccagtgaaccagtagtagaagatgaaagattgcaccatgatacagatgatgtaacataccaagtctatgaggaacaagcagtatatgaacctctagaaaatgaagggatagaaatcacagaagtaactgctccccctgaggataatcctgtagaagattcacaggtaattgtagaagaagtaagcatttttcctgtggaagaacagcaggaagtaccaccagaaacaaatagaaaaacagatgatccagaacaaaaagcaaaagttaagaaaaagaagcctaaacttttaaataaatttgataagactattaaagctgaacttgatgctgcagaaaaactccgtaaaaggggaaaaattgaggaagcagtgaatgcatttaaagaactagtacgcaaataccctcagagtccacgagcaagatatgggaaggcgcagtgtgaggatgatttggctgagaagaggagaagtaatgaggtgctacgtggagccatcgagacctaccaagaggtggccagcctacctgatgtccctgcagacctgctgaagctgagtttgaagcgtcgctcagacaggcaacaatttctaggtcatatgagaggttccctgcttaccctgcagagattagttcaactatttcccaatgatacttccttaaaaaatgaccttggcgtgggatacctcttgataggagataatgacaatgcaaagaaagtttatgaagaggtgctgagtgtgacacctaatgatggctttgctaaagtccattatggcttcatcctgaaggcacagaacaaaattgctgagagcatcccatatttaaaggaaggaatagaatccggagatcctggcactgatgatgggagattttatttccacctgggggatgccatgcagagggttgggaacaaagaggcatataagtggtatgagcttgggcacaagagaggacactttgcatctgtctggcaacgctcactctacaatgtgaatggactgaaagcacagccttggtggaccccaaaagaaacgggctacacagagttagtaaagtctttagaaagaaactggaagttaatccgagatgaaggccttgcagtgatggataaagccaaaggtctcttcctgcctgaggatgaaaacctgagggaaaaaggggactggagccagttcacgctgtggcagcaaggaagaagaaatgaaaatgcctgcaaaggagctcctaaaacctgtaccttactagaaaagttccccgagacaacaggatgcagaagaggacagatcaaatattccatcatgcaccccgggactcacgtgtggccgcacacagggcccacaaactgcaggctccgaatgcacctgggcttggtgattcccaaggaaggctgcaagattcgatgtgccaacgagaccaagacctgggaggaaggcaaggtgctcatctttgatgactcctttgagcacgaggtatggcaggatgcctcatctttccggctgatattcatcgtggatgtgtggcatccggaactgacaccacagcagagacgcagccttccagcaatttagcatgaattcatgcaagcttgggaaactctggagagaggctgcctttctggttccatctccttgggtgtgaggatagaatttcgaacaccaagagtcaattcccttgacttgcagcccgagtaattcaaagcctcctcctagggtcagaagacactaaagggaatatttgcctcgctgcaattcatttaggaaacaccctgctgtgtgtcatctcatgacagcactggtcttctgccagtatttaaggtgaacatttgatagcttctaccttaccagccaaagatattttttccacatagaataggtctaattcaatgtataatgagaacatatgtagaaactgtgaatggattgctttagtttgtaatttttctatgcagttatatttttctagtgtagctagactattttgtcatcatgtaccactacatttttgtttattttaatgacaagctgtataaatgctttacttctagctatttaatggtagcattactggggaactcagacttccctcttttaattcttcttagtaaaagatactcatgaaaaaagcagttttattttcctaacaaaaaagaaagagctcattatgtcagtgtctatgaactgtacccatcccaactctcaaatcgtttggttttttttatcttgattgagatcctcttctcactatgctagtggtggagatattgacaaaatcctatttctttcaaagaggaacttttcacaccgaaaaaagagcatggaattattttatattgttataaaaatcccagatgcaaatttttttaatgccaattattagagcttctggggaaaaagtatagttcacggaaataaaactatgttctttcagggttgggtggataggtggctgctagggtgtctggctcctggcggctttgccatccatgaggcaagggctgggaacacagtgtctttgcctatggtagatccatgtgaatgtcaggaagccagctcttcagtcttggagatgatttctgctacaattctgtagaaagattaaggatggcagagtaaaaggttaccaagaatgccaggatgtttttcttgggcgtaggaggtccagattactttcctttttgatgaaagagtttggaagactgtcccatctctctggcttgagaaatctctgccattttaaacatcactgtgaaatagcaattattatcatctgtatttagttttaacattacccacaacatagaaataataggtaaaaatcgtcttgcctactcattccaaagatgatcaagtcattaatctagcaaagtattcatgtatcagattttgtatattttgaatcaaagctaactaggaatgttagatataagaatgtaatgatattcatgcactgaattctaagccaatatgaacaaaaatgctgcatgaatggcacatataggtcaccaaagttcattcacaggtagaaaaaacttgtgctttcttttccatctaaaaacaaaaggagactttctttatctcatttaaagaacagctctttgaaattgaaattgaccctttttgcttgaccttaaggagattagcttccagtagatgagtttgcaaaatacttttcctgttcttttgttttgctggtattgaaaacatcccactaaatcagatgaagaggcatgggaggaaaaatatccaaattaattactaaaatcgagaagagaaggcaaactcttgaaaagtaaaaaggtgtttgtgaccttcagtatttattgaacagaggaaataactgacaagggcaatacaattcaatgttcatgtagtaacattcatgtcacttgttgaatttggttctcatatgtatattgcatacacataaattcaaactataagtcgtcatttttgagccatcatcttacattcatgtaatgaaattatggaagagagtaaaaactagctcttaacttagtaaatataatatggtatttaaaatcaggtcactacagtaaggttctaagtattgccaattgaaaagctagaaatggtattactgttgcaaagtgttgtcaataattgactccaatagcattgtaaatacttgtatcccacaactattttaaacccaagcaataaaatggattttctaattcacttcaattctttatttctcttacctatctatgtcttggtacataagaaaagtgtttccatcactgcattggtagaattatttcagtgttattatttttgtgatttcgtatgtctacacaaaaatgaattagtttaatttatattgtgatacagttgtttgagaaatatttttaattctgtttcaactttatttctccaagtgtataatataaaaattacttctgttattgttctctaccaataggggaaaaaattaaaacattagatccattgagaaagagatgatgtaataaataattaagattagtaataatattatcaggggtgattatgaccagttgaataatctctttcccttgaattatttagctaacaaattaactctcccaaatatttaaaataatgtaaaatcatattttactgcccattattaactaaaatatttttgtttgactttgagcaccaactggtaatactaataaatacccatgtcatgcagatggctgggcgaataagagatgtctaaaaatatgcactggtcttggaaaacatggcacaagtaaggatatcatatatgatgtctgtttattttatgtctgatttcttttgaatgagtagttggggactccatttctaaggagactaggtaaataaaatgacctttgacatttcatcctgcatttctagtcttctcttacttcagtacttgcatatttagccatccatatgggtcatgctccatgattgaatatttaccctctcagcaacaaccatggtctttctccacatcttt

SEQ ID NO: 7490 - protein, 758 aa, Homo sapiens; identical to SEQ ID NO: 1033

SEQ ID NO: 7491 - DNA, 5302 bp, Homo sapiens
ggagtcacaggttcgtacacgcgaggccgggcgcgcgcagccggcaggcgggtgaagtcttcccaggtgctgcaggcggtgctgaggcacagggtctgctgcaggagcagcggcccgaacccgctccagcggcccgccgccgccagcggttcccgcgtcgcgtgtgtacccccgcgcactgaaggaggtccgccagccctcaccagcccccgcggaccgtgcaatggcccagcgtaagaatgccaagagcagcggcaacagcagcagcagcggctccggcagcggtagcacgagtgcgggcagcagcagccccggggcccggagagagacaaagcatggaggacacaagaatgggaggaaaggcggactctcaggaacttcattcttcacgtggtttatggtgattgcattgctgggcgtctggacatctgtagctgtcgtttggtttgatcttgttgactatgaggaagttctaggaaaactaggaatctatgatgctgatggtgatggagattttgatgtggatgatgccaaagttttattaggacttaaagagagatctacttcagagccagcagtcccgccagaagaggctgagccacacactgagcccgaggagcaggttcctgtggaggcagaaccccagaatatcgaagatgaagcaaaagaacaaattcagtcccttctccatgaaatggtacacgcagaacatgttgagggagaagacttgcaacaagaagatggacccacaggagaaccacaacaagaggatgatgagtttcttatggcgactgatgtagatgatagatttgagaccctggaacctgaagtatctcatgaagaaaccgagcatagttaccacgtggaagagacagtttcacaagactgtaatcaggatatggaagagatgatgtctgagcaggaaaatccagattccagtgaaccagtagtagaagatgaaagattgcaccatgatacagatgatgtaacataccaagtctatgaggaacaagcagtatatgaacctctagaaaatgaagggatagaaatcacagaagtaactgctccccctgaggataatcctgtagaagattcacaggtaattgtagaagaagtaagcatttttcctgtggaagaacagcaggaagtaccaccagaaacaaatagaaaaacagatgatccagaacaaaaagcaaaagttaagaaaaagaagcctaaacttttaaataaatttgataagactattaaagctgaacttgatgctgcagaaaaactccgtaaaaggggaaaaattgaggaagcagtgaatgcatttaaagaactagtacgcaaataccctcagagtccacgagcaagatatgggaaggcgcagtgtgaggatgatttggctgagaagaggagaagtaatgaggtgctacgtggagccatcgagacctaccaagaggtggccagcctacctgatgtccctgcagacctgctgaagctgagtttgaagcgtcgctcagacaggcaacaatttctaggtcatatgagaggttccctgcttaccctgcagagattagttcaactatttcccaatgatacttccttaaaaaatgaccttggcgtgggatacctcttgataggagataatgacaatgcaaagaaagtttatgaagaggtgctgagtgtgacacctaatgatggctttgctaaagtccattatggcttcatcctgaaggcacagaacaaaattgctgagagcatcccatatttaaaggaaggaatagaatccggagatcctggcactgatgatgggagattttatttccacctgggggatgccatgcagagggttgggaacaaagaggcatataagtggtatgagcttgggcacaagagaggacactttgcatctgtctggcaacgctcactctacaatgtgaatggactgaaagcacagccttggtggaccccaaaagaaacgggctacacagagttagtaaagtctttagaaagaaactggaagttaatccgagatgaaggccttgcagtgatggataaagccaaaggtctcttcctgcctgaggatgaaaacctgagggaaaaaggggactggagccagttcacgctgtggcagcaaggaagaagaaatgaaaatgcctgcaaaggagctcctaaaacctgtaccttactagaaaagttccccgagacaacaggatgcagaagaggacagatcaaatattccatcatgcaccccgggactcacgtgtggccgcacacagggcccacaaactgcaggctccgaatgcacctgggcttggtgattcccaaggaaggctgcaagattcgatgtgccaacgagaccaagacctgggaggaaggcaaggtgctcatctttgatgactcctttgagcacgaggtatggcaggatgcctcatctttccggctgatattcatcgtggatgtgtggcatccggaactgacaccacagcagagacgcagccttccagcaatttagcatgaattcatgcaagcttgggaaactctggagagaggctgcctttctggttccatctccttgggtgtgaggatagaatttcgaacaccaagagtcaattcccttgacttgcagcccgagtaattcaaagcctcctcctagggtcagaagacactaaagggaatatttgcctcgctgcaattcatttaggaaacaccctgctgtgtgtcatctcatgacagcactggtcttctgccagtatttaaggtgaacatttgatagcttctaccttaccagccaaagatattttttccacatagaataggtctaattcaatgtataatgagaacatatgtagaaactgtgaatggattgctttagtttgtaatttttctatgcagttatatttttctagtgtagctagactattttgtcatcatgtaccactacatttttgtttattttaatgacaagctgtataaatgctttacttctagctatttaatggtagcattactggggaactcagacttccctcttttaattcttcttagtaaaagatactcatgaaaaaagcagttttattttcctaacaaaaaagaaagagctcattatgtcagtgtctatgaactgtacccatcccaactctcaaatcgtttggttttttttatcttgattgagatcctcttctcactatgctagtggtggagatattgacaaaatcctatttctttcaaagaggaacttttcacaccgaaaaaagagcatggaattattttatattgttataaaaatcccagatgcaaatttttttaatgccaattattagagcttctggggaaaaagtatagttcacggaaataaaactatgttctttcagggttgggtggataggtggctgctagggtgtctggctcctggcggctttgccatccatgaggcaagggctgggaacacagtgtctttgcctatggtagatccatgtgaatgtcaggaagccagctcttcagtcttggagatgatttctgctacaattctgtagaaagattaaggatggcagagtaaaaggttaccaagaatgccaggatgtttttcttgggcgtaggaggtccagattactttcctttttgatgaaagagtttggaagactgtcccatctctctggcttgagaaatctctgccattttaaacatcactgtgaaatagcaattattatcatctgtatttagttttaacattacccacaacatagaaataataggtaaaaatcgtcttgcctactcattccaaagatgatcaagtcattaatctagcaaagtattcatgtatcagattttgtatattttgaatcaaagctaactaggaatgttagatataagaatgtaatgatattcatgcactgaattctaagccaatatgaacaaaaatgctgcatgaatggcacatataggtcaccaaagttcattcacaggtagaaaaaacttgtgctttcttttccatctaaaaacaaaaggagactttctttatctcatttaaagaacagctctttgaaattgaaattgaccctttttgcttgaccttaaggagattagcttccagtagatgagtttgcaaaatacttttcctgttcttttgttttgctggtattgaaaacatcccactaaatcagatgaagaggcatgggaggaaaaatatccaaattaattactaaaatcgagaagagaaggcaaactcttgaaaagtaaaaaggtgtttgtgaccttcagtatttattgaacagaggaaataactgacaagggcaatacaattcaatgttcatgtagtaacattcatgtcacttgttgaatttggttctcatatgtatattgcatacacataaattcaaactataagtcgtcatttttgagccatcatcttacattcatgtaatgaaattatggaagagagtaaaaactagctcttaacttagtaaatataatatggtatttaaaatcaggtcactacagtaaggttctaagtattgccaattgaaaagctagaaatggtattactgttgcaaagtgttgtcaataattgactccaatagcattgtaaatacttgtatcccacaactattttaaacccaagcaataaaatggattttctaattcacttcaattctttatttctcttacctatctatgtcttggtacataagaaaagtgtttccatcactgcattggtagaattatttcagtgttattatttttgtgatttcgtatgtctacacaaaaatgaattagtttaatttatattgtgatacagttgtttgagaaatatttttaattctgtttcaactttatttctccaagtgtataatataaaaattacttctgttattgttctctaccaataggggaaaaaattaaaacattagatccattgagaaagagatgatgtaataaataattaagattagtaataatattatcaggggtgattatgaccagttgaataatctctttcccttgaattatttagctaacaaattaactctcccaaatatttaaaataatgtaaaatcatattttactgcccattattaactaaaatatttttgtttgactttgagcaccaactggtaatactaataaatacccatgtcatgcagatggctgggcgaataagagatgtctaaaaatatgcactggtcttggaaaacatggcacaagtaaggatatcatatatgatgtctgtttattttatgtctgatttcttttgaatgagtagttggggactccatttctaaggagactaggtaaataaaatgacctttgacatttc

SEQ ID NO: 7492 - protein, 758 aa, Homo sapiens; identical to SEQ ID NO: 1033

SEQ ID NO: 7493 - DNA, 4634 bp, Homo sapiens
ggagtcacaggttcgtacacgcgaggccgggcgcgcgcagccggcaggcgggtgaagtcttcccaggtgctgcaggcggtgctgaggcacagggtctgctgcaggagcagcggcccgaacccgctccagcggcccgccgccgccagcggttcccgcgtcgcgtgtgtacccccgcgcactgaaggaggtccgccagccctcaccagcccccgcggaccgtgcaatggcccagcgtaagaatgccaagagcagcggcaacagcagcagcagcggctccggcagcggtagcacgagtgcgggcagcagcagccccggggcccggagagagacaaagcatggaggacacaagaatgggaggaaaggcggactctcaggaacttcattcttcacgtggtttatggtgattgcattgctgggcgtctggacatctgtagctgtcgtttggtttgatcttgttgactatgaggaagttctaggaaaactaggaatctatgatgctgatggtgatggagattttgatgtggatgatgccaaagttttattaggacttaaagagagatctacttcagagccagcagtcccgccagaagaggctgagccacacactgagcccgaggagcaggttcctgtggaggcagaaccccagaatatcgaagatgaagcaaaagaacaaattcagtcccttctccatgaaatggtacacgcagaacatgttgagggagaagacttgcaacaagaagatggacccacaggagaaccacaacaagaggatgatgagtttcttatggcgactgatgtagatgatagatttgagaccctggaacctgaagtatctcatgaagaaaccgagcatagttaccacgtggaagagacagtttcacaagactgtaatcaggatatggaagagatgatgtctgagcaggaaaatccagattccagtgaaccagtagtagaagatgaaagattgcaccatgatacagatgatgtaacataccaagtctatgaggaacaagcagtatatgaacctctagaaaatgaagggatagaaatcacagaagtaactgctccccctgaggataatcctgtagaagattcacaggtaattgtagaagaagtaagcatttttcctgtggaagaacagcaggaagtaccaccagaaacaaatagaaaaacagatgatccagaacaaaaagcaaaagttaagaaaaagaagcctaaacttttaaataaatttgataagactattaaagctgaacttgatgctgcagaaaaactccgtaaaaggggaaaaattgaggaagcagtgaatgcatttaaagaactagtacgcaaataccctcagagtccacgagcaagatatgggaaggcgcagtgtgaggatgatttggctgagaagaggagaagtaatgaggtgctacgtggagccatcgagacctaccaagaggtggccagcctacctgatgtccctgcagacctgctgaagctgagtttgaagcgtcgctcagacaggcaacaatttctaggtcatatgagaggttccctgcttaccctgcagagattagttcaactatttcccaatgatacttccttaaaaaatgaccttggcgtgggatacctcttgataggagataatgacaatgcaaagaaagtttatgaagaggtgctgagtgtgacacctaatgatggctttgctaaagtccattatggcttcatcctgaaggcacagaacaaaattgctgagagcatcccatatttaaaggaaggaatagaatccggagatcctggcactgatgatgggagattttatttccacctgggggatgccatgcagagggttgggaacaaagaggcatataagtggtatgagcttgggcacaagagaggacactttgcatctgtctggcaacgctcactctacaatgtgaatggactgaaagcacagccttggtggaccccaaaagaaacgggctacacagagttagtaaagtctttagaaagaaactggaagttaatccgagatgaaggccttgcagtgatggataaagccaaaggtctcttcctgcctgaggatgaaaacctgagggaaaaaggggactggagccagttcacgctgtggcagcaaggaagaagaaatgaaaatgcctgcaaaggagctcctaaaacctgtaccttactagaaaagttccccgagacaacaggatgcagaagaggacagatcaaatattccatcatgcaccccgggactcacgtgtggccgcacacagggcccacaaactgcaggctccgaatgcacctgggcttggtgattcccaaggaaggctgcaagattcgatgtgccaacgagaccaagacctgggaggaaggcaaggtgctcatctttgatgactcctttgagcacgaggtatggcaggatgcctcatctttccggctgatattcatcgtggatgtgtggcatccggaactgacaccacagcagagacgcagccttccagcaatttagcatgaattcatgcaagcttgggaaactctggagagaggctgcctttctggttccatctccttgggtgtgaggatagaatttcgaacaccaagagtcaattcccttgacttgcagcccgagtaattcaaagcctcctcctagggtcagaagacactaaagggaatatttgcctcgctgcaattcatttaggaaacaccctgctgtgtgtcatctcatgacagcactggtcttctgccagtatttaaggtgaacatttgatagcttctaccttaccagccaaagatattttttccacatagaataggtctaattcaatgtataatgagaacatatgtagaaactgtgaatggattgctttagtttgtaatttttctatgcagttatatttttctagtgtagctagactattttgtcatcatgtaccactacatttttgtttattttaatgacaagctgtataaatgctttacttctagctatttaatggtagcattactggggaactcagacttccctcttttaattcttcttagtaaaagatactcatgaaaaaagcagttttattttcctaacaaaaaagaaagagctcattatgtcagtgtctatgaactgtacccatcccaactctcaaatcgtttggttttttttatcttgattgagatcctcttctcactatgctagtggtggagatattgacaaaatcctatttctttcaaagaggaacttttcacaccgaaaaaagagcatggaattattttatattgttataaaaatcccagatgcaaatttttttaatgccaattattagagcttctggggaaaaagtatagttcacggaaataaaactatgttctttcagggttgggtggataggtggctgctagggtgtctggctcctggcggctttgccatccatgaggcaagggctgggaacacagtgtctttgcctatggtagatccatgtgaatgtcaggaagccagctcttcagtcttggagatgatttctgctacaattctgtagaaagattaaggatggcagagtaaaaggttaccaagaatgccaggatgtttttcttgggcgtaggaggtccagattactttcctttttgatgaaagagtttggaagactgtcccatctctctggcttgagaaatctctgccattttaaacatcactgtgaaatagcaattattatcatctgtatttagttttaacattacccacaacatagaaataataggtaaaaatcgtcttgcctactcattccaaagatgatcaagtcattaatctagcaaagtattcatgtatcagattttgtatattttgaatcaaagctaactaggaatgttagatataagaatgtaatgatattcatgcactgaattctaagccaatatgaacaaaaatgctgcatgaatggcacatataggtcaccaaagttcattcacaggtagaaaaaacttgtgctttcttttccatctaaaaacaaaaggagactttctttatctcatttaaagaacagctctttgaaattgaaattgaccctttttgcttgaccttaaggagattagcttccagtagatgagtttgcaaaatacttttcctgttcttttgttttgctggtattgaaaacatcccactaaatcagatgaagaggcatgggaggaaaaatatccaaattaattactaaaatcgagaagagaaggcaaactcttgaaaagtaaaaaggtgtttgtgaccttcagtatttattgaacagaggaaataactgacaagggcaatacaattcaatgttcatgtagtaacattcatgtcacttgttgaatttggttctcatatgtatattgcatacacataaattcaaactataagtcgtcatttttgagccatcatcttacattcatgtaatgaaattatggaagagagtaaaaactagctcttaacttagtaaatataatatggtatttaaaatcaggtcactacagtaaggttctaagtattgccaattgaaaagctagaaatggtattactgttgcaaagtgttgtcaataattgactccaatagcattgtaaatacttgtatcccacaactattttaaacccaagcaataaaatggattttctaattcacttc

SEQ ID NO: 7494 - protein, 758 aa, Homo sapiens; identical to SEQ ID NO: 1033

SEQ ID NO: 7495 - DNA, 1901 bp, Homo sapiens
gtcagcaacatgtaatggattctgattttattctttattttagaagtaactgctccccctgaggataatcctgtagaagattcacaggtaattgtagaagaagtaagcatttttcctgtggaagaacagcaggaagtaccaccagatacttaaagcttcaaaaagactgcccctaccaccacaggaggaccagcctaaccatacgctccaaaagatggctgtgatagatcttgtgaagcaattactgagcagatcaagatctttgggaaggaacactaaagatgttttgaatgaattatagtccactggcattttagtgtatttttttttctttttagaaacacacatttctaaaaatgtcatgttacattcctgcatgtcccttttgatagcattagtggatccattggatttcttttttctttttgtgagacagcttttagtcttacctgaatttatgtgtgtttttccgacagtggttaataattatattggtgatgtagcagcaattgtgttggcagggttttcatatattattagtaattaacactaactgttggactgacttgtgtacactgtgttaaacatgatttaaaagctattaagagtactttgtgttagcactcttaaaaacgctaacagagatcatcattagctgtgaagatttgagttgtatatacctgcactgatattcttatcaaaaatttctacattagctttaagtgttcagattaacacttttgaaatttttgtagcttttagctgattaattagaaaaatttaatatttcagtgaaagttttaaattatcatttatttatttttttaaatgagaggggaaagctgaaattccttgttaagacacaaggaaaaagaatggccctactattatcatgcaaaaatgctttgttggcacctcagattaatcatataatagctatagtctcttcagcatttgtttaaattttagaaaacctgtataaattactggtgcataacttaaagattattctgcctttggctaattgagtaattcccctccagcactagagaccgctcagtgctcttactagatgaactcagtaacgccttgagctgggttgattgaggatgtgtgaaaagctcacagagcccgatgcctgctgctatttcacggcaatgagcctttttctttctacactgaagattttcttcttatttaatgtggtttattttgggctcagaaataattgctctgttgaaaataatcctttgtcagaaaagaaggtagctaccacatcattttgaaaggaccatgagcaactataagcaaagccataagaagtggtttgatcgatatattaggggtagctcttgattttgttaacattaagataaggtgactttttccccctgcttttaggattaaaatcaaagatacttctatatttttatcactatagatcatagttattatacaatgtagtgagtcctgcatgggtactcgatgtgtaatgaaacctgaaataataagataataagaaaagcaataattttctaaagctgtgctgtcggtgatacagagatgatactcaaattataataaaactcttcattttgtgaattatagaagctactttttataaagccatatttttttagggaaactaaggagtgacatagaactgatgaatgagtaaaagtaagttttgctggatttttgtagaactctggacgttgaggattcattatgctgtggttaactttaaatatttttgaattccaaatatctgaattaatgagccttgtctttacaaatatgtgccattgtgcaacatcggtggattttctaaaaataatgtaaatgtcttctattaaatgttgagtgcaataaaatacagaagaattctctatattgtcatt

SEQ ID NO: 7496 - protein, 61 aa, Homo sapiens [sequence omitted]

SEQ ID NO: 7497 - DNA, 2694 bp, Homo sapiens
agtctcaagctctggtaggcaagtgcatgcagtgtgcctaaaacctgccagcagtacttttgagtttttttttttgttttgttttactttagcatttattattcatggattgaagaaatcaaaatggctgaagataaagagacaaagcatggaggacacaagaatgggaggaaaggcggactctcaggaacttcattcttcacgtggtttatggtgattgcattgctgggcgtctggacatctgtagctgtcgtttggtttgatcttgttgactatgaggaagttctagccaaagcaaaggacttccgttataacttatcagaggtgcttcaaggaaaactaggaatctatgatgctgatggtgatggagattttgatgtggatgatgccaaagttttattaggacttaaagagagatctacttcagagccagcagtcccgccagaagaggctgagccacacactgagcccgaggagcaggttcctgtggaggcagaaccccagaatatcgaagatgaagcaaaagaacaaattcagtcccttctccatgaaatggtacacgcagaacatgttgagggagaagacttgcaacaagaagatggacccacaggagaaccacaacaagaggatgatgagtttcttatggcgactgatgtagatgatagatttgagaccctggaacctgaagtatctcatgaagaaaccgagcatagttaccacgtggaagagacagtttcacaagactgtaatcaggatatggaagagatgatgtctgagcaggaaaatccagattccagtgaaccagtagtagaagatgaaagattgcaccatgatacagatgatgtaacataccaagtctatgaggaacaagcagtatatgaacctctagaaaatgaagggatagaaatcacagaagtaactgctccccctgaggataatcctgtagaagattcacaggtaattgtagaagaagtaagcatttttcctgtggaagaacagcaggaagtaccaccagatacttaaagcttcaaaaagactgcccctaccaccacaggaggaccagcctaaccatacgctccaaaagatggctgtgatagatcttgtgaagcaattactgagcagatcaagatctttgggaaggaacactaaagatgttttgaatgaattatagtccactggcattttagtgtatttttttttctttttagaaacacacatttctaaaaatgtcatgttacattcctgcatgtcccttttgatagcattagtggatccattggatttcttttttctttttgtgagacagcttttagtcttacctgaatttatgtgtgtttttccgacagtggttaataattatattggtgatgtagcagcaattgtgttggcagggttttcatatattattagtaattaacactaactgttggactgacttgtgtacactgtgttaaacatgatttaaaagctattaagagtactttgtgttagcactcttaaaaacgctaacagagatcatcattagctgtgaagatttgagttgtatatacctgcactgatattcttatcaaaaatttctacattagctttaagtgttcagattaacacttttgaaatttttgtagcttttagctgattaattagaaaaatttaatatttcagtgaaagttttaaattatcatttatttatttttttaaatgagaggggaaagctgaaattccttgttaagacacaaggaaaaagaatggccctactattatcatgcaaaaatgctttgttggcacctcagattaatcatataatagctatagtctcttcagcatttgtttaaattttagaaaacctgtataaattactggtgcataacttaaagattattctgcctttggctaattgagtaattcccctccagcactagagaccgctcagtgctcttactagatgaactcagtaacgccttgagctgggttgattgaggatgtgtgaaaattaatgtggtttattttgggctcagaaataattgctctgttgaaaataatcctttgtcagaaaagaaggtagctaccacatcattttgaaaggaccatgagcaactataagcaaagccataagaagtggtttgatcgatatattaggggtagctcttgattttgttaacattaagataaggtgactttttccccctgcttttaggattaaaatcaaagatacttctatatttttatcactatagatcatagttattatacaatgtagtgagtcctgcatgggtactcgatgtgtaatgaaacctgaaataataagataataagaaaagcaataattttctaaagctgtgctgtcggtgatacagagatgatactcaaattataataaaactcttcattttgtgaattatagaagctactttttataaagccatatttttttagggaaactaaggagtgacatagaactgatgaatgagtaaaagtaagttttgctggatttttgtagaactctggacgttgaggattcattatgctgtggttaactttaaatatttttgaattccaaatatctgaattaatgagccttgtctttacaaatatgtgccattgtgcaacatcggtggattttctaaaaataatgtaaatgtcttctattaaatgttgagtgcaataaaatacagaagaattctctatattgtcatt

SEQ ID NO: 7498 - protein, 299 aa, Homo sapiens; identical to SEQ ID NO: 1041

SEQ ID NO: 7499 - DNA, 2913 bp, Homo sapiens
ggagtcacaggttcgtacacgcgaggccgggcgcgcgcagccggcaggcgggtgaagtcttcccaggtgctgcaggcggtgctgaggcacagggtctgctgcaggagcagcggcccgaacccgctccagcggcccgccgccgccagcggttcccgcgtcgcgtgtgtacccccgcgcactgaaggaggtccgccagccctcaccagcccccgcggaccgtgcaatggcccagcgtaagaatgccaagagcagcggcaacagcagcagcagcggctccggcagcggtagcacgagtgcgggcagcagcagccccggggcccggagagagacaaagcatggaggacacaagaatgggaggaaaggcggactctcaggaacttcattcttcacgtggtttatggtgattgcattgctgggcgtctggacatctgtagctgtcgtttggtttgatcttgttgactatgaggaagttctaggaaaactaggaatctatgatgctgatggtgatggagattttgatgtggatgatgccaaagttttattaggacttaaagagagatctacttcagagccagcagtcccgccagaagaggctgagccacacactgagcccgaggagcaggttcctgtggaggcagaaccccagaatatcgaagatgaagcaaaagaacaaattcagtcccttctccatgaaatggtacacgcagaacatgttgagggagaagacttgcaacaagaagatggacccacaggagaaccacaacaagaggatgatgagtttcttatggcgactgatgtagatgatagatttgagaccctggaacctgaagtatctcatgaagaaaccgagcatagttaccacgtggaagagacagtttcacaagactgtaatcaggatatggaagagatgatgtctgagcaggaaaatccagattccagtgaaccagtagtagaagatgaaagattgcaccatgatacagatgatgtaacataccaagtctatgaggaacaagcagtatatgaacctctagaaaatgaagggatagaaatcacagaagtaactgctccccctgaggataatcctgtagaagattcacaggtaattgtagaagaagtaagcatttttcctgtggaagaacagcaggaagtaccaccagatacttaaagcttcaaaaagactgcccctaccaccacaggaggaccagcctaaccatacgctccaaaagatggctgtgatagatcttgtgaagcaattactgagcagatcaagatctttgggaaggaacactaaagatgttttgaatgaattatagtccactggcattttagtgtatttttttttctttttagaaacacacatttctaaaaatgtcatgttacattcctgcatgtcccttttgatagcattagtggatccattggatttcttttttctttttgtgagacagcttttagtcttacctgaatttatgtgtgtttttccgacagtggttaataattatattggtgatgtagcagcaattgtgttggcagggttttcatatattattagtaattaacactaactgttggactgacttgtgtacactgtgttaaacatgatttaaaagctattaagagtactttgtgttagcactcttaaaaacgctaacagagatcatcattagctgtgaagatttgagttgtatatacctgcactgatattcttatcaaaaatttctacattagctttaagtgttcagattaacacttttgaaatttttgtagcttttagctgattaattagaaaaatttaatatttcagtgaaagttttaaattatcatttatttatttttttaaatgagaggggaaagctgaaattccttgttaagacacaaggaaaaagaatggccctactattatcatgcaaaaatgctttgttggcacctcagattaatcatataatagctatagtctcttcagcatttgtttaaattttagaaaacctgtataaattactggtgcataacttaaagattattctgcctttggctaattgagtaattcccctccagcactagagaccgctcagtgctcttactagatgaactcagtaacgccttgagctgggttgattgaggatgtgtgaaaagctcacagagcccgatgcctgctgctatttcacggcaatgagcctttttctttctacactgaagattttcttcttatttaatgtggtttattttgggctcagaaataattgctctgttgaaaataatcctttgtcagaaaagaaggtagctaccacatcattttgaaaggaccatgagcaactataagcaaagccataagaagtggtttgatcgatatattaggggtagctcttgattttgttaacattaagataaggtgactttttccccctgcttttaggattaaaatcaaagatacttctatatttttatcactatagatcatagttattatacaatgtagtgagtcctgcatgggtactcgatgtgtaatgaaacctgaaataataagataataagaaaagcaataattttctaaagctgtgctgtcggtgatacagagatgatactcaaattataataaaactcttcattttgtgaattatagaagctactttttataaagccatatttttttagggaaactaaggagtgacatagaactgatgaatgagtaaaagtaagttttgctggatttttgtagaactctggacgttgaggattcattatgctgtggttaactttaaatatttttgaattccaaatatctgaattaatgagccttgtctttacaaatatgtgccattgtgcaacatcggtggattttctaaaaataatgtaaatgtcttctattaaatgttgagtgcaataaaatacagaagaattctctatattgtcatt

SEQ ID NO: 7500 - protein, 313 aa, Homo sapiens; identical to SEQ ID NO: 1037

SEQ ID NO: 7501 - DNA, 2784 bp, Homo sapiens
ggagtcacaggttcgtacacgcgaggccgggcgcgcgcagccggcaggcgggtgaagtcttcccaggtgctgcaggcggtgctgaggcacagggtctgctgcaggagcagcggcccgaacccgctccagcggcccgccgccgccagcggttcccgcgtcgcgtgtgtacccccgcgcactgaaggaggtccgccagccctcaccagcccccgcggaccgtgcaatggcccagcgtaagaatgccaagagcagcggcaacagcagcagcagcggctccggcagcggtagcacgagtgcgggcagcagcagccccggggcccggagagagacaaagcatggaggacacaagaatgggaggaaaggcggactctcaggaacttcattcttcacgtggtttatggtgattgcattgctgggcgtctggacatctgtagctgtcgtttggtttgatcttgttgactatgaggaagttctaggaaaactaggaatctatgatgctgatggtgatggagattttgatgtggatgatgccaaagttttattaggacttaaagagagatctacttcagagccagcagtcccgccagaagaggctgagccacacactgagcccgaggagcaggttcctgtggaggcagaaccccagaatatcgaagatgaagcaaaagaacaaattcagtcccttctccatgaaatggtacacgcagaacatgaaaccgagcatagttaccacgtggaagagacagtttcacaagactgtaatcaggatatggaagagatgatgtctgagcaggaaaatccagattccagtgaaccagtagtagaagatgaaagattgcaccatgatacagatgatgtaacataccaagtctatgaggaacaagcagtatatgaacctctagaaaatgaagggatagaaatcacagaagtaactgctccccctgaggataatcctgtagaagattcacaggtaattgtagaagaagtaagcatttttcctgtggaagaacagcaggaagtaccaccagatacttaaagcttcaaaaagactgcccctaccaccacaggaggaccagcctaaccatacgctccaaaagatggctgtgatagatcttgtgaagcaattactgagcagatcaagatctttgggaaggaacactaaagatgttttgaatgaattatagtccactggcattttagtgtatttttttttctttttagaaacacacatttctaaaaatgtcatgttacattcctgcatgtcccttttgatagcattagtggatccattggatttcttttttctttttgtgagacagcttttagtcttacctgaatttatgtgtgtttttccgacagtggttaataattatattggtgatgtagcagcaattgtgttggcagggttttcatatattattagtaattaacactaactgttggactgacttgtgtacactgtgttaaacatgatttaaaagctattaagagtactttgtgttagcactcttaaaaacgctaacagagatcatcattagctgtgaagatttgagttgtatatacctgcactgatattcttatcaaaaatttctacattagctttaagtgttcagattaacacttttgaaatttttgtagcttttagctgattaattagaaaaatttaatatttcagtgaaagttttaaattatcatttatttatttttttaaatgagaggggaaagctgaaattccttgttaagacacaaggaaaaagaatggccctactattatcatgcaaaaatgctttgttggcacctcagattaatcatataatagctatagtctcttcagcatttgtttaaattttagaaaacctgtataaattactggtgcataacttaaagattattctgcctttggctaattgagtaattcccctccagcactagagaccgctcagtgctcttactagatgaactcagtaacgccttgagctgggttgattgaggatgtgtgaaaagctcacagagcccgatgcctgctgctatttcacggcaatgagcctttttctttctacactgaagattttcttcttatttaatgtggtttattttgggctcagaaataattgctctgttgaaaataatcctttgtcagaaaagaaggtagctaccacatcattttgaaaggaccatgagcaactataagcaaagccataagaagtggtttgatcgatatattaggggtagctcttgattttgttaacattaagataaggtgactttttccccctgcttttaggattaaaatcaaagatacttctatatttttatcactatagatcatagttattatacaatgtagtgagtcctgcatgggtactcgatgtgtaatgaaacctgaaataataagataataagaaaagcaataattttctaaagctgtgctgtcggtgatacagagatgatactcaaattataataaaactcttcattttgtgaattatagaagctactttttataaagccatatttttttagggaaactaaggagtgacatagaactgatgaatgagtaaaagtaagttttgctggatttttgtagaactctggacgttgaggattcattatgctgtggttaactttaaatatttttgaattccaaatatctgaattaatgagccttgtctttacaaatatgtgccattgtgcaacatcggtggattttctaaaaataatgtaaatgtcttctattaaatgttgagtgcaataaaatacagaagaattctctatattgtcatt

SEQ ID NO: 7502 - protein, 270 aa, Homo sapiens
MAQRKNAKSSGNSSSSGSGSGSTSAGSSSPGARRETKHGGHKNGRKGGLSGTSFFTWFMVIALLGVWTSVAVVWFDLVDYEEVLGKLGIYDADGDGDFDVDDAKVLLGLKERSTSEPAVPPEEAEPHTEPEEQVPVEAEPQNIEDEAKEQIQSLLHEMVHAEHETEHSYHVEETVSQDCNQDMEEMMSEQENPDSSEPVVEDERLHHDTDDVTYQVYEEQAVYEPLENEGIEITEVTAPPEDNPVEDSQVIVEEVSIFPVEEQQEVPPDT

SEQ ID NO: 7503 - DNA, 1100 bp, Homo sapiens
ggagtcacaggttcgtacacgcgaggccgggcgcgcgcagccggcaggcgggtgaagtcttcccaggtgctgcaggcggtgctgaggcacagggtctgctgcaggagcagcggcccgaacccgctccagcggcccgccgccgccagcggttcccgcgtcgcgtgtgtacccccgcgcactgaaggaggtccgccagccctcaccagcccccgcggaccgtgcaatggcccagcgtaagaatgccaagagcagcggcaacagcagcagcagcggctccggcagcggtagcacgagtgcgggcagcagcagccccggggcccggagagagacaaagcatggaggacacaagaatgggaggaaaggcggactctcaggaacttcattcttcacgtggtttatggtgattgcattgctgggcgtctggacatctgtagctgtcgtttggtttgatcttgttgactatgaggaagttctaggaaaactaggaatctatgatgctgatggtgatggagattttgatgtggatgatgccaaagttttattaggacttaaagagagatctacttcagagccagcagtcccgccagaagaggctgagccacacactgagcccgaggagcaggttcctgtggaggcagaaccccagaatatcgaagatgaagcaaaagaacaaattcagtcccttctccatgaaatggtacacgcagaacatgttgagggagaagacttgcaacaagaagatggacccacaggagaaccacaacaagaggatgatgagtttcttatggcgactgatgtagatgatagatttgagaccctggaacctgaagtatctcatgaagaaaccgagcatagttaccacgtggaagagacagattccagtgaaccagtagtagaagatgaaagattgcaccatgatacagatgatgtaacataccaagtctatgaggaacaagcagtatatgaacctctagaaaatgaagggatagaaatcacagaagtaactgctccccctgaggataatcctgtagaagattcacaggtaattgtagaagaagtaagcatttttcctgtggaagaacagcaggaagtaccaccag

SEQ ID NO: 7504 - protein, 291 aa, Homo sapiens
MAQRKNAKSSGNSSSSGSGSGSTSAGSSSPGARRETKHGGHKNGRKGGLSGTSFFTWFMVIALLGVWTSVAVVWFDLVDYEEVLGKLGIYDADGDGDFDVDDAKVLLGLKERSTSEPAVPPEEAEPHTEPEEQVPVEAEPQNIEDEAKEQIQSLLHEMVHAEHVEGEDLQQEDGPTGEPQQEDDEFLMATDVDDRFETLEPEVSHEETEHSYHVEETDSSEPVVEDERLHHDTDDVTYQVYEEQAVYEPLENEGIEITEVTAPPEDNPVEDSQVIVEEVSIFPVEEQQEVP

SEQ ID NO: 7505 - DNA, 1382 bp, Homo sapiens
acaggttcgtacacgcgaggccgggcgcgcgcagccggcaggcgggtgaagtcttcccaggtgctgcaggcggtgctgaggcacagggtctgctgcaggagcagcggcccgaacccgctccagcggcccgccgccgccagcggttcccgcgtcgcgtgtgtacccccgcgcactgaaggaggtccgccagccctcaccagcccccgcggaccgtgcaatggcccagcgtaagaatgccaagagcagcggcaacagcagcagcagcggctccggcagcggtagcacgagtgcgggcagcagcagccccggggcccggagagagacaaagcatggaggacacaagaatgggaggaaaggcggactctcaggaacttcattcttcacgtggtttatggtgattgcattgctgggcgtctggacatctgtagctgtcgtttggtttgatcttgttgactatgaggaagttctaggaaaactaggaatctatgatgctgatggtgatggagattttgatgtggatgatgccaaagttttattaggtaatttgcattgtatatagatgatcgtctcaaaatttcacaatgagagactgatgaaattgacataaatcaatcagcatgaacacttgaattaatccagaggactacttaagttaattctgtaggtggttgctttattgagaatattttgtattatgacctgcttagctatgcaagtttgtaacttcagaggtcctcataatgatacttggataataaagattccccatagacacttccattgaaaaagaaaagaagtaaacaagtgtcatttgtaatttgaaatgttttaagttaactgtcatgttactgtccatgaaatggatctggtgacttaggctctatctcctgacattgatttctttctcctgtgtcctcaattatttcttctcctgttaatgcccactggtaataattctcaaaatcgattgctcagaatattccattgtaaaatgcaccttggaaatggttgttttcctcatttgtaaattgaagacaatgcctattcctcaaggtggttgtgagaaccagtcaatgttgcatatgtgtaaacagccagcacatggttgggcattcagtttccctttatcattggtagaataagaatagtaatactcaaccaaaacgtctcagtcaggggttaaaaacttggaagcactgaaactgtgcttcctattcctacttaggtcaacagattgcaaaacaaatatttcagtcctttatcctttgtaatgaatgtgtctttgtgaaatgagtatagtggagcctgatttattctattgagatcattgagggggcaaatgcaaataattataaatgttgcacatgagtgaagccgtaaga

SEQ ID NO: 7506 - protein, 113 aa, Homo sapiens
MAQRKNAKSSGNSSSSGSGSGSTSAGSSSPGARRETKHGGHKNGRKGGLSGTSFFTWFMVIALLGVWTSVAVVWFDLVDYEEVLGKLGIYDADGDGDFDVDDAKVLLGNLHCI

SEQ ID NO: 7507 - DNA, 1258 bp, Homo sapiens
catgcagtgtgcctaaaacctgccagcagtacttttgagtttttttttttgttttgttttactttagcatttattattcatggattgaagaaatcaaaatggctgaagataaagagacaaagcatggaggacacaagaatgggaggaaaggcggactctcaggaacttcattcttcacgtggtttatggtgattgcattgctgggcgtctggacatctgtagctgtcgtttggtttgatcttgttgactatgaggaagttctaggaaaactaggaatctatgatgctgatggtgatggagattttgatgtggatgatgccaaagttttattaggcaagacccagtggggtagccaagagaaaaactaaggctaaagttaaagaactcactaaagaagagctcaagaaggagaaagagaaacctgagtcaaggaaggaaagtaagaatgaagagagaaaaaaggggaagaaagaggatgtccgaaaggataagaaaattgctgatgcagacctatccaggaaggagtctcctaagggtaaaaaggacagagaaaaagagaaagtggacctagaaaaaagtgctaaaaccaaggaaaataggaaaaaatcaacaaatatgaaggatgtttctagtaaaatggcatcccgagacaaagatgacagaaaggaaagtagaagttctaccagatatgcacacttaacaaagggaaatacccagaaaagaaacggctaaagctctggcatcatcatcccagaacatggtcatgttccagattgcagtttgttacaaaaaagcatggaaaatgtaatattgctctgattggtgagggtgtgtaaattagccattgaatgtatcattggtgcttagcaagtaaattacctgaaatttaaatataccgtctcatacttctaaatgtaaaaacattttaaaaatgtcatagaatatgatgtaataacttctatttattgatcatgtattcagataaatgtatatgtatcatgaatttttatggattaatatattgaatactttcattgacgttaaataagaatattaagattttaaatgttatttctgtgcataatgccttgtaactttttcaagtatgctaaatactcagggagatggatttgctcgttgttttcttccctccttccccttcctgcttccctgtttttctctttcgtggacacctccccaggctcatgtgccaccaccttccctcctctccagccctcccagccctcccgcagccttt

SEQ ID NO: 7508 - protein, 89 aa, Homo sapiens
MAEDKETKHGGHKNGRKGGLSGTSFFTWFMVIALLGVWTSVAVVWFDLVDYEEVLGKLGIYDADGDGDFDVDDAKVLLGKTQWGSQEKN

SEQ ID NO: 7509 - DNA, 1328 bp, Homo sapiens
agtctcaagctctggtaggcaagtgcatgcagtgtgcctaaaacctgccagcagtacttttgagtttttttttttgttttgttttactttagcatttattattcatggattgaagaaatcaaaatggctgaagataaagagacaaagcatggaggacacaagaatgggaggaaaggcggactctcaggaacttcattcttcacgtggtttatggtgattgcattgctgggcgtctggacatctgtagctgtcgtttggtttgatcttgttgactatgaggaagttctagccaaagcaaaggacttccgttataacttatcagaggtgcttcaaggaaaactaggaatctatgatgctgatggtgatggagattttgatgtggatgatgccaaagttttattaggcaagacccagtggggtagccaagagaaaaactaaggctaaagttaaagaactcactaaagaagagctcaagaaggagaaagagaaacctgagtcaaggaaggaaagtaagaatgaagagagaaaaaaggggaagaaagaggatgtccgaaaggataagaaaattgctgatgcagacctatccaggaaggagtctcctaagggtaaaaaggacagagaaaaagagaaagtggacctagaaaaaagtgctaaaaccaaggaaaataggaaaaaatcaacaaatatgaaggatgtttctagtaaaatggcatcccgagacaaagatgacagaaaggaaagtagaagttctaccagatatgcacacttaacaaagggaaatacccagaaaagaaacggctaaagctctggcatcatcatcccagaacatggtcatgttccagattgcagtttgttacaaaaaagcatggaaaatgtaatattgctctgattggtgagggtgtgtaaattagccattgaatgtatcattggtgcttagcaagtaaattacctgaaatttaaatataccgtctcatacttctaaatgtaaaaacattttaaaaatgtcatagaatatgatgtaataacttctatttattgatcatgtattcagataaatgtatatgtatcatgaatttttatggattaatatattgaatactttcattgacgttaaataagaatattaagattttaaatgttatttctgtgcataatgccttgtaactttttcaagtatgctaaatactcagggagatggatttgctcgttgttttcttccctccttccccttcctgcttccctgtttttctctttcgtggacacctccccaggctcatgtgccaccaccttccctcctctccagccctcccagccctcccgcagccttt

SEQ ID NO: 7510 - protein, 104 aa, Homo sapiens
MAEDKETKHGGHKNGRKGGLSGTSFFTWFMVIALLGVWTSVAVVWFDLVDYEEVLAKAKDFRYNLSEVLQGKLGIYDADGDGDFDVDDAKVLLGKTQWGSQEKN

SEQ ID NO: 7511 - DNA, 958 bp, Homo sapiens
agtctcaagctctggtaggcaagtgcatgcagtgtgcctaaaacctgccagcagtacttttgagtttttttttttgttttgttttactttagcatttattattcatggattgaagaaatcaaaatggctgaagataaagagacaaagcatggaggacacaagaatgggaggaaaggcggactctcaggaacttcattcttcacgtggtttatggtgattgcattgctgggcgtctggacatctgtagctgtcgtttggtttgatcttgttgactatgaggaagttctagccaaagcaaaggacttccgttataacttatcagaggtgcttcaaggaaaactaggaatctatgatgctgatggtgatggagattttgatgtggatgatgccaaagttttattaggcaagacccagtggggtagccaagagaaaaactaaggctaaagttaaagaactcactaaagaagagctcaagaaggagaaagagaaacctgagtcaaggaaggaaagtaagaatgaagagagaaaaaaggggaagaaagaggatgtccgaaaggataagaaaattgctgatgcagacctatccaggaaggagtctcctaagggtaaaaaggacagagaaaaagagaaagtggacctagaaaaaagtgctaaaaccaaggaaaataggaaaaaatcaacaaatatgaaggatgtttctagtaaaatggcatcccgagacaaagatgacagaaaggaaagtagaagttctaccagatatgcacacttaacaaagggaaatacccagaaaagaaacggctaaagctctggcatcatcatcccagaacatggtcatgttccagattgcagtttgttacaaaaaagcatggaaaatgtaatattgctctgattggtgagggtgtgtaaattagccattgaatgtatcattggtgcttagcaagtaaattacctgaaattt

SEQ ID NO: 7512 - protein, 104 aa, Homo sapiens; identical to SEQ ID NO: 7510

SEQ ID NO: 7513 - DNA, 1651 bp, Homo sapiens
gggagtcacaggttcgtacacgcgaggccgggcgcgcgcagccggcaggcgggtgaagtcttcccaggtgctgcaggcggtgctgaggcacagggtctgctgcaggagcagcggcccgaacccgctccagcggcccgccgccgccagcggttcccgcgtcgcgtgtgtacccccgcgcactgaaggaggtccgccagccctcaccagcccccgcggaccgtgcaatggcccagcgtaagaatgccaagagcagcggcaacagcagcagcagcggctccggcagcggtagcacgagtgcgggcagcagcagccccggggcccggagagagacaaagcatggaggacacaagaatgggaggaaaggcggactctcaggaacttcattcttcacgtggtttatggtgattgcattgctgggcgtctggacatctgtagctgtcgtttggtttgatcttgttgactatgaggaagttctagccaaagcaaaggacttccgttataacttatcagaggtgcttcaaggaaaactaggaatctatgatgctgatggtgatggagattttgatgtggatgatgccaaagttttattaggcctgaccaaagatggcagtaatgaaaatattgattctcttgaggaagtccttaatattttagcagaggaaagttcagattggttttatggtttcctctcatttctctatgatataatgactccttttgaaatgctagaagaagaagaagaagaaagcgaaaccgcagatggtgttgatggtacgtcacagaatgaaggggttcagggaaagacttgtgtcatattggatttacataaccagtaaccttgattcagggactgaagtcattggctaatgaacacctgaagcagcctcctttttcttttctttccttggcttatgcagggcttaatgtgcagtggggtggttgtgatcttaccgtgcaagtcaaccatgtgatcttgcccagtacagctactagctagtcccttgctcgctcagctcccccaacttctattgaagaaaatggtactcctcattcttgtagtcagctacaaagtacactgaaaatgatgttcttggtggtataattggtttctgtatcgttttgtttcaactcatgtattcactgaactaaatttggacacttaacagcaaattgtgttgtggttaacccttgatgcttgtctttctaacacactattaattatgatgattctaatggatttcattataaaaatatttctggcatgatttttaagttaaatgcttctctgttctttaacatgactgatgtataaaatgatggttctttactaagctgatattttttattgtaatttgtttaggtttgtcagataggttcatacaaatttctatgtaaaattctgtgttaatggtgcttttaaaataatttaaaaataactccatgtttttgccttagagtaagttaacttactgttttcagatagtagcatgacatatttctgtctgtgaaagcaaaatttattttaaattttatttccaaatatacatccagagaaagtaatttgtattttttttaaagtaggcatattacacaagagggaacatgtgaatatgtatcttaatgttgtacatattaaaattattcatcctaa

SEQ ID NO: 7514 - protein, 203 aa, Homo sapiens
MAQRKNAKSSGNSSSSGSGSGSTSAGSSSPGARRETKHGGHKNGRKGGLSGTSFFTWFMVIALLGVWTSVAVVWFDLVDYEEVLAKAKDFRYNLSEVLQGKLGIYDADGDGDFDVDDAKVLLGLTKDGSNENIDSLEEVLNILAEESSDWFYGFLSFLYDIMTPFEMLEEEEEESETADGVDGTSQNEGVQGKTCVILDLHNQ

SEQ ID NO: 7515 - DNA, 542 bp, Homo sapiens
agtctcaagctctggtaggcaagtgcatgcagtgtgcctaaaacctgccagcagtacttttgagtttttttttttgttttgttttactttagcatttattattcatggattgaagaaatcaaaatggctgaagataaagagacaaagcatggaggacacaagaatgggaggaaaggcggactctcaggaacttcattcttcacgtggtttatggtgattgcattgctgggcgtctggacatctgtagctgtcgtttggtttgatcttgttgactatgaggaagttctagccaaagcaaaggacttccgttataacttatcagaggtgcttcaaggaaaactaggaatctatgatgctgatggtgatggagattttgatgtggatgatgccaaagttttattaggcctgaccaaagatggcagtaatgaaaatattgattctcttgaggaagtccttaatattttagcagaggaaagttcagattggttttatggtttcctctcatttctctatgatataatgactccttttgaaatgctaga

SEQ ID NO: 7516 - protein, 138 aa, Homo sapiens
MAEDKETKHGGHKNGRKGGLSGTSFFTWFMVIALLGVWTSVAVVWFDLVDYEEVLAKAKDFRYNLSEVLQGKLGIYDADGDGDFDVDDAKVLLGLTKDGSNENIDSLEEVLNILAEESSDWFYGFLSFLYDIMTPFEM

SEQ ID NO: 7517 - DNA, 893 bp, Homo sapiens
acaggttcgtacacgcgaggccgggcgcgcgcagccggcaggcgggtgaagtcttcccaggtgctgcaggcggtgctgaggcacagggtctgctgcaggagcagcggcccgaacccgctccagcggcccgccgccgccagcggttcccgcgtcgcgtgtgtacccccgcgcactgaaggaggtccgccagccctcaccagcccccgcggaccgtgcaatggcccagcgtaagaatgccaagagcagcggcaacagcagcagcagcggctccggcagcggtagcacgagtgcgggcagcagcagccccggggcccggagagagacaaagcatggaggacacaagaatgggaggaaaggcggactctcaggaacttcattcttcacgtggtttatggtgattgcattgctgggcgtctggacatctgtagctgtcgtttggtttgatcttgttgactatgaggaagttctaggaaaactaggaatctatgatgctgatggtgatggagattttgatgtggatgatgccaaagttttattaggcaagtacacattttatgttttttgttagtggtgataaaatgctggaaacaattatttttgctttaataatatctatctcaatagtatatatcttacaggagacttttctcccttaaatcatatatttcattactgttaaaattttaaatggcttatttttccacactctttcatgtcaatttacttttatcaatgaataagtgtatatctcttacacatatatcttttgataagtataataatttcatgtgtgtttccagatttaaagtacttcttattctgaacttagaatttgaatagataatatcctagtctgtttttagatatggtaattatagccatttttcattaac

SEQ ID NO: 7518 - protein, 116 aa, Homo sapiens [sequence omitted]

SEQ ID NO: 7519 - DNA, 636 bp, Homo sapiens
ggcgtggccgtcgggcggcgagccgcgcgctctcgccccgggagggagtcacaggttcgtacacgcgaggccgggcgcgcgcagccggcaggcgggtgaagtcttcccaggtgctgcaggcggtgctgaggcacagggtctgctgcaggagcagcggcccgaacccgctccagcggcccgccgccgccagcggttcccgcgtcgcgtgtgtacccccgcgcactgaaggaggtccgccagccctcaccagcccccgcggaccgtgcaatggcccagcgtaagaatgccaagagcagcggcaacagcagcagcagcggctccggcagcggtagcacgagtgcgggcagcagcagccccggggcccggagagagacaaagcatggaggacacaagaatgggaggaaaggcggactctcaggaacttcattcttcacgtggtttatggtgattgcattgctgggcgtctggacatctgtagctgtcgtttggtttgatcttgttgactatgaggaagttctagccaaagcaaaggacttccgttataacttatcagaggtgcttcaaggaaaactaggaatctatgatgctgatggtgatggagattttgatgtggatgatgccaaagttttattaggc

SEQ ID NO: 7520 - protein, 122 aa, Homo sapiens
MAQRKNAKSSGNSSSSGSGSGSTSAGSSSPGARRETKHGGHKNGRKGGLSGTSFFTWFMVIALLGVWTSVAVVWFDLVDYEEVLAKAKDFRYNLSEVLQGKLGIYDADGDGDFDVDDAKVLL

SEQ ID NO: 7521 - DNA, 329 bp, Homo sapiens
tattattcatggattgaagaaatcaaaatggctgaagataaagaatcaatgtgaaaccagttactgtcttgtactgaagattatttgaaggactgtcagggattctgcctgaaagtttcatcataaatgacttcccaccactcagcttttctgacttcctgggcctgctcttgctgagagatctgtgcactcgataggcttttcctctgtcaccactctgttgctttgactcattgggttagattgtgtctgaaatgtagagttttgtgcatagagctagaaaacttaattgaagttgttagaatcacatctaaaataaaaatgtaaac

SEQ ID NO: 7522 - protein, 39 aa, Homo sapiens
RLFEGLSGILPESFIINDFPPLSFSDFLGLLLLRDLCTR

SEQ ID NO: 7523 - DNA, 507 bp, Homo sapiens
taatttttcctggaattggtgccaatttactcatgaaaggataactatacgaatccttcctacccatcccctgtagtggaatgcattcgctctaaatcatgatgttcctgccaaaaaatatatttttctgagcatgaattacatgcataaatactggacctccagcgatcatcttgagggtgtgaaaagagcttgcagatgcaaactacataataagaaaacacaacagaaagatgtaaggagccatggtcaattaggtcatcgtgataccacattacaatgctgggctgcttatcactgcaattttattatgaagaggagaaaaaaataaattttattgaagttgtttcattgtatctctgttattgtatcagccaaattgattttctagcagatacaagatatgtagtgtataccagttgttgtctttctataacagtaattttcctttggtggaaaagtttgcttccactatgcatgattttaataaatataatctttctttgg

SEQ ID NO: 7524 - protein, 75 aa, Homo sapiens
MLGCLSLQFYYEEEKKINFIEVVSLYLCYCISQIDFLADTRYVVYTSCCLSITVIFLWWKSLLPLCMILINIIFL

SEQ ID NO: 7525 - DNA, 765 bp, Homo sapiens
gccgctgccatgaaaggagtgctttttgcctcccaccatgattctgaggcctccccagccatgtagaattagccagcctgtttttgatgaagagcaactgtactggagagaaagcctgtattcatattcatcgtcatcaggcaaatcgaggagctgacttgcttaggatcactttacagaattctttctcaagaggatttagactccttttctattgatagggcataagaattgactcagacctagaaactggctgggaccatctcataatgtttgtgtacattcctgttgtcttctacctcccatccaccgtgtctctctactgcctataaccagcctacataagggaattgacttagaacactatgcaccatgatttggaaactacgaatcagacccaaatgttgaccagacaacccaagcttgaacacaggctgtcgaaagtgaatattgcagacattaatcctcagattttttttctttcaaatttctctatgaataatactgtgcccactagttgtttttttttttaatgttcactctaaaatgatacaaaccatcaggaataaagacataaaacccagtgaaatttatttggagaaaaataaattggatcccaaacttattttttcatgctgtatttacacagaaagaatctcaagttgtgcaatttagttttttttaatttacatttaactgttgtctttgaatatttagtctatagaattaacttgtcaagttcctactgttgaggagtgaaggtaa

SEQ ID NO: 7526 - protein, 43 aa, Homo sapiens
MKSNCTGEKACIHIHRHQANRGADLLRITLQNSFSRGFRLLFY

SEQ ID NO: 7527 - DNA, 630 bp, Homo sapiens
acatatgaagaaggatgtgtttgcttccccttccaccatgatggtgcatttcctgaggcctccccatccttgctgaatttagatggtacgtctctccttcatgtgctgcctggggttgaggagaagtggcatagagatacaagcctcctgggtgatgagaaagacagagaagcatttttcatagagagttgccaggattgctcagcatccagatcaaccatgaaaggcaccaggagaatgaacatctgcatttttcttgtccatgattcttctacataatgctactgaagcgaagataatctttaattgtagaaacaagaagagaagcaaatatattactagtatccagaagctccttcacagttttcagataatgctaatgagctagttcctggtttgtatcacaaacttctcccaaattcttcccctaaacattccttcatggtggagctaattagactattgcagctccaccgttcattactgcttgtattttgtaaaaattagtgcatatgtcatgggcctagggatacatccattgcagggaaatgggagtagggcattcccagttttagctataattgaaaattattcttagggacgaaaatgccattgaataattctgccttt

SEQ ID NO: 7528 - protein, 33 aa, Homo sapiens
MVRLSFMCCLGLRRSGIEIQASWVMRKTEKHFS

SEQ ID NO: 7529 - DNA, 823 bp, Homo sapiens
gattggttgaaaagcatcattcagaaggaaccaataaagagagaggggttgaactacctagagaaaaccattttaaatcacaatttcagaagattttaaaaattcaactctacctaaagacatcataaaatggctcattattccatcatccaggtcatatcgtctaataacagaaatcagagagaagtaccaggatcataattacagagagaagtttgaccaaatccctttctgtaaaaatgttaaatataaatatatgtcttctatgtttttgtcctaaccctaaatactaaatatttactgggaagtctcttaatctgtgaaagactgcattcatttacattaaataaaatatgggaattgctaaattttaaattcagtattccctatgaaaaactaaacttaggaaaagtaaattttttatgaattttgccacaactgctcatttggggaataaaaatcagaactctgaaattttagctttaaaaaccaatattgtctttgaaagctaatgatcaagtgatgattttgttttctagccatttaataataaccttggcgttctttttcgggttcatatgccttgcacaatctttgaccaaaaccaaaattctcacctactttctatgtaataaatcattaggaattatgaaaaagagagaaaagaattaacgttatccaagtttataactattggatgggcattctgctagaatgcttcttatgctttatgcttcttatcatattaatgctccagtattatatacgatagaaaataaaagttaatctagtaatatataatgttaaattcaactaaatttgg

SEQ ID NO: 7530 - protein, 49 aa, Homo sapiens
MILFSSHLIITLAFFFGFICLAQSLTKTKILTYFLCNKSLGIMKKREKN

SEQ ID NO: 7531 - DNA, 459 bp, Homo sapiens
aaagagagagggggtaagaaggggatacaagttcttactctggtcatgaattttattcggaactgtcagctcgggtttggttggttgaaaagcatcattcagaaggaaccaataaagagagagggggaattcctgcaaaaagtaataaactaaaagaaaacctaaagggtataaatgtaaaattaagtccttttactctctccagttgaactacctagagaaaaccattttaaatcacaatttcagaagattttaaaaattcaactctacctaaagacatcataaaatggctcattattccatcatccaggctcccctgtttctcaggcctccagactgaagctgaattataccaccagctctcctcagtctccagtttgcagacaacagatcatgggacttctcagcctccataatcacaggagtcaattcctcataataaatctgtctgccccctgc

SEQ ID NO: 7532 - protein, 35 aa, Homo sapiens
MNFIRNCQLGFGWLKSIIQKEPIKREGEFLQKVIN

SEQ ID NO: 7533 - DNA, 1474 bp, Homo sapiens
agaagaattggatgcagctatgaatgcaaggccacacaaggtggatggaagagttgtggaaccaaagagagccgtctcaagagaagattctcaaagaccaggtgcccacttaactgtgaaaaagatatttgttggtggcattaaagaagacactgaagaacatcacctaagagattattttgaacagtatggaaaaattgaagtgattgaaatcatgagtgaccgaggcagtggcaagaaaaggggctttgcctttgtaacctttgacgaccatgactccgtggataagattgtcattcagaaataccatactgtgaatggccacaactgtgaagttacaaaagccctgtcaaagcaagagatggctagtgcttcatccagccaaagaggtcgaagtggttctggaaactttggtggtggtcgtggaggtggtttcagtgggaacgacaactttggtcatggaggaaacttcagtggtcatggtggctttggtggcagccatggtggtggtggatatggtggcaatggggatggctataatggatttggtaatgatggaagcaattttggaggtggtggaagctacaaggattttggcaattacaacaatcagtcttcaaattttggacccatgaagggaggaaattttggaggcagaagctctggcccccatggtggtggaggccagtactttgcaaaaccacgaaaccaaggtggctatggcggttccagcagcagcagtagctatggcagtggcagaagattttaattaggaaacaaagctcagcaggagaggagagccagagaagtaacagggaagctacaggttacaacagatttgtgaactcagccaagcacagtggtggcagggcctagctgctacaaagaagacatgttttagacaaatactcatgtgtatgggcaaaaaactcgaggactgtatttgtgactaattgtataacaggttattttagtttctgttctgtggaaagtgtaaagcattccaacaaagggttttaatgtagatttttttttgcacccatgctgttgattgctaaatgtaatagtctgatcgtgacactgaataaatgtctttttttttaatgtgctgtgtaaagttagtctactctgaagccatcttggtaaatttccccaacagtgtgaagttagaattccttcagggtgatgccaggttctatttggaatttatatacaacctgcttgggtgaagaagccattgtcttcggaaaccttggtgtagttgaactgatagttactgttgtgacctgaagttcaccattaaaagggattatccaagcaaaatcatggaattattggttataaaagtgattgttggtacatcctatgcaatatatctaaattgaataatggtaccagataaaattatagatgggaatgaagcttgtgtatcatccattatcgtatgtaatcaataaacgatttaattctcttg

SEQ ID NO: 7534 - protein, 249 aa, Homo sapiens
MNARPHKVDGRVVEPKRAVSREDSQRPGAHLTVKKIFVGGIKEDTEEHHLRDYFEQYGKIEVIEIMSDRGSGKKRGFAFVTFDDHDSVDKIVIQKYHTVNGHNCEVTKALSKQEMASASSSQRGRSGSGNFGGGRGGGFSGNDNFGHGGNFSGHGGFGGSHGGGGYGGNGDGYNGFGNDGSNFGGGGSYKDFGNYNNQSSNFGPMKGGNFGGRSSGPHGGGGQYFAKPRNQGGYGGSSSSSSYGSGRRF

SEQ ID NO: 7535 - DNA, 1388 bp, Homo sapiens
tggatgcagctatgaatgcaaggccacacaaggtggatggaagagttgtggaaccaaagagagccgtctcaagagaagattctcaaagaccaggtgcccacttaactgtgaaaaagatatttgttggtggcattaaagaagacactgaagaacatcacctaagagattattttgaacagtatggaaaaattgaagtgattgaaatcatgagtgaccgaggcagtggcaagaaaaggggctttgcctttgtaacctttgacgaccatgactccgtggataagattgtcattcagaaataccatactgtgaatggccacaactgtgaagttacaaaagccctgtcaaagcaagagatggctagtgcttcatccagccaaagaggtcgaagtggttctggaaactttggtggtggtcgtggaggaaacttcagtggtcatggtggctttggtggcagccatggtggtggtggatatggtggcaatggggatggctataatggatttggtaatgatggaagcaattttggaggtggtggaagctacaaggattttggcaattacaacaatcagtcttcaaattttggacccatgaagggaggaaattttggaggcagaagctctggcccccatggtggtggaggccagtactttgcaaaaccacgaaaccaaggtggctatggcggttccagcagcagcagtagctatggcagtggcagaagattttaattaggaaacaaagctcagcaggagaggagagccagagaagtaacagggaagctacaggttacaacagatttgtgaactcagccaagcacagtggtggcagggcctagctgctacaaagaagacatgttttagacaaatactcatgtgtatgggcaaaaaactcgaggactgtatttgtgactaattgtataacaggttattttagtttctgttctgtggaaagtgtaaagcattccaacaaagggttttaatgtagatttttttttgcacccatgctgttgattgctaaatgtaatagtctgatcgtgacactgaataaatgtctttttttttaatgtgctgtgtaaagttagtctactctgaagccatcttggtaaatttccccaacagtgtgaagttagaattccttcagggtgatgccaggttctatttggaatttatatacaacctgcttgggtgaagaagccattgtcttcggaaaccttggtgtagttgaactgatagttactgttgtgacctgaagttcaccattaaaagggattatccaagcaaaatcatggaattattggttataaaagtgattgttggtacatcctatgcaatatatctaaattgaataatggtaccagataaaattatagatgggaatgaagcttgtgtatc

SEQ ID NO: 7536 - protein, 237 aa, Homo sapiens
MNARPHKVDGRVVEPKRAVSREDSQRPGAHLTVKKIFVGGIKEDTEEHHLRDYFEQYGKIEVIEIMSDRGSGKKRGFAFVTFDDHDSVDKIVIQKYHTVNGHNCEVTKALSKQEMASASSSQRGRSGSGNFGGGRGGNFSGHGGFGGSHGGGGYGGNGDGYNGFGNDGSNFGGGGSYKDFGNYNNQSSNFGPMKGGNFGGRSSGPHGGGGQYFAKPRNQGGYGGSSSSSSYGSGRRF

SEQ ID NO: 7537 - DNA, 704 bp, Homo sapiens
ggtctccagtacaacattgaaaagaagtggtgagagagctaacatccttgccttgttcctgagtttataaagagtttctagatgcaaacacacacacacacaaaagtgtgcttccagaagatgctgctgggaaggccactgcatccctagggagccaaatcaaagcattttgtcctaatgtgtccggaattggtgggttcttggtctcactgacttcaagaatgaagccgtggaccctcgcggaaagatagaatagaagctacaagatctgcagttatgcttcctcttacccaatttacagataatatatgtttgtggctgtgatacacagaaaaatggcatccaaggaaagtccacctcctaatcctcagaagctgtgaatatgttactttatatggcaaaatggactctgcagatgagattaagtttctgcctgcctgacaatcactctgctgatggcaaccaaatattgtcttcttcctggagtctcagggaaaatgtggcctggggcagaccctagttcttcagatggaaggtgaaacttcaatacatcaccgcaacaggaaacaatctcaagaatttgtatttacacatcctggacaaagaaagtgtaaataagtctggaatgcagtcatcagttcccaggtcctggaaggcaggagtctggagtcaggcagaaagagaaagcaggcacagtgacaacc

SEQ ID NO: 7538 - protein, 45 aa, Homo sapiens
MLLYMAKWTLQMRLSFCLPDNHSADGNQILSSSWSLRENVAWGRP

SEQ ID NO: 7539 - DNA, 616 bp, Homo sapiens
accttttgaattgaagaggcaagaaaactacatactacatttctgatacccttttttgcagaaaggatacttgatacttcatttaaagctgagagttgtgtctgtatcttcaagacttagattcagagctgagttacttggctatatgaggaagcctctttgctgatacagatcatgtagtgatggtgtgcgaagtcctagacagcagcaatttgattcaacaacattctgacagtggtgagaggcagaagctctcttctctacacaactctatgggcttacatatctgaaattcagttgaattcagacaaaattcaagtgatatagtgaaacggagtttgtgatgtcaacttgcctaagcaagcacacaagataagctgacaagaggagcaagctaaagttcaagggcctgtgtgaaagagagatgcctgactaatgttttgtcaagataaagcagagggttggtgacagacaatagaggccaggacacttaagtaagaaggtctacctttcctgttttaaagtcatggttgcatctactttcataagaacttattgtgtaatgtttctgtcagtaacctgggaataaagagtggagtttctcctgcactacaga

SEQ ID NO: 7540 - protein, 35 aa, Homo sapiens
MVCEVLDSSNLIQQHSDSGERQKLSSLHNSMGLHI

SEQ ID NO: 7541 - DNA, 1594 bp, Homo sapiens
atttgcctctcaagcagcctctggtcatctatctgcctttgagccatcaagatgccgatgtcttctcttccagcagctattttgtctcacatgacagctattaacaatgtgcctcctcctccacttcacagtataccaaacttgaaaaagtctaagcacattaattatggccagttgaatgcattatgccacattagaggacaacacagccggagtatgagcaatatcttatcagctcacgatacatttatgaagcaatatcctaaagtattcctgcaccaaaaacccagacttcctaaacttttcaaacaggaggaacaaagggaactcaatgaaggcaaagaggaaagtcaacatcaacaacctgatgattctaacaatatagctgtccatgttcagagagcacatggtggccatattttatatagaccaaaaagagccacagagaaatttgaagaattcctagctatcttaaagaaattgcccattcacaggacgccatatgaacacaaaactgtgtggaagttcctgaaaacaattccagatttaacctttcagctaaatgataagcatctgaaaacacttagtaagactgtcttttccgaaacctggttgaaaggcagcacagtggttgcaaatgatggattttatgtaatactgaaaggcctagctcgacctcaaacaaacgtgtataaaaatctgattgaaggaagtgattcaccagactcgttcatatctcagagtttccacagcttcatttggagtgaagaattcaaaaactctacacttgctgagatgtacctaccttcatatgactcaatgcttagcaaatggagtacctttgggactctggaagttatgcctcagaatgaatcggaaacacagatgttctcggtggtgacagaagacgattgtgaaattcttaaaatcccagcaaagggatatgcaaagataaaggaggaaaaaataaaacttgaaaatatgcaaaagttgaaattaatccgtatgtgtccttattatgaggaatggcctactttatccatatatgagctaattgcactccttaaatggaaaaaatttcctccaggtcatgtgatagtggaaagtggaaatataatttcttttgtgggttatattaactctggatgctgtaacatttatagaagtattataggatttgtgaaactacgatcaaataaagtgaaaagatctcaaaaacttgtttatatggggaaacttaaggagaaggagtcctttggtgagattagcgtccttcttcaagttcctttcacgtgcacaatcattaccaaaaaagaagttgagatggcaatcattgaagataaggacctatttgtggcctagatctagaaacaacctcagtgaacattaattaagaaagtattgactaaataatggaataattgcattctggaatactatcaaactaccagcaatgaatttggtctattgtgactacatatcctggattccccaggaaagtcccactttcgaattgcctttcaaacacagtttttattagcagtctttcttggtttggatactaaaataaatatagttatcattgcttgattta

SEQ ID NO: 7542 - protein, 436 aa, Homo sapiens; identical to SEQ ID NO: 1049

SEQ ID NO: 7543 - DNA, 2418 bp, Homo sapiens
actcgtcactgcgcagccaatcggcaggcgggaagcactccggcccgaacgtgcgggcggggcagggtggcggccccgcacggtaggggagcagagtgggcaggccgggggtgagggctcgcgctccgggagctgcacggggctgcgtggaaagagcgccgagcggtggcgtcgttgtcgccccctcctcgtcgggaagaatcgtttggtctcctgccgtgcccggaatcccagtcagaagttccagcctgccactgttctctgatgccatgccagcaccaactcaactgttttttcctctcatccgtaactgtgaactgagcaggatctatggcactgcatgttactgccaccacaaacatctctgttgttcctcatcgtacattcctcagagtcgactgagatacacacctcatccagcatatgctaccttttgcaggccaaaggagaactggtggcagtacacccaaggaaggagatatgcttccacaccacagaaattttacctcacacctccacaagtcaatagcatccttaaagctaatgaatacagtttcaaagtgccagaatttgacggcaaaaatgtcagttctatccttggatttgacagcaatcagctgcctgcaaatgcacccattgaggaccggagaagtgcagcaacctgcttgcagaccagagggatgcttttgggggtttttgatggccatgcaggttgtgcttgttcccaggcagtcagtgaaagactcttttattatattgctgtctctttgttaccccatgagactttgctagagattgaaaatgcagtggagagcggccgggcactgctacccattctccagtggcacaagcaccccaatgattactttagtaaggaggcatccaaattgtactttaacagcttgaggacttactggcaagagcttatagacctcaacactggtgagtcgactgatattgatgttaaggaggctctaattaatgccttcaagaggcttgataatgacatctccttggaggcgcaagttggtgatcctaattcttttctcaactacctggtgcttcgagtggcattttctggagccactgcttgtgtggcccatgtggatggtgttgaccttcatgtggccaatactggcgatagcagagccatgctgggtgtgcaggaagaggacggctcatggtcagcagtcacgctgtctaatgaccacaatgctcaaaatgaaagagaactagaacggctgaaattggaacatccaaagagtgaggccaagagtgtcgtgaaacaggatcggctgcttggcttgctgatgccatttagggcatttggagatgtaaagttcaaatggagcattgaccttcaaaagagagtgatagaatctggcccagaccagttgaatgacaatgaatataccaagtttattcctcctaattatcacacacctccttatctcactgctgagccagaggtaacttaccaccgattaaggccacaggataagtttctggtgttggctactgatgggttgtgggagactatgcataggcaggatgtggttaggattgtgggtgagtacctaactggcatgcatcaccaacagccaatagctgttggtggctacaaggtgactctgggacagatgcatggccttttaacagaaaggagaaccaaaatgtcctcggtatttgaggatcagaacgcagcaacccatctcattcgccacgctgtgggcaacaacgagtttgggactgttgatcatgagcgcctctctaaaatgcttagtcttcctgaagagcttgctcgaatgtacagagatgacattacaatcattgtagttcagttcaattctcatgttgtaggggcgtatcaaaaccaagaatagtgagtggctctttcactggcaattctcaaatgatatacatttaaagggcagattttttaaaaagatactactataataaacatttccagttggtcattctaagcatttacccttttgatactctagctagtcaggtactccaaattgactttgcagcagggtggcagggtcaggagagtctggtcctgcctagctcagatttcatggcacctgcacttgaagcaagtcacttctttatcacaggtgtcttgaaacattagcttcttttaccaacctgagaaaattaggatgacctggcaaataagatcttgaataggccaaaagcaagtatcttgctgtgtgtagtctcttggttaaagtgaagaaacagtactgttcacacctttcttcactgagattccagtgtacatgagaacatatatttattgcatgattttctagatacacagtctatgcattattcatatacatttattttagcctaaagtggttttcaaatccagttcttcaagccataaatgaccaagatccaagc

SEQ ID NO: 7544 - protein, 537 aa, Homo sapiens; identical to SEQ ID NO: 1051

SEQ ID NO: 7545 - DNA, 4278 bp, Homo sapiens
actcgtcactgcgcagccaatcggcaggcgggaagcactccggcccgaacgtgcgggcggggcagggtggcggccccgcacggtaggggagcagagtgggcaggccgggggtgagggctcgcgctccgggagctgcacggggctgcgtggaaagagcgccgagcggtggcgtcgttgtcgccccctcctcgtcgggaagaatcgtttggtctcctgccgtgcccggaatcccagtcagaagttccagcctgccactgttctctgatgccatgccagcaccaactcaactgttttttcctctcatccgtaactgtgaactgagcaggatctatggcactgcatgttactgccaccacaaacatctctgttgttcctcatcgtacattcctcagagtcgactgagatacacacctcatccagcatatgctaccttttgcaggccaaaggagaactggtggcagtacacccaaggaaggagatatgcttccacaccacagaaattttacctcacacctccacaagtcaatagcatccttaaagctaatgaatacagtttcaaagtgccagaatttgacggcaaaaatgtcagttctatccttggatttgacagcaatcagctgcctgcaaatgcacccattgaggaccggagaagtgcagcaacctgcttgcagaccagagggatgcttttgggggtttttgatggccatgcaggttgtgcttgttcccaggcagtcagtgaaagactcttttattatattgctgtctctttgttaccccatgagactttgctagagattgaaaatgcagtggagagcggccgggcactgctacccattctccagtggcacaagcaccccaatgattactttagtaaggaggcatccaaattgtactttaacagcttgaggacttactggcaagagcttatagacctcaacactggtgagtcgactgatattgatgttaaggaggctctaattaatgccttcaagaggcttgataatgacatctccttggaggcgcaagttggtgatcctaattcttttctcaactacctggtgcttcgagtggcattttctggagccactgcttgtgtggcccatgtggatggtgttgaccttcatgtggccaatactggcgatagcagagccatgctgggtgtgcaggaagaggacggctcatggtcagcagtcacgctgtctaatgaccacaatgctcaaaatgaaagagaactagaacggctgaaattggaacatccaaagagtgaggccaagagtgtcgtgaaacaggatcggctgcttggcttgctgatgccatttagggcatttggagatgtaaagttcaaatggagcattgaccttcaaaagagagtgatagaatctggcccagaccagttgaatgacaatgaatataccaagtttattcctcctaattatcacacacctccttatctcactgctgagccagaggtaacttaccaccgattaaggccacaggataagtttctggtgttggctactgatgggttgtgggagactatgcataggcaggatgtggttaggattgtgggtgagtacctaactggcatgcatcaccaacagccaatagctgttggtggctacaaggtgactctgggacagatgcatggccttttaacagaaaggagaaccaaaatgtcctcggtatttgaggatcagaacgcagcaacccatctcattcgccacgctgtgggcaacaacgagtttgggactgttgatcatgagcgcctctctaaaatgcttagtcttcctgaagagcttgctcgaatgtacagagatgacattacaatcattgtagttcagttcaattctcatgttgtaggggcgtatcaaaaccaagaatagtgagtggctctttcactggcaattctcaaatgatatacatttaaagggcagattttttaaaaagatactactataataaacatttccagttggtcattctaagcatttacccttttgatactctagctagtcaggtactccaaattgactttgcagcagggtggcagggtcaggagagtctggtcctgcctagctcagatttcatggcacctgcacttgaagcaagtcacttctttatcacaggtgtcttgaaacattagcttcttttaccaacctgagaaaattaggatgacctggcaaataagatcttgaataggccaaaagcaagtatcttgctgtgtgtagtctcttggttaaagtgaagaaacagtactgttcacacctttcttcactgagattccagtgtacatgagaacatatatttattgcatgattttctagatacacagtctatgcattattcatatacatttattttagcctaaagtggttttcaaatccagttcttcaagccataaatgaccaagatccaagcaatctgaatttgtttttgtgattatttgactggaatgcttcttaagtggaataactatactccgttatccacccgatttcctaatgtaattgaaagattttctattttgccacacacttggagacaataagggtttttagttttatctactcttctattgaagttaaagaaagaaaaaaagatttttttatttgtattaatgaaaagctttagtttaaaataaggagatccagaataaaaagaagagactgatctcttcaattattgtcatctgtagccaccagcacatcactcttatgtaatccccaaaggcttggcatgccgtaagtgtgtggtgggtagactgctgccggggaatcgtacttcttatttagtaatgataagacttttcattatttttggaattttaaagatgacataaataagtttaaatatcaatttggggagtaaggtttaatattgccatcgggtattgagacaggaggaagtttctgtttttctccatttagacataggtcaattaaaatatttgggtttaaaatgactaaatgctttaaacatattgtagcttaagatatatgtgttaagatatatacatgagaaactttaaaaggtaactactgtgcatgcctgatgcttaatagaatacttagtggcatcaaatgtttgcagcagtctccataattatattcagtcccttctaatactgtatcaatgtaaatgaaataaatatattcaaattggctttttgatatgcatcaagtggcattttgttcctgtgtttaatagtgatctgtatacagctgtgcacatattgtcatcacttattctagcatcactgttaaggctgtgattatgtttgatattcacctggattttaatacaagccaatatcagcttcccattgtgtaataacttgggtgtttaggagtcttttcacattttttggggatatgaactagatgttcaagaactccttctggactgtggatactgaatcagtgtactattggctgcagaatttgtttcaattgaaaatagactcaggaagattgctgctcagaatatcatataatgtttattttttgaggtgtttttgtttttatttgtgtgtttttttttttttaagtcagcttggaacttttttcctgggtagtatttgggagagggaaaggctgtactatatatttatttctaaatgttttgactgggcatttttcttttaatgaaatatgtggactgctctagcaaaccctattttcagctactatttgaatattcttgaacaccaccactgaagagtttcatatacaccaaataatgtctcatctctatagtacagggaatataaaattggtttcctgtggtcatgatcaagatagtagtattattacacaagaaacttggtctgcagtctggaagcttgtctgctctatagaaatgaaaatgcagcatgaagttgacattgtggaaatgaaagtaattgggtattagaaatctgaaagtactgtcatctaaaagcaattgtgattttattgtaattggttgtcactgttgtacggtgtctagaattaaagaatacatgtaaactttcatggtatttagcctttcttaaatttttttaaaatttaaactttctaacctatgtattcaacttctgtatttatatttaatcagtggttcatgttatataatacacccttaactagttaaatggaatgttggtatggtacagagtaccatattgctaagaaaactgtcttataaaagatgtatatgtgtgaagacatgaaagtttaatgtacagaatggttggagaaatgcctatggtgaattaaagcttcatatctgctttctgaa

SEQ ID NO: 7546 - protein, 537 aa, Homo sapiens; identical to SEQ ID NO: 1051

SEQ ID NO: 7547 - DNA, 4218 bp, Homo sapiens
gtgggcaggccgggggtgagggctcgcgctccgggagctgcacggggctgcgtggaaagagcgccgagcggtggcgtcgttgtcgccccctcctcgtcgggaagaatcgtttggtctcctgccgtgcccggagaatgtgtgtgtgtcccgggcccagacgaattggaatcccagtcagaagttccagcctgccactgttctctgatgccatgccagcaccaactcaactgttttttcctctcatccgtaactgtgaactgagcaggatctatggcactgcatgttactgccaccacaaacatctctgttgttcctcatcgtacattcctcagagtcgactgagatacacacctcatccagcatatgctaccttttgcaggccaaaggagaactggtggcagtacacccaaggaaggagatatgcttccacaccacagaaattttacctcacacctccacaagtcaatagcatccttaaagctaatgaatacagtttcaaagtgccagaatttgacggcaaaaatgtcagttctatccttggatttgacagcaatcagctgcctgcaaatgcacccattgaggaccggagaagtgcagcaacctgcttgcagaccagagggatgcttttgggggtttttgatggccatgcaggttgtgcttgttcccaggcagtcagtgaaagactcttttattatattgctgtctctttgttaccccatgagactttgctagagattgaaaatgcagtggagagcggccgggcactgctacccattctccagtggcacaagcaccccaatgattactttagtaaggaggcatccaaattgtactttaacagcttgaggacttactggcaagagcttatagacctcaacactggtgagtcgactgatattgatgttaaggaggctctaattaatgccttcaagaggcttgataatgacatctccttggaggcgcaagttggtgatcctaattcttttctcaactacctggtgcttcgagtggcattttctggagccactgcttgtgtggcccatgtggatggtgttgaccttcatgtggccaatactggcgatagcagagccatgctgggtgtgcaggaagaggacggctcatggtcagcagtcacgctgtctaatgaccacaatgctcaaaatgaaagagaactagaacggctgaaattggaacatccaaagagtgaggccaagagtgtcgtgaaacaggatcggctgcttggcttgctgatgccatttagggcatttggagatgtaaagttcaaatggagcattgaccttcaaaagagagtgatagaatctggcccagaccagttgaatgacaatgaatataccaagtttattcctcctaattatcacacacctccttatctcactgctgagccagaggtaacttaccaccgattaaggccacaggataagtttctggtgttggctactgatgggttgtgggagactatgcataggcaggatgtggttaggattgtgggtgagtacctaactggcatgcatcaccaacagccaatagctgttggtggctacaaggtgactctgggacagatgcatggccttttaacagaaaggagaaccaaaatgtcctcggtatttgaggatcagaacgcagcaacccatctcattcgccacgctgtgggcaacaacgagtttgggactgttgatcatgagcgcctctctaaaatgcttagtcttcctgaagagcttgctcgaatgtacagagatgacattacaatcattgtagttcagttcaattctcatgttgtaggggcgtatcaaaaccaagaatagtgagtggctctttcactggcaattctcaaatgatatacatttaaagggcagattttttaaaaagatactactataataaacatttccagttggtcattctaagcatttacccttttgatactctagctagtcaggtactccaaattgactttgcagcagggtggcagggtcaggagagtctggtcctgcctagctcagatttcatggcacctgcacttgaagcaagtcacttctttatcacaggtgtcttgaaacattagcttcttttaccaacctgagaaaattaggatgacctggcaaataagatcttgaataggccaaaagcaagtatcttgctgtgtgtagtctcttggttaaagtgaagaaacagtactgttcacacctttcttcactgagattccagtgtacatgagaacatatatttattgcatgattttctagatacacagtctatgcattattcatatacatttattttagcctaaagtggttttcaaatccagttcttcaagccataaatgaccaagatccaagcaatctgaatttgtttttgtgattatttgactggaatgcttcttaagtggaataactatactccgttatccacccgatttcctaatgtaattgaaagattttctattttgccacacacttggagacaataagggtttttagttttatctactcttctattgaagttaaagaaagaaaaaaagatttttttatttgtattaatgaaaagctttagtttaaaataaggagatccagaataaaaagaagagactgatctcttcaattattgtcatctgtagccaccagcacatcactcttatgtaatccccaaaggcttggcatgccgtaagtgtgtggtgggtagactgctgccggggaatcgtacttcttatttagtaatgataagacttttcattatttttggaattttaaagatgacataaataagtttaaatatcaatttggggagtaaggtttaatattgccatcgggtattgagacaggaggaagtttctgtttttctccatttagacataggtcaattaaaatatttgggtttaaaatgactaaatgctttaaacatattgtagcttaagatatatgtgttaagatatatacatgagaaactttaaaaggtaactactgtgcatgcctgatgcttaatagaatacttagtggcatcaaatgtttgcagcagtctccataattatattcagtcccttctaatactgtatcaatgtaaatgaaataaatatattcaaattggctttttgatatgcatcaagtggcattttgttcctgtgtttaatagtgatctgtatacagctgtgcacatattgtcatcacttattctagcatcactgttaaggctgtgattatgtttgatattcacctggattttaatacaagccaatatcagcttcccattgtgtaataacttgggtgtttaggagtcttttcacattttttggggatatgaactagatgttcaagaactccttctggactgtggatactgaatcagtgtactattggctgcagaatttgtttcaattgaaaatagactcaggaagattgctgctcagaatatcatataatgtttattttttgaggtgtttttgtttttatttgtgtgtttttttttttttaagtcagcttggaacttttttcctgggtagtatttgggagagggaaaggctgtactatatatttatttctaaatgttttgactgggcatttttcttttaatgaaatatgtggactgctctagcaaaccctattttcagctactatttgaatattcttgaacaccaccactgaagagtttcatatacaccaaataatgtctcatctctatagtacagggaatataaaattggtttcctgtggtcatgatcaagatagtagtattattacacaagaaacttggtctgcagtctggaagcttgtctgctctatagaaatgaaaatgcagcatgaagttgacattgtggaaatgaaagtaattgggtattagaaatctgaaagtactgtcatctaaaagcaattgtgattttattgtaattggttgtcactgttgtacggtgtctagaattaaagaatacatgtaaactttcatggtatttagcctttcttaaatttttttaaaatttaaactttctaacctatgtattcaacttctgtatttatatttaatcagtggttcatgttatataatacacccttaactagttaaatggaatgttggtatggtacagagtaccatattgctaagaaaactgtcttataaaagatgtatatgtgtgaagacatgaaagtttaatgtacagaatggttggagaaatgcctatggtgaattaaagcttcatatctgctttctgaa

SEQ ID NO: 7548 - protein, 562 aa, Homo sapiens
MCVCPGPRRIGIPVRSSSLPLFSDAMPAPTQLFFPLIRNCELSRIYGTACYCHHKHLCCSSSYIPQSRLRYTPHPAYATFCRPKENWWQYTQGRRYASTPQKFYLTPPQVNSILKANEYSFKVPEFDGKNVSSILGFDSNQLPANAPIEDRRSAATCLQTRGMLLGVFDGHAGCACSQAVSERLFYYIAVSLLPHETLLEIENAVESGRALLPILQWHKHPNDYFSKEASKLYFNSLRTYWQELIDLNTGESTDIDVKEALINAFKRLDNDISLEAQVGDPNSFLNYLVLRVAFSGATACVAHVDGVDLHVANTGDSRAMLGVQEEDGSWSAVTLSNDHNAQNERELERLKLEHPKSEAKSVVKQDRLLGLLMPFRAFGDVKFKWSIDLQKRVIESGPDQLNDNEYTKFIPPNYHTPPYLTAEPEVTYHRLRPQDKFLVLATDGLWETMHRQDVVRIVGEYLTGMHHQQPIAVGGYKVTLGQMHGLLTERRTKMSSVFEDQNAATHLIRHAVGNNEFGTVDHERLSKMLSLPEELARMYRDDITIIVVQFNSHVVGAYQNQE

SEQ ID NO: 7549 - DNA, 4248 bp, Homo sapiens
cacggggctgcgtggaaagagcgccgagcggtggcgtcgttgtcgccccctcctcgtcgggaagaatcgtttggtctcctgccgtgcccggccggtgctgctgtcgctgctgctgcccgcgcgggttgtggatgttgtcggctccgtgttgtgatgacaggagaatgtgtgtgtgtcccgggcccagacgaattggaatcccagtcagaagttccagcctgccactgttctctgatgccatgccagcaccaactcaactgttttttcctctcatccgtaactgtgaactgagcaggatctatggcactgcatgttactgccaccacaaacatctctgttgttcctcatcgtacattcctcagagtcgactgagatacacacctcatccagcatatgctaccttttgcaggccaaaggagaactggtggcagtacacccaaggaaggagatatgcttccacaccacagaaattttacctcacacctccacaagtcaatagcatccttaaagctaatgaatacagtttcaaagtgccagaatttgacggcaaaaatgtcagttctatccttggatttgacagcaatcagctgcctgcaaatgcacccattgaggaccggagaagtgcagcaacctgcttgcagaccagagggatgcttttgggggtttttgatggccatgcaggttgtgcttgttcccaggcagtcagtgaaagactcttttattatattgctgtctctttgttaccccatgagactttgctagagattgaaaatgcagtggagagcggccgggcactgctacccattctccagtggcacaagcaccccaatgattactttagtaaggaggcatccaaattgtactttaacagcttgaggacttactggcaagagcttatagacctcaacactggtgagtcgactgatattgatgttaaggaggctctaattaatgccttcaagaggcttgataatgacatctccttggaggcgcaagttggtgatcctaattcttttctcaactacctggtgcttcgagtggcattttctggagccactgcttgtgtggcccatgtggatggtgttgaccttcatgtggccaatactggcgatagcagagccatgctgggtgtgcaggaagaggacggctcatggtcagcagtcacgctgtctaatgaccacaatgctcaaaatgaaagagaactagaacggctgaaattggaacatccaaagagtgaggccaagagtgtcgtgaaacaggatcggctgcttggcttgctgatgccatttagggcatttggagatgtaaagttcaaatggagcattgaccttcaaaagagagtgatagaatctggcccagaccagttgaatgacaatgaatataccaagtttattcctcctaattatcacacacctccttatctcactgctgagccagaggtaacttaccaccgattaaggccacaggataagtttctggtgttggctactgatgggttgtgggagactatgcataggcaggatgtggttaggattgtgggtgagtacctaactggcatgcatcaccaacagccaatagctgttggtggctacaaggtgactctgggacagatgcatggccttttaacagaaaggagaaccaaaatgtcctcggtatttgaggatcagaacgcagcaacccatctcattcgccacgctgtgggcaacaacgagtttgggactgttgatcatgagcgcctctctaaaatgcttagtcttcctgaagagcttgctcgaatgtacagagatgacattacaatcattgtagttcagttcaattctcatgttgtaggggcgtatcaaaaccaagaatagtgagtggctctttcactggcaattctcaaatgatatacatttaaagggcagattttttaaaaagatactactataataaacatttccagttggtcattctaagcatttacccttttgatactctagctagtcaggtactccaaattgactttgcagcagggtggcagggtcaggagagtctggtcctgcctagctcagatttcatggcacctgcacttgaagcaagtcacttctttatcacaggtgtcttgaaacattagcttcttttaccaacctgagaaaattaggatgacctggcaaataagatcttgaataggccaaaagcaagtatcttgctgtgtgtagtctcttggttaaagtgaagaaacagtactgttcacacctttcttcactgagattccagtgtacatgagaacatatatttattgcatgattttctagatacacagtctatgcattattcatatacatttattttagcctaaagtggttttcaaatccagttcttcaagccataaatgaccaagatccaagcaatctgaatttgtttttgtgattatttgactggaatgcttcttaagtggaataactatactccgttatccacccgatttcctaatgtaattgaaagattttctattttgccacacacttggagacaataagggtttttagttttatctactcttctattgaagttaaagaaagaaaaaaagatttttttatttgtattaatgaaaagctttagtttaaaataaggagatccagaataaaaagaagagactgatctcttcaattattgtcatctgtagccaccagcacatcactcttatgtaatccccaaaggcttggcatgccgtaagtgtgtggtgggtagactgctgccggggaatcgtacttcttatttagtaatgataagacttttcattatttttggaattttaaagatgacataaataagtttaaatatcaatttggggagtaaggtttaatattgccatcgggtattgagacaggaggaagtttctgtttttctccatttagacataggtcaattaaaatatttgggtttaaaatgactaaatgctttaaacatattgtagcttaagatatatgtgttaagatatatacatgagaaactttaaaaggtaactactgtgcatgcctgatgcttaatagaatacttagtggcatcaaatgtttgcagcagtctccataattatattcagtcccttctaatactgtatcaatgtaaatgaaataaatatattcaaattggctttttgatatgcatcaagtggcattttgttcctgtgtttaatagtgatctgtatacagctgtgcacatattgtcatcacttattctagcatcactgttaaggctgtgattatgtttgatattcacctggattttaatacaagccaatatcagcttcccattgtgtaataacttgggtgtttaggagtcttttcacattttttggggatatgaactagatgttcaagaactccttctggactgtggatactgaatcagtgtactattggctgcagaatttgtttcaattgaaaatagactcaggaagattgctgctcagaatatcatataatgtttattttttgaggtgtttttgtttttatttgtgtgtttttttttttttaagtcagcttggaacttttttcctgggtagtatttgggagagggaaaggctgtactatatatttatttctaaatgttttgactgggcatttttcttttaatgaaatatgtggactgctctagcaaaccctattttcagctactatttgaatattcttgaacaccaccactgaagagtttcatatacaccaaataatgtctcatctctatagtacagggaatataaaattggtttcctgtggtcatgatcaagatagtagtattattacacaagaaacttggtctgcagtctggaagcttgtctgctctatagaaatgaaaatgcagcatgaagttgacattgtggaaatgaaagtaattgggtattagaaatctgaaagtactgtcatctaaaagcaattgtgattttattgtaattggttgtcactgttgtacggtgtctagaattaaagaatacatgtaaactttcatggtatttagcctttcttaaatttttttaaaatttaaactttctaacctatgtattcaacttctgtatttatatttaatcagtggttcatgttatataatacacccttaactagttaaatggaatgttggtatggtacagagtaccatattgctaagaaaactgtcttataaaagatgtatatgtgtgaagacatgaaagtttaatgtacagaatggttggagaaatgcctatggtgaattaaagcttcatatctgctttctgaa

SEQ ID NO: 7550 - protein, 573 aa, Homo sapiens
MLSAPCCDDRRMCVCPGPRRIGIPVRSSSLPLFSDAMPAPTQLFFPLIRNCELSRIYGTACYCHHKHLCCSSSYIPQSRLRYTPHPAYATFCRPKENWWQYTQGRRYASTPQKFYLTPPQVNSILKANEYSFKVPEFDGKNVSSILGFDSNQLPANAPIEDRRSAATCLQTRGMLLGVFDGHAGCACSQAVSERLFYYIAVSLLPHETLLEIENAVESGRALLPILQWHKHPNDYFSKEASKLYFNSLRTYWQELIDLNTGESTDIDVKEALINAFKRLDNDISLEAQVGDPNSFLNYLVLRVAFSGATACVAHVDGVDLHVANTGDSRAMLGVQEEDGSWSAVTLSNDHNAQNERELERLKLEHPKSEAKSVVKQDRLLGLLMPFRAFGDVKFKWSIDLQKRVIESGPDQLNDNEYTKFIPPNYHTPPYLTAEPEVTYHRLRPQDKFLVLATDGLWETMHRQDVVRIVGEYLTGMHHQQPIAVGGYKVTLGQMHGLLTERRTKMSSVFEDQNAATHLIRHAVGNNEFGTVDHERLSKMLSLPEELARMYRDDITIIVVQFNSHVVGAYQNQE

SEQ ID NO: 7551 - DNA, 330 bp, Homo sapiens
caatgttggggtcagagagtgtagagagtggtgtggggagagtgcaggctgaagagttacctaaggtcaaaatcctgacctatgagccaagccatcgatttgggatttctactgaggacactggaagtcactaagagcatctgaatgaaagaaaataaaagagactgagaaaccacagaaataaagaagcgctgatgacaatgcctgcttgctgatggttacgatgatcatagcagtgtgcattttgtatgcatgaagcctgcgactaaataaacgtgtggggaaatatttgtaaggaaataagctattaataaaataagctaaaatcac

SEQ ID NO: 7552 - protein, 43 aa, Homo sapiens
MLGSESVESGVGRVQAEELPKVKILTYEPSHRFGISTEDTGSH

SEQ ID NO: 7553 - DNA, 1743 bp, Homo sapiens
agcggggactccgactacccctgtctggcccctcccctccgcccgtcaccgcctccttgaagctgccgctgtcgctgctgctcgttcgagtcgcagatccttgccagcacattacagaatatttttgttgaaccttcttgagaattcagagaaactgctgagtgaccactgaacgaaaagatctaatcttaaggcttacgcgtgttccatccaccacatcagaacaatgtcgtatgtttttgtaaatgattcttctcagactaacgtgcccttgctgcaagcctgtattgatggggactttaattattccaagcggcttttggaaagtggctttgacccaaatattcgtgacagcaggggcagaacaggccttcaccttgcagcagctcgagggaatgtagacatctgccagttactgcataaattcggtgccgatcttctggccacagattatcaaggaaacacagctcttcacctctgtggccatgtggatactatccaatttttggtttccaatggactcaaaattgatatttgcaatcatcaaggtgctacccctttagttctggcaaagcgcagaggagtaaataaagatgtcatccgattgctggaatctttggaagaacaggaggtgaaaggatttaacagaggaacccactcgaaactggagaccatgcaaacagctgagagtgaaagtgccatggaaagccattcactcctcaatcccaacctgcagcaaggtgaaggagtcctctccagcttccgaaccacgtggcaggagtttgtggaggatctgggcttctggagagtattgctgttgatcttcgtcattgctttgctgtctcttggcattgcttattatagaaggacactgaggcttggaagctttgcaaggcaagacagaagccgaatccaggccatctaatctctaggtcagtgtcctgtgctcctgagcctcagaaggcaagaaagaagggatacagacgtcagcgtccctgttgggtggggctgtttccgtcacgacttgtgtcatggagcatcatctcaaagctctgcagttaggaggcagagggacctgctaccacctgtcccctcctctccagtcctgccctgcaggcagcccgggcacctgctgtcttcctggcctcccagatcctcaagatggagctccaggaaccatcccctcctccgcccgggcaggatgccacctccacaaggcaaatcacatccatttgatcttgaacaaaaggctgccgtggtgtctgaaatgacaactcccaggcgggtgatgtcatgctgttttgtttgtctccatggactgtggggatccaatttcagttgtgaagaaaacggtctggggaaaaaagttacttcattcggaaaattccgagaagccataaatacagtttgcagctgaggaaagcactttcacactcagacaatggatttgggtggaagaaaagacttcccgcccctaaggctgagccccttcactcccacccatggccaccggcagcccgcttctgccagcagatagatgtgtgcatggctctggcaagatctcaagcaaccccccttccccaaggagactctccgtgacccagtggcaagttggcaggggatgtgttttccctggttctcatcctaaattgtctcctgcccagagtccatccctgaagtatcaggcacttccctctcgtaaatggttgacctgcatctctgagctgctgttaaagcaaattt

SEQ ID NO: 7554 - protein, 232 aa, Homo sapiens
MSYVFVNDSSQTNVPLLQACIDGDFNYSKRLLESGFDPNIRDSRGRTGLHLAAARGNVDICQLLHKFGADLLATDYQGNTALHLCGHVDTIQFLVSNGLKIDICNHQGATPLVLAKRRGVNKDVIRLLESLEEQEVKGFNRGTHSKLETMQTAESESAMESHSLLNPNLQQGEGVLSSFRTTWQEFVEDLGFWRVLLLIFVIALLSLGIAYYRRTLRLGSFARQDRSRIQAI

SEQ ID NO: 7555 - DNA, 2757 bp, Homo sapiens
gcagcgcctgggctagagccacttgatatctcctgcaccgtccctgtagcactggaggtccagtaggcctggccggggccctgaggggcgagggtgcccgggcttcccacaccttccgcggcgactggagggagccgggccgaggaagcgaccgcggatccttgccagcacattacagaatatttttgttgaaccttcttgagaattcagagaaactgctgagtgaccactgaacgaaaagatctaatcttaaggcttacgcgtgttccatccaccacatcagaacaatgtcgtatgtttttgtaaatgattcttctcagactaacgtgcccttgctgcaagcctgtattgatggggactttaattattccaagcggcttttggaaagtggctttgacccaaatattcgtgacagcaggggcagaacaggccttcaccttgcagcagctcgagggaatgtagacatctgccagttactgcataaattcggtgccgatcttctggccacagattatcaaggaaacacagctcttcacctctgtggccatgtggatactatccaatttttggtttccaatggactcaaaattgatatttgcaatcatcaaggtgctacccctttagttctggcaaagcgcagaggagtaaataaagatgtcatccgattgctggaatctttggaagaacaggaggtgaaaggatttaacagaggaacccactcgaaactggagaccatgcaaacagctgagagtgaaagtgccatggaaagccattcactcctcaatcccaacctgcagcaaggtgaaggagtcctctccagcttccgaaccacgtggcaggagtttgtggaggatctgggcttctggagagtattgctgttgatcttcgtcattgctttgctgtctcttggcattgcttattatgtgagtggggtgctacccttcgtggaaaaccagcctgaactggtgcattaaaggagctcatggaagatgaggcaattaattgcctgtttcctggcttccaatgtttgttctcagtttctcagaatttttcttagcgcaaagcagtgagggcagtacatgttctttttgcatttttaattattgtaatccttttagataatgatgtgttcatttgaactaactacatactatgatcaagtatattgcatcctaacgctacctctgactcaacctgactttgtaggaaagcctacacgtagccttgtttgataaaaacacggaagtgactagagaatggaagataaaggaagaagctaggaagtccttgctatcaaaaccttatcctaatataggaccaattgaagtattcaaaaagaaaaacagtatcttatatgattagtttttgttggtggttttgttttcatttatttttgcaagagccactttttatttactttctctagggataagagataaaacttgaagtacttttttcaaatcttgtgtgcaaattagtattgttagcatctatttggcttattttagtatttttaagtctagtcacaaaccaaacaaaacttttgaaaatgagctatattttgttcaaagataattgatttgatcttatatttatttgtttttaggataatttttgatctttttgtaaactgctttgcttgttaatatctgtgaaaaataaatgagttcattttgttcactttccaattttcccgagtatcctagtcatcaaagataacagttcatcagaattacagtcagaaaatcctttttctactgaatagttagcagggaaaaataattctgatatttaactgtcataattctgtagtgctattatagtgaaaaactcagttctataagctagctgtgttgtcacagttttatcatagttcataattatttcatgtgcaatcctatttggaggccctgttagacttttaacaatcccatccatatctgtaattctctgatggcaagaatggatggagcatttctgagttaacagtgctggacagtatcgtactgggtgtcataaactctttatgaatggtaatattatgtaaattgaaatctggccctcaaactatattgcagctttcagcagtatgtttgaaggcctcttttgttaatgattctgtaatgtatgaattatgttcttgagtggttaaaaaagaatatgaaggcttgataattatttattgggtaaagtcaggaaattgtagtgaaagaactaatggttttgttttttggaataaaggcacctaagctattgctaattgaattgctgctagaattagaaattatgctttagaatagaattggtatttctgtgattctttttgcttcttggtattttctcttgtatctatgtatctagtattgaggcttgctctttcatgtggctttatcctctctttaatagctgttgtaaaattcctgagtaactggctgcttcaggatcagcttgcagagtcttgcttttaggttagatacaaacaaagtaaatcatagttggtgtaaatccagcaaaaaacagctggctttggaatggagaacactacaattcaaatttgaagtatattcagaagaaaactttggaattagctttacatttgtttgtaaatctaaacaaatatgcaaaattggtcaaaatgtaagtatatagcatttttaaagattaatggttccttttatgtgctgatttctttgtattctgttctctgcattcatcattcaggaataccaccaataaatgtatttatatatcccttaa

SEQ ID NO: 7556 - protein, 228 aa, Homo sapiens; identical to SEQ ID NO: 1053

SEQ ID NO: 7557 - DNA, 3274 bp, Homo sapiens
ggtacttggcccggggcctgtgggcagcgcctgggctagagccacttgatatctcctgcaccgtccctgtagcactggaggtccagtaggcctggccggggccctgaggggcgagggtgcccgggcttcccacaccttccgcggcgactggagggagccgggccgaggaagcgaccgcgggtccgtgatggcttcttcgcggtctgtgtgttcacgagggccgggcagaggcctgcgagggttctcgtttgcgcttgcgggttagggctgtggtccggggaacccctgggcagcgcgggcagccctggctcgcggttaatcggggggtggagcgcggaagccacgccgcaggtccagctgctcggccggggcgagacggtgctttcgcggcgtgtgcttgcaggagcgcacagttcaggcgccgggacaagctgttggggtgtgagtgagctctccagaatggcacatggctccggggtgcccgggttaaaaggaaggatttgcacaccttccacttagggctcgggtaatcgcaaacttcctcccttaattggcttgcagtgctaaaaagcagatcgttctctctgaggttttcccaacagtacctcaagaaaataacatctgttttttgtaacgttccacggtattcggaattggctacagaacataataagatccttgccagcacattacagaatatttttgttgaaccttcttgagaattcagagaaactgctgagtgaccactgaacgaaaagatctaatcttaaggcttacgcgtgttccatccaccacatcagaacaatgtcgtatgtttttgtaaatgattcttctcagactaacgtgcccttgctgcaagcctgtattgatggggactttaattattccaagcggcttttggaaagtggctttgacccaaatattcgtgacagcaggggcagaacaggccttcaccttgcagcagctcgagggaatgtagacatctgccagttactgcataaattcggtgccgatcttctggccacagattatcaaggaaacacagctcttcacctctgtggccatgtggatactatccaatttttggtttccaatggactcaaaattgatatttgcaatcatcaaggtgctacccctttagttctggcaaagcgcagaggagtaaataaagatgtcatccgattgctggaatctttggaagaacaggaggtgaaaggatttaacagaggaacccactcgaaactggagaccatgcaaacagctgagagtgaaagtgccatggaaagccattcactcctcaatcccaacctgcagcaaggtgaaggagtcctctccagcttccgaaccacgtggcaggagtttgtggaggatctgggcttctggagagtattgctgttgatcttcgtcattgctttgctgtctcttggcattgcttattatgtgagtggggtgctacccttcgtggaaaaccagcctgaactggtgcattaaaggagctcatggaagatgaggcaattaattgcctgtttcctggcttccaatgtttgttctcagtttctcagaatttttcttagcgcaaagcagtgagggcagtacatgttctttttgcatttttaattattgtaatccttttagataatgatgtgttcatttgaactaactacatactatgatcaagtatattgcatcctaacgctacctctgactcaacctgactttgtaggaaagcctacacgtagccttgtttgataaaaacacggaagtgactagagaatggaagataaaggaagaagctaggaagtccttgctatcaaaaccttatcctaatataggaccaattgaagtattcaaaaagaaaaacagtatcttatatgattagtttttgttggtggttttgttttcatttatttttgcaagagccactttttatttactttctctagggataagagataaaacttgaagtacttttttcaaatcttgtgtgcaaattagtattgttagcatctatttggcttattttagtatttttaagtctagtcacaaaccaaacaaaacttttgaaaatgagctatattttgttcaaagataattgatttgatcttatatttatttgtttttaggataatttttgatctttttgtaaactgctttgcttgttaatatctgtgaaaaataaatgagttcattttgttcactttccaattttcccgagtatcctagtcatcaaagataacagttcatcagaattacagtcagaaaatcctttttctactgaatagttagcagggaaaaataattctgatatttaactgtcataattctgtagtgctattatagtgaaaaactcagttctataagctagctgtgttgtcacagttttatcatagttcataattatttcatgtgcaatcctatttggaggccctgttagacttttaacaatcccatccatatctgtaattctctgatggcaagaatggatggagcatttctgagttaacagtgctggacagtatcgtactgggtgtcataaactctttatgaatggtaatattatgtaaattgaaatctggccctcaaactatattgcagctttcagcagtatgtttgaaggcctcttttgttaatgattctgtaatgtatgaattatgttcttgagtggttaaaaaagaatatgaaggcttgataattatttattgggtaaagtcaggaaattgtagtgaaagaactaatggttttgttttttggaataaaggcacctaagctattgctaattgaattgctgctagaattagaaattatgctttagaatagaattggtatttctgtgattctttttgcttcttggtattttctcttgtatctatgtatctagtattgaggcttgctctttcatgtggctttatcctctctttaatagctgttgtaaaattcctgagtaactggctgcttcaggatcagcttgcagagtcttgcttttaggttagatacaaacaaagtaaatcatagttggtgtaaatccagcaaaaaacagctggctttggaatggagaacactacaattcaaatttgaagtatattcagaagaaaactttggaattagctttacatttgtttgtaaatctaaacaaatatgcaaaattggtcaaaatgtaagtatatagcatttttaaagattaatggttccttttatgtgctgatttctttgtattctgttctctgcattcatcattcaggaataccaccaataaatgtatttatatatcccttaa

SEQ ID NO: 7558 - protein, 228 aa, Homo sapiens; identical to SEQ ID NO: 1053

SEQ ID NO: 7559 - DNA, 2542 bp, Homo sapiens
cctccttgaagctgccgctgtcgctgctgctcgttcgagtcgcaggcgtgttccatccaccacatcagaacaatgtcgtatgtttttgtaaatgattcttctcagactaacgtgcccttgctgcaagcctgtattgatggggactttaattattccaagcggcttttggaaagtggctttgacccaaatattcgtgacagcaggggcagaacaggccttcaccttgcagcagctcgagggaatgtagacatctgccagttactgcataaattcggtgccgatcttctggccacagattatcaaggaaacacagctcttcacctctgtggccatgtggatactatccaatttttggtttccaatggactcaaaattgatatttgcaatcatcaaggtgctacccctttagttctggcaaagcgcagaggagtaaataaagatgtcatccgattgctggaatctttggaagaacaggaggtgaaaggatttaacagaggaacccactcgaaactggagaccatgcaaacagctgagagtgaaagtgccatggaaagccattcactcctcaatcccaacctgcagcaaggtgaaggagtcctctccagcttccgaaccacgtggcaggagtttgtggaggatctgggcttctggagagtattgctgttgatcttcgtcattgctttgctgtctcttggcattgcttattatgtgagtggggtgctacccttcgtggaaaaccagcctgaactggtgcattaaaggagctcatggaagatgaggcaattaattgcctgtttcctggcttccaatgtttgttctcagtttctcagaatttttcttagcgcaaagcagtgagggcagtacatgttctttttgcatttttaattattgtaatccttttagataatgatgtgttcatttgaactaactacatactatgatcaagtatattgcatcctaacgctacctctgactcaacctgactttgtaggaaagcctacacgtagccttgtttgataaaaacacggaagtgactagagaatggaagataaaggaagaagctaggaagtccttgctatcaaaaccttatcctaatataggaccaattgaagtattcaaaaagaaaaacagtatcttatatgattagtttttgttggtggttttgttttcatttatttttgcaagagccactttttatttactttctctagggataagagataaaacttgaagtacttttttcaaatcttgtgtgcaaattagtattgttagcatctatttggcttattttagtatttttaagtctagtcacaaaccaaacaaaacttttgaaaatgagctatattttgttcaaagataattgatttgatcttatatttatttgtttttaggataatttttgatctttttgtaaactgctttgcttgttaatatctgtgaaaaataaatgagttcattttgttcactttccaattttcccgagtatcctagtcatcaaagataacagttcatcagaattacagtcagaaaatcctttttctactgaatagttagcagggaaaaataattctgatatttaactgtcataattctgtagtgctattatagtgaaaaactcagttctataagctagctgtgttgtcacagttttatcatagttcataattatttcatgtgcaatcctatttggaggccctgttagacttttaacaatcccatccatatctgtaattctctgatggcaagaatggatggagcatttctgagttaacagtgctggacagtatcgtactgggtgtcataaactctttatgaatggtaatattatgtaaattgaaatctggccctcaaactatattgcagctttcagcagtatgtttgaaggcctcttttgttaatgattctgtaatgtatgaattatgttcttgagtggttaaaaaagaatatgaaggcttgataattatttattgggtaaagtcaggaaattgtagtgaaagaactaatggttttgttttttggaataaaggcacctaagctattgctaattgaattgctgctagaattagaaattatgctttagaatagaattggtatttctgtgattctttttgcttcttggtattttctcttgtatctatgtatctagtattgaggcttgctctttcatgtggctttatcctctctttaatagctgttgtaaaattcctgagtaactggctgcttcaggatcagcttgcagagtcttgcttttaggttagatacaaacaaagtaaatcatagttggtgtaaatccagcaaaaaacagctggctttggaatggagaacactacaattcaaatttgaagtatattcagaagaaaactttggaattagctttacatttgtttgtaaatctaaacaaatatgcaaaattggtcaaaatgtaagtatatagcatttttaaagattaatggttccttttatgtgctgatttctttgtattctgttctctgcattcatcattcaggaataccaccaataaatgtatttatatatcccttaa

SEQ ID NO: 7560 - protein, 228 aa, Homo sapiens; identical to SEQ ID NO: 1053

SEQ ID NO: 7561 - DNA, 2696 bp, Homo sapiens
agcggggactccgactacccctgtctggcccctcccctccgcccgtcaccgcctccttgaagctgccgctgtcgctgctgctcgttcgagtcgcagatccttgccagcacattacagaatatttttgttgaaccttcttgagaattcagagaaactgctgagtgaccactgaacgaaaagatctaatcttaaggcttacgcgtgttccatccaccacatcagaacaatgtcgtatgtttttgtaaatgattcttctcagactaacgtgcccttgctgcaagcctgtattgatggggactttaattattccaagcggcttttggaaagtggctttgacccaaatattcgtgacagcaggggcagaacaggccttcaccttgcagcagctcgagggaatgtagacatctgccagttactgcataaattcggtgccgatcttctggccacagattatcaaggaaacacagctcttcacctctgtggccatgtggatactatccaatttttggtttccaatggactcaaaattgatatttgcaatcatcaaggtgctacccctttagttctggcaaagcgcagaggagtaaataaagatgtcatccgattgctggaatctttggaagaacaggaggtgaaaggatttaacagaggaacccactcgaaactggagaccatgcaaacagctgagagtgaaagtgccatggaaagccattcactcctcaatcccaacctgcagcaaggtgaaggagtcctctccagcttccgaaccacgtggcaggagtttgtggaggatctgggcttctggagagtattgctgttgatcttcgtcattgctttgctgtctcttggcattgcttattatgtgagtggggtgctacccttcgtggaaaaccagcctgaactggtgcattaaaggagctcatggaagatgaggcaattaattgcctgtttcctggcttccaatgtttgttctcagtttctcagaatttttcttagcgcaaagcagtgagggcagtacatgttctttttgcatttttaattattgtaatccttttagataatgatgtgttcatttgaactaactacatactatgatcaagtatattgcatcctaacgctacctctgactcaacctgactttgtaggaaagcctacacgtagccttgtttgataaaaacacggaagtgactagagaatggaagataaaggaagaagctaggaagtccttgctatcaaaaccttatcctaatataggaccaattgaagtattcaaaaagaaaaacagtatcttatatgattagtttttgttggtggttttgttttcatttatttttgcaagagccactttttatttactttctctagggataagagataaaacttgaagtacttttttcaaatcttgtgtgcaaattagtattgttagcatctatttggcttattttagtatttttaagtctagtcacaaaccaaacaaaacttttgaaaatgagctatattttgttcaaagataattgatttgatcttatatttatttgtttttaggataatttttgatctttttgtaaactgctttgcttgttaatatctgtgaaaaataaatgagttcattttgttcactttccaattttcccgagtatcctagtcatcaaagataacagttcatcagaattacagtcagaaaatcctttttctactgaatagttagcagggaaaaataattctgatatttaactgtcataattctgtagtgctattatagtgaaaaactcagttctataagctagctgtgttgtcacagttttatcatagttcataattatttcatgtgcaatcctatttggaggccctgttagacttttaacaatcccatccatatctgtaattctctgatggcaagaatggatggagcatttctgagttaacagtgctggacagtatcgtactgggtgtcataaactctttatgaatggtaatattatgtaaattgaaatctggccctcaaactatattgcagctttcagcagtatgtttgaaggcctcttttgttaatgattctgtaatgtatgaattatgttcttgagtggttaaaaaagaatatgaaggcttgataattatttattgggtaaagtcaggaaattgtagtgaaagaactaatggttttgttttttggaataaaggcacctaagctattgctaattgaattgctgctagaattagaaattatgctttagaatagaattggtatttctgtgattctttttgcttcttggtattttctcttgtatctatgtatctagtattgaggcttgctctttcatgtggctttatcctctctttaatagctgttgtaaaattcctgagtaactggctgcttcaggatcagcttgcagagtcttgcttttaggttagatacaaacaaagtaaatcatagttggtgtaaatccagcaaaaaacagctggctttggaatggagaacactacaattcaaatttgaagtatattcagaagaaaactttggaattagctttacatttgtttgtaaatctaaacaaatatgcaaaattggtcaaaatgtaagtatatagcatttttaaagattaatggttccttttatgtgctgatttctttgtattctgttctctgcattcatcattcaggaataccaccaataaatgtatttatatatcccttaa

SEQ ID NO: 7562 - protein, 228 aa, Homo sapiens; identical to SEQ ID NO: 1053

SEQ ID NO: 7563 - DNA, 1652 bp, Homo sapiens
ggcttccaatgtttgttctcagtttctcagaatttttcttagcgcaaagcagtgagggcagtacatgttctttttgcatttttaattattgtaatccttttagataatgatgtgttcatttgaactaactacatactatgatcaagtatattgcatcctaacgctacctctgactcaacctgactttgtaggaaagcctacacgtagccttgtttgataaaaacacggaagtgactagagaatggaagataaaggaagaagctaggaagtccttgctatcaaaaccttatcctaatataggaccaattgaagtattcaaaaagaaaaacagtatcttatatgattagtttttgttggtggttttgttttcatttatttttgcaagagccactttttatttactttctctagggataagagataaaacttgaagtacttttttcaaatcttgtgtgcaaattagtattgttagcatctatttggcttattttagtatttttaagtctagtcacaaaccaaacaaaacttttgaaaatgagctatattttgttcaaagataattgatttgatcttatatttatttgtttttaggataatttttgatctttttgtaaactgctttgcttgttaatatctgtgaaaaataaatgagttcattttgttcactttccaattttcccgagtatcctagtcatcaaagataacagttcatcagaattacagtcagaaaatcctttttctactgaatagttagcagggaaaaataattctgatatttaactgtcataattctgtagtgctattatagtgaaaaactcagttctataagctagctgtgttgtcacagttttatcatagttcataattatttcatgtgcaatcctatttggaggccctgttagacttttaacaatcccatccatatctgtaattctctgatggcaagaatggatggagcatttctgagttaacagtgctggacagtatcgtactgggtgtcataaactctttatgaatggtaatattatgtaaattgaaatctggccctcaaactatattgcagctttcagcagtatgtttgaaggcctcttttgttaatgattctgtaatgtatgaattatgttcttgagtggttaaaaaagaatatgaaggcttgataattatttattgggtaaagtcaggaaattgtagtgaaagaactaatggttttgttttttggaataaaggcacctaagctattgctaattgaattgctgctagaattagaaattatgctttagaatagaattggtatttctgtgattctttttgcttcttggtattttctcttgtatctatgatcagcttgcagagtcttgcttttaggttagatacaaacaaagtaaatcatagttggtgtaaatccagcaaaaaacagctggctttggaatggagaacactacaattcaaatttgaagtatattcagaagaaaactttggaattagctttacatttgtttgtaaatctaaacaaatatgcaaaattggtcaaaatgtaagtatatagcatttttaaagattaatggttccttttatgtgctgatttctttgtattctgttctctgcattcatcattcaggaataccaccaataaatgtatttatatatccctt

SEQ ID NO: 7564 - protein, 69 aa, Homo sapiens
MISLQSLAFRLDTNKVNHSWCKSSKKQLALEWRTLQFKFEVYSEENFGISFTFVCKSKQICKIGQNVSI

SEQ ID NO: 7565 - DNA, 1320 bp, Homo sapiens
cttttgaaggtaggaggaaaaagaagcgagtatggagtactgaaggccaagtaaagagtttttcagggagaaagtgaccaactgtgtctcctcctgctgattgacaagtcaagtaagatgaagactaggagatgaccattggatttagtaataggaaggtccttggtgaccttgcaagagcactttcaggagaatagtgaggaagaaaacctgattggtgtggtttcaagagacaacaggaggaagagcattggagactgcagtatggacagctctttggaagagtatttctacccatggcaaattccaccacaccgtcaaggctgagaatgggaagcttgtcatcaatggaaatcccatcaccatcttccaggagcaagatcctaccaaaatcaaatggggtgatgctgaagctgagtatgccgtggagtccactggcatcttcatgaccatagagaaggctggggctcacttaatgggggagccaaaagggtcatcatctctaccccctctgctgatgcccccatattcataatgggcatgatccctgagaagtctgaaaacagcctcaagatcatcagcaatgccttctgtaccaccaactgcttaatcccccggccaagcccatccatgacaactttggcattgtggaaggacttgtgaccacaatccatgctgccactcctgcccagaagactcgatggcctctgtgggaaactgtggcatatgtctgtggggctctccagaacatcatccctgcatctactggtgttgccaaggctgtgggcaaggccatccccgagctgaacaggaagctcactagcatggccttccgtgtccttctgcaaacgtgttggttgtggacctgacctgccatctggagaaacctgccaaatatgatgacatcaaaaaggtggtgaagcaggcgtcagagggcccctcaagggcatcttgggctacactgaacaccaggttgtttcctctgactttaacagtgacactcactcttccactttcgatgctggggctgccattgccctcagtgaccactttgtcaagctcatttcctcgtacaacagtgaatttggctacagcaacagggtggtggcccatatggcctccaaggagtaagactgctcgacaaccagccccagtgagagcacaagaggaagaaagagaccttcagcttctgggcagtccctgccatgctcagtcccccaccacactgggaatctcccctcttcacagtttccatgcagaccccacaaagagctctatcttgtcgtgtaccatcaataaagtcctctgtactcaaaaaaa

SEQ ID NO: 7566 - protein, 99 aa, Homo sapiens
MLGLPLPSVTTLSSSFPRTTVNLATATGWWPIWPPRSKTARQPAPVRAQEEERDLQLLGSPCHAQSPTTLGISPLHSFHADPTKSSILSCTINKVLCTQ

SEQ ID NO: 7567 - DNA, 1641 bp, Homo sapiens
gtagcactggaggtccagtaggcctggccggggccctgaggggcgagggtgcccgggcttcccacaccttccgcggcgactggagggagccgggccgaggaagcgaccgcgggtccgtgatggcttcttcgcggtctgtgtgttcacgagggccgggcagaggcctgcgagggttctcgtttgcgcttgcgggttagggctgtggtccggggaacccctgggcagcgcgggcagccctggctcgcggttaatcggggggtggagcgcggaagccacgccgcaggtccagctgctcggccggggcgagacggtgctttcgcggcgtgtgcttgcaggagcgcacagttcaggcgccgggacaagctgttggggtgtgagtgagctctccagaatggcacatggctccggggtgcccgggttaaaaggaaggatttgcacaccttccacttagggctcgggtaatcgcaaacttcctcccttaattggcttgcagtgctaaaaagcagatcgttctctctgaggttttcccaacagtacctcaagaaaataacatctgttttttgtaacgttccacggtattcggaattggctacagaacataataagtatttctacccatggcaaattccaccacaccgtcaaggctgagaatgggaagcttgtcatcaatggaaatcccatcaccatcttccaggagcaagatcctaccaaaatcaaatggggtgatgctgaagctgagtatgccgtggagtccactggcatcttcatgaccatagagaaggctggggctcacttaatgggggagccaaaagggtcatcatctctaccccctctgctgatgcccccatattcataatgggcatgatccctgagaagtctgaaaacagcctcaagatcatcagcaatgccttctgtaccaccaactgcttaatcccccggccaagcccatccatgacaactttggcattgtggaaggacttgtgaccacaatccatgctgccactcctgcccagaagactcgatggcctctgtgggaaactgtggcatatgtctgtggggctctccagaacatcatccctgcatctactggtgttgccaaggctgtgggcaaggccatccccgagctgaacaggaagctcactagcatggccttccgtgtccttctgcaaacgtgttggttgtggacctgacctgccatctggagaaacctgccaaatatgatgacatcaaaaaggtggtgaagcaggcgtcagagggcccctcaagggcatcttgggctacactgaacaccaggttgtttcctctgactttaacagtgacactcactcttccactttcgatgctggggctgccattgccctcagtgaccactttgtcaagctcatttcctcgtacaacagtgaatttggctacagcaacagggtggtggcccatatggcctccaaggagtaagactgctcgacaaccagccccagtgagagcacaagaggaagaaagagaccttcagcttctgggcagtccctgccatgctcagtcccccaccacactgggaatctcccctcttcacagtttccatgcagaccccacaaagagctctatcttgtcgtgtaccatcaataaagtcctctgtactcaaaaaaa

SEQ ID NO: 7568 - protein, 99 aa, Homo sapiens; identical to SEQ ID NO: 7566

SEQ ID NO: 7569 - DNA, 2300 bp, Homo sapiens
actgctagctgagcaaggttcgaaggaaggacctcagaaatgttctgccagcgcaaagacactggccaaaagaagaccctagacaagaaagatggaagacgaatgtcttttcagaaacctaaagggactattgagtatactgttgaatcaagggattctttgaatagcatagccctgaagtttgatacaacacctaacgaacttgttcaattaaataagttattctcccgagcagttgttactggacaggttctgtatgttcctgatcctgaatatgtctccagtgttgagagctctccatctctaagccccgtaagtcctctgtcaccaacatcatctgaggctgaatttgataagaccactaatcctgatgtccatccaacagaagcaactccctcatctactttcactggtattcgacctgcacgagttgtatcttcaacttctgaggaggaggaagcatttactgagaaatttcttaaaattaattgcaaatatattaccagtggcaagggcacagtcagtggtgtgctgctagttacaccaaataatataatgtttgatccacataaaaatgaccctttggttcaagagaatggctgtgaggaatatggcatcatgtgtccaatggaagaggtgatgtcagctgcaatgtacaaagaaattttggatagcaaaataaaggaatctttacccatagatatagatcagctatcaggaagggacttctgccattcaaagaaaatgacaggaagtaacactgaggaaatagactcaagaatccgagatgcaggtaatgatagtgccagcactgctcctaggagcactgaggagtctctttctgaagatgtgttcacagaatcagaactttcccctatacgagaggagcttgtatcttcagatgaactgcgacaagataaatcttctggtgcgtcatcagaatctgtgcaaactgtcaatcaggctgaagtagaaagtctgacagtcaaatcagaatctactggtactcctggtcacttaagatctgatactgaacattctacaaatgaagttgggactttatgtcataaaactgatttaaataatcttgaaatggccattaaggaagatcagattgcagataactttcaaggaatatcaggtcctaaagaagacagcacaagtataaaaggtaattcagaccaggattcttttcttcatgagaattcgttacaccaagaagagagtcaaaaagaaaatatgccttgtggggaaacagcagaatttaaacaaaagcaaagtgttaacaaaggaaaacaaggaaaggagcaaaatcaggactcacagacagaggcagaagagctacgcaaactttggaaaacccatactatgcaacaaactaaacagcaaagggaaaatattcaacaagtgtcacaaaaagaagctaagcataaaattacatctgctgatggacacatagaaagtaagtgttatagagtaaatgaagttagttcatccaattgtatggtgtctccgtctttcctcactgactcaaaagccgctgtaccttagggcaacctgaaggataagtgagtgacccttgaccggtgattctctggggacaagtatatacagtctccagtgtctactgtcttttcttatcccacaggtggattgtacacataatgagcatcattgctacccaccatgtttaaacattcttggctcactacatcgtatcattaaacaatttatttcttgagaaattgcacaaaagctgtataatacctttgatcactccattttctcttaaaaagtttttggtgtgttaccattaaaaatgtcttttttcatatataacattttaattgccaaagttgtaatcccatcttttataaaatgtacagttaaacctaaaagtgtacttacagaattcttccacgtatcgagaagtttcatcatcatcatctaattattttcttttaaaaacctgccctcaggacaaataaaaacactattttatctgtcagttttctggtactgtttacttctgaaaattacactattttcagtcttttatttctaatatactgtgcttctgttaataaattatgggttaaatggggtataacaactaacttagctaacatttctgatattctattagaatgtttatcccagactagtccattcacatgtgaacttttctttcattttttaaattcaaagatttttgttttgctgtaatacataaaataaaatttaccatttaactttttaaaattatggtaaaatgtaacgtaaatatattatttgaagca

SEQ ID NO: 7570 - protein, 503 aa, Homo sapiens
MFCQRKDTGQKKTLDKKDGRRMSFQKPKGTIEYTVESRDSLNSIALKFDTTPNELVQLNKLFSRAVVTGQVLYVPDPEYVSSVESSPSLSPVSPLSPTSSEAEFDKTTNPDVHPTEATPSSTFTGIRPARVVSSTSEEEEAFTEKFLKINCKYITSGKGTVSGVLLVTPNNIMFDPHKNDPLVQENGCEEYGIMCPMEEVMSAAMYKEILDSKIKESLPIDIDQLSGRDFCHSKKMTGSNTEEIDSRIRDAGNDSASTAPRSTEESLSEDVFTESELSPIREELVSSDELRQDKSSGASSESVQTVNQAEVESLTVKSESTGTPGHLRSDTEHSTNEVGTLCHKTDLNNLEMAIKEDQIADNFQGISGPKEDSTSIKGNSDQDSFLHENSLHQEESQKENMPCGETAEFKQKQSVNKGKQGKEQNQDSQTEAEELRKLWKTHTMQQTKQQRENIQQVSQKEAKHKITSADGHIESKCYRVNEVSSSNCMVSPSFLTDSKAAVP

SEQ ID NO: 7571 - DNA, 3163 bp, Homo sapiens
atgcactccaccctcttttttccccaagccaacacacacccttcaaactttttgacagttattttcagacccctcctaggctcccgaactccatgcaactccagcagtctcccctgggccatttttagcctctgctctgacctggcgggaggctgggtgtccaccctttcccctgcagtcctgaaagtccggtccgagcgcggacggggcggggaggggctgggcgggccaggccagctccattggcgccaggcgggtgggggaatgcgctgagaggacccgtccagcttgcttaaaagccatcagttttctgaccccgcatcggttccaggaagaatacacctatgtgacaagctaagttctgcctcattttgcatttagaagccacaagaaaaacttttcgaaaacttttgtccgtcttttgctcccccgacgcgtggtttcctgatggtccgtccccgggcagagagagggacgccccctcctcctccccgcctcttgtgaggcgcgcggagccgcctcccctgggtcaggtctgatgggccggtgggcgcgctagtggtggccgccaccgccgaaaccgtcgacctcctgggccccagttccgcgtccagccccgcggcagcatggactacctgacgacgttcaccgagaagagtgggcgccttctgcggggcacggccaaccgcctgttggggttcgggggcggcggcgaagcccggcaggtgcgcttcgaagattacctgagggagccagcccagggggacctcgggtgcgggtccccgccccaccggcccccggcgccgtccagcccggagggacctgattactacaagggaagacataaattcaaagcaggttgctacagtgaaagcagacctggagtctgaatcttttcgaccaaacctaagtgatcccagtgaacttttactgccagatcaaattgaaaagcttaccaagcatcttccaccaagaacaattggctatccatggactcttgtttatggtactggaaaacatggcacaagcttgaaaactctttatcgaacaatgacaggtttagacaccccagtgctgatggtgattaaagacagtgatggacaggtttttggtgcgttagcatctgagccactgaaagtgagtgatggcttttatggtactggagagacctttgtttttacattctgtccggagtttgaggtctttaagtggacaggagataatatgttttttatcaaaggagacatggattcactagctttcggtggtggaggaggagaatttgcgctttggcttgatggagatctctaccatggaagaagccattcttgtaaaacgtttgggaatcgtacactttctaagaaggaagatttctttatccaagatattgaaatctgggcttttgaataaataaaatgctctctgtcttagcaggagaatggcccaaacctgacatggacaagcattgtttggaaagttcaagaagcaatacagtgtaacatgtcacttgtgctttaaaattagtctgtatcaccatttattacagttataattttggagtttatttttcaaatcatgttcttgtcccagagttctttaggttaacactagggactgcgtccatgtactagtataacagcttgggtttgttagaatttgggcaacattttgattataatgacaacttcattttcacatgttactcagttccctaataggatggtgctcttttgttgaacctgtattgatttttttttttttaactatattgattcgtttactagaacagtctaattggggcattgaggaaatgaagactggatacttctgtatctgtgaagttggcacaggtaacatttggacatgttcatcttattcttaggaaggaaaaaatcacttgccaaaataatacatacttcatagaccactgagttctagtttttattcacactacaacattctctttaacgatgttgcaggtattctcaatttccttttaagaaaaatgaaatgtgaggagaattctggttgtaatagatgacagtacatatgatctgcaggtttgggcatatgctttcatcattaaattatctgataaagttacaagtcacaaaggagaatgagaacttaatgattctattggatttaatatattagcaagaaaacatactatttacatatgtgtagcttagtaaggcattaacataagtacaaaaactatgaaacagatgcatatttcctcaacatactgtgtcaggtatactgttttataatttggttgttttagccttattgcacaccaactcccaaaatataggttactcttgttcaaaaggaaaaaaaaaattgtgattttctttgagtggtatatgttattaattaccattagcatttgctcttataaagggcaatgattatagtagacaatattgtaactcagtagacttgttgaatatgcaaacttactgtcaagtgacctcaaaaaaaaaatgaaaagatagaatacactagtagttcttatcctcttttgtaggaaaccaataatagccattgtggcaataattcatcagttgattttaaagcttcatgttatgcaaaaaagaatcctgctgttatacatgtgacagtgactttgtgctgaaatttcagctattccagataaacattgtatatcttgtaaattaatgtttaaaggtgtagttttgttcttacagaaagtgttgattgccaggttgcttatagcactttaagttattctaaaaatgaaattataagccaaatatttggcttaagtagatttagttgtatagcacttacatatttagttcttttgaaagtttagataattatttaaagaaagcataatgctaatggaaaagaaaatctgatgttctattataatatgctattgctgaatatgaatagaaatacagggcatcatttccttgtctcattataagttagtaacaatatatagattaaatgtttacaatatagggaattgtaaataaatatatcagtttttttccccttcggtcttccacagcagtattattgtctttgtggagttgactaatgataatttaaaaatcctgtaatggatttctactaaaataaggtcatagtggcatataccaaataaaatcaaatacagaaatacaaa

SEQ ID NO: 7572 - protein, 119 aa, Homo sapiens
MTGLDTPVLMVIKDSDGQVFGALASEPLKVSDGFYGTGETFVFTFCPEFEVFKWTGDNMFFIKGDMDSLAFGGGGGEFALWLDGDLYHGRSHSCKTFGNRTLSKKEDFFIQDIEIWAFE

SEQ ID NO: 7573 - DNA, 1486 bp, Homo sapiens
agagggacgccccctcctcctccccgcctcttgtgaggcgcgcggagccgcctcccctgggtcaggtctgatgggccggtgggcgcgctagtggtggccgccaccgccgaaaccgtcgacctcctgggccccagttccgcgtccagccccgcggcagcatggactacctgacgacgttcaccgagaagagtgggcgccttctgcggggcacggccaaccgcctgttggggttcgggggcggcggcgaagcccggcagacactggccaaaagaagaccctagacaagaaagatggaagacgaatgtcttttcagaaacctaaagggactattgagtatactgttgaatcaagggattctttgaatagcatagccctgaagtttgatacaacacctaacgaacttgttcaattaaataagttattctcccgagcagttgttactggacaggttctgtatgttcctgatcctgaatatgtctccagtgttgagagctctccatctctaagccccgtaagtcctctgtcaccaacatcatctgaggctgaatttgataagaccactaatcctgatgtccatccaacagaagcaactccctcatctactttcactggtattcgacctgcacgagttgtatcttcaacttctgaggaggaggaagcatttactgagaaatttcttaaaattaattgcaaatatattaccagtggcaagggcacagtcagtggtgtgctgctagttacaccaaataatataatgtttgatccacataaaaatgaccctttggttcaagagaatggctgtgaggaatatggcatcatgtgtccaatggaagaggtgatgtcagctgcaatgtacaaagaaattttggatagcaaaataaaggaatctttacccatagatatagatcagctatcaggaagggacttctgccattcaaagaaaatgacaggaagtaacactgaggaaatagactcaagaatccgagatgcaggtaatgatagtgccagcactgctcctaggagcactgaggagtctctttctgaagatgtgttcacagaatcagaactttcccctatacgagaggagcttgtatcttcagatgaactgcgacaagataaatcttctggtgcgtcatcagaatctgtgcaaactgtcaatcaggctgaagtagaaagtctgacagtcaaatcagaatctactggtactcctggtcacttaagatctgatactgaacattctacaaatgaagttgggactttatgtcataaaactgatttaaataatcttgaaatggccattaaggaagatcagattgcagataactttcaaggaatatcaggtcctaaagaagacagcacaagtataaaaggtaattcagaccaggattcttttcttcatgagaattcgttacaccaagaagagagtcaaaaagaaaatatgccttgtggggaaacagcagaatttaaacaaaagcaaagtgttaac

SEQ ID NO: 7574 - protein, 394 aa, Homo sapiens
MSFQKPKGTIEYTVESRDSLNSIALKFDTTPNELVQLNKLFSRAVVTGQVLYVPDPEYVSSVESSPSLSPVSPLSPTSSEAEFDKTTNPDVHPTEATPSSTFTGIRPARVVSSTSEEEEAFTEKFLKINCKYITSGKGTVSGVLLVTPNNIMFDPHKNDPLVQENGCEEYGIMCPMEEVMSAAMYKEILDSKIKESLPIDIDQLSGRDFCHSKKMTGSNTEEIDSRIRDAGNDSASTAPRSTEESLSEDVFTESELSPIREELVSSDELRQDKSSGASSESVQTVNQAEVESLTVKSESTGTPGHLRSDTEHSTNEVGTLCHKTDLNNLEMAIKEDQIADNFQGISGPKEDSTSIKGNSDQDSFLHENSLHQEESQKENMPCGETAEFKQKQSV

SEQ ID NO: 7575 - DNA, 3173 bp, Homo sapiens
gcctcttgtgaggcgcgcggagccgcctcccctgggtcaggtctgatgggccggtgggcgcgctagtggtggccgccaccgccgaaaccgtcgacctcctgggccccagttccgcgtccagccccgcggcagcatggactacctgacgacgttcaccgagaagagtgggcgccttctgcggggcacggccaaccgcctgttggggttcgggggcggcggcgaagcccggcaggtgcgcttcgaagattacctgagggagccagcccagggggacctcgggtgcgggtccccgccccaccggcccccggcgccgtccagcccggagggacctgacactggccaaaagaagaccctagacaagaaagatggaagacgaatgtcttttcagaaacctaaagggactattgagtatactgttgaatcaagggattctttgaatagcatagccctgaagtttgatacaacacctaacgaacttgttcaattaaataagttattctcccgagcagttgttactggacaggttctgtatgttcctgatcctgaatatgtctccagtgttgagagctctccatctctaagccccgtaagtcctctgtcaccaacatcatctgaggctgaatttgataagaccactaatcctgatgtccatccaacagaagcaactccctcatctactttcactggtattcgacctgcacgagttgtatcttcaacttctgaggaggaggaagcatttactgagaaatttcttaaaattaattgcaaatatattaccagtggcaagggcacagtcagtggtgtgctgctagttacaccaaataatataatgtttgatccacataaaaatgaccctttggttcaagagaatggctgtgaggaatatggcatcatgtgtccaatggaagaggtgatgtcagctgcaatgtacaaagaaattttggatagcaaaataaaggaatctttacccatagatatagatcagctatcaggaagggacttctgccattcaaagaaaatgacaggaagtaacactgaggaaatagactcaagaatccgagatgcaggtaatgatagtgccagcactgctcctaggagcactgaggagtctctttctgaagatgtgttcacagaatcagaactttcccctatacgagaggagcttgtatcttcagatgaactgcgacaagataaatcttctggtgcgtcatcagaatctgtgcaaactgtcaatcaggctgaagtagaaagtctgacagtcaaatcagaatctactggtactcctggtcacttaagatctgatactgaacattctacaaatgaagttgggactttatgtcataaaactgatttaaataatcttgaaatggccattaaggaagatcagattgcagataactttcaaggaatatcaggtcctaaagaagacagcacaagtataaaaggtaattcagaccaggattcttttcttcatgagaattcgttacaccaagaagagagtcaaaaagaaaatatgccttgtggggaaacagcagaatttaaacaaaagcaaagtgttaacaaaggaaaacaaggaaaggagcaaaatcaggactcacagacagaggcagaagagctacgcaaactttggaaaacccatactatgcaacaaactaaacagcaaagggaaaatattcaacaagtgtcacaaaaagaagctaagcataaaattacatctgctgatggacacatagaaagttctgcacttttaaaagaaaagcaaaggcatcgattacataagttcttgtgtctcagagttggaaaaccaatgaggaaaacgtttgtatctcaagcaagtgctacaatgcaacagtatgcacagagagataagaaacatgaatattggtttgctgtgccacaagaaaggacagatcacttgtatgccttcttcattcagtggagtccagaaatatatgcagaagatactggcgaatataccagagaacctggatttatagtagtaaaaaagattgaggagtctgaaacaattgaggattctagtaatcaagcagcagccagagaatgggagattactacaagggaagacataaattcaaagcaggttgctacagtgaaagcagacctggagtctgaatcttttcgaccaaacctaagtgatcccagtgaacttttactgccagatcaaattgaaaagcttaccaagcatcttccaccaagaacaattggctatccatggactcttgtttatggtactggaaaacatggcacaagcttgaaaactctttatcgaacaatgacaggtttagacaccccagtgctgatggtgattaaagacagtgatggacaggtttttggtgcgttagcatctgagccactgaaagtgagtgatggcttttatggtactggagagacctttgtttttacattctgtccggagtttgaggtctttaagtggacaggagataatatgttttttatcaaaggagacatggattcactagctttcggtggtggaggaggagaatttgcgctttggcttgatggagatctctaccatggaagaagccattcttgtaaaacgtttgggaatcgtacactttctaagaaggaagatttctttatccaagatattgaaatctgggcttttgaataaataaaatgctctctgtcttagcaggagaatggcccaaacctgacatggacaagcattgtttggaaagttcaagaagcaatacagtgtaacatgtcacttgtgctttaaaattagtctgtatcaccatttattacagttataattttggagtttatttttcaaatcatgttcttgtcccagagttctttaggttaacactagggactgcgtccatgtactagtataacagcttgggtttgttagaatttgggcaacattttgattataatgacaacttcattttcacatgttactcagttccctaataggatggtgctcttttgttgaacctgtattgatttttttttttttaactatattgattcgtttactagaacagtctaattggggcattgaggaaatgaagactggatacttctgtatctgtgaagttggcacaggtaacatttggacatgttcatcttattcttaggaaggaaaaaatcacttgccaaaataatacatacttcatagaccactg

SEQ ID NO: 7576 - protein, 839 aa, Homo sapiens
MDYLTTFTEKSGRLLRGTANRLLGFGGGGEARQVRFEDYLREPAQGDLGCGSPPHRPPAPSSPEGPDTGQKKTLDKKDGRRMSFQKPKGTIEYTVESRDSLNSIALKFDTTPNELVQLNKLFSRAVVTGQVLYVPDPEYVSSVESSPSLSPVSPLSPTSSEAEFDKTTNPDVHPTEATPSSTFTGIRPARVVSSTSEEEEAFTEKFLKINCKYITSGKGTVSGVLLVTPNNIMFDPHKNDPLVQENGCEEYGIMCPMEEVMSAAMYKEILDSKIKESLPIDIDQLSGRDFCHSKKMTGSNTEEIDSRIRDAGNDSASTAPRSTEESLSEDVFTESELSPIREELVSSDELRQDKSSGASSESVQTVNQAEVESLTVKSESTGTPGHLRSDTEHSTNEVGTLCHKTDLNNLEMAIKEDQIADNFQGISGPKEDSTSIKGNSDQDSFLHENSLHQEESQKENMPCGETAEFKQKQSVNKGKQGKEQNQDSQTEAEELRKLWKTHTMQQTKQQRENIQQVSQKEAKHKITSADGHIESSALLKEKQRHRLHKFLCLRVGKPMRKTFVSQASATMQQYAQRDKKHEYWFAVPQERTDHLYAFFIQWSPEIYAEDTGEYTREPGFIVVKKIEESETIEDSSNQAAAREWEITTREDINSKQVATVKADLESESFRPNLSDPSELLLPDQIEKLTKHLPPRTIGYPWTLVYGTGKHGTSLKTLYRTMTGLDTPVLMVIKDSDGQVFGALASEPLKVSDGFYGTGETFVFTFCPEFEVFKWTGDNMFFIKGDMDSLAFGGGGGEFALWLDGDLYHGRSHSCKTFGNRTLSKKEDFFIQDIEIWAFE

SEQ ID NO: 7577 - DNA, 3352 bp, Homo sapiens
gcctcttgtgaggcgcgcggagccgcctcccctgggtcaggtctgatgggccggtgggcgcgctagtggtggccgccaccgccgaaaccgtcgacctcctgggccccagttccgcgtccagccccgcggcagcatggactacctgacgacgttcaccgagaagagtgggcgccttctgcggggcacggccaaccgcctgttggggttcgggggcggcggcgaagcccggcaggtgcgcttcgaagattacctgagggagccagcccagggggacctcgggtgcgggtccccgccccaccggcccccggcgccgtccagcccggagggacctgacactggccaaaagaagaccctagacaagaaagatggaagacgaatgtcttttcagaaacctaaagggactattgagtatactgttgaatcaagggattctttgaatagcatagccctgaagtttgatacaacacctaacgaacttgttcaattaaataagttattctcccgagcagttgttactggacaggttctgtatgttcctgatcctgaatatgtctccagtgttgagagctctccatctctaagccccgtaagtcctctgtcaccaacatcatctgaggctgaatttgataagaccactaatcctgatgtccatccaacagaagcaactccctcatctactttcactggtattcgacctgcacgagttgtatcttcaacttctgaggaggaggaagcatttactgagaaatttcttaaaattaattgcaaatatattaccagtggcaagggcacagtcagtggtgtgctgctagttacaccaaataatataatgtttgatccacataaaaatgaccctttggttcaagagaatggctgtgaggaatatggcatcatgtgtccaatggaagaggtgatgtcagctgcaatgtacaaagaaattttggatagcaaaataaaggaatctttacccatagatatagatcagctatcaggaagggacttctgccattcaaagaaaatgacaggaagtaacactgaggaaatagactcaagaatccgagatgcaggtaatgatagtgccagcactgctcctaggagcactgaggagtctctttctgaagatgtgttcacagaatcagaactttcccctatacgagaggagcttgtatcttcagatgaactgcgacaagataaatcttctggtgcgtcatcagaatctgtgcaaactgtcaatcaggctgaagtagaaagtctgacagtcaaatcagaatctactggtactcctggtcacttaagatctgatactgaacattctacaaatgaagttgggactttatgtcataaaactgatttaaataatcttgaaatggccattaaggaagatcagattgcagataactttcaaggaatatcaggtcctaaagaagacagcacaagtataaaaggtaattcagaccaggattcttttcttcatgagaattcgttacaccaagaagagagtcaaaaagaaaatatgccttgtggggaaacagcagaatttaaacaaaagcaaagtgttaacaaaggaaaacaaggaaaggagcaaaatcaggactcacagacagaggcagaagagctacgcaaactttggaaaacccatactatgcaacaaactaaacagcaaagggaaaatattcaacaagtgtcacaaaaagaagctaagcataaaattacatctgctgatggacacatagaaagttctgcacttttaaaagaaaagcaaaggcatcgattacataagttcttgtgtctcagagttggaaaaccaatgaggaaaacgtttgtatctcaagcaagtgctacaatgcaacagtatgcacagagagataagaaacatgaatattggtttgctgtgccacaagaaaggacagatcacttgtatgccttcttcattcagtggagtccagaaatatatgcagaagatactggcgaatataccagagaacctggatttatagtagtaaaaaagattgaggagtctgaaacaattgaggattctagtaatcaagcagcagccagagaatgggagattactacaagggaagacataaattcaaagcaggttgctacagtgaaagcagacctggagtctgaatcttttcgaccaaacctaagtgatcccagtgaacttttactgccagatcaaattgaaaagcttaccaagcatcttccaccaagaacaattggctatccatggactcttgtttatggtactggaaaacatggcacaagcttgaaaactctttatcgaacaatgacaggtttagacaccccagtgctgatggtgattaaagacagtgatggacaggtttttggtgcgttagcatctgagccactgaaagtgagtgatggcttttatggtactggagagacctttgtttttacattctgtccggagtttgaggtctttaagtggacaggagataatatgttttttatcaaaggagacatggattcactagctttcggtggtggaggaggagaatttgcgctttggcttgatggagatctctaccatggaagaagccattcttgtaaaacgtttgggaatcgtacactttctaagaaggaagatttctttatccaagatattgaaatctgggcttttgaataaataaaatgctctctgtcttagcaggagaatggcccaaacctgacatggacaagcattgtttggaaagttcaagaagcaatacagtgtaacatgtcacttgtgctttaaaattagtctgtatcaccatttattacagttataattttggagtttatttttcaaatcatgttcttgtcccagagttctttaggttaacactagggactgcgtccatgtactagtataacagcttgggtttgttagaatttgggcaacattttgattataatgacaacttcattttcacatgttactcagttccctaataggatggtgctcttttgttgaacctgtattgatttttttttttttaactatattgattcgtttactagaacagtctaattggggcattgaggaaatgaagactggatacttctgtatctgtgaagttggcacaggtaacatttggacatgttcatcttattcttaggaaggaaaaaatcacttgccaaaataatacatacttcatagaccactgagttctagtttttattcacactacaacattctctttaacgatgttgcaggtattctcaatttccttttaagaaaaatgaaatgtgaggagaattctggttgtaatagatgacagtacatatgatctgcaggtttgggcatatgctttcatcattaaattatctgataaagttacaagtc

SEQ ID NO: 7578 - protein, 839 aa, Homo sapiens; identical to SEQ ID NO: 7576

SEQ ID NO: 7579 - DNA, 572 bp, Homo sapiens
cggcagctgcagccattgccttgagtgagtgtgccgctctccagcccgtttgaacgctccccgcagccaccgccacccattggaatggccaacaggggacctgcattatggcctgagccaggaggtgcagcagaagattgagaaacagtatgatgcagatctggagcagatcctgatccagtggatcaccacccagtgccgaaaggatgtgggccggtcccagcctggacgcgagaacttccagaactggctcaaggatggcacggtgttatgtgagctcaataatgcactgtaccccaaggggcaggtcccagtaaagaagatccaggcctccaccatggccttcaagcagatggagaagatctctcagttcctgcaagcagctgagcgctatggcattaacaccactgacatcttccaaactgtggacctctgggaaggaaagaacatggcctgtgtgcagcggacgaccagatcctttgatcccaccccaggccttgcccctgccctcccacgagtggttaatatacatgtagatatatattttagcagtgacattcccagagagcccc

SEQ ID NO: 7580 - protein, 77 aa, Homo sapiens
MAFKQMEKISQFLQAAERYGINTTDIFQTVDLWEGKNMACVQRTTRSFDPTPGLAPALPRVVNIHVDIYFSSDIPRE

SEQ ID NO: 7581 - DNA, 522 bp, Homo sapiens
agctataacatttccattaaaaatctttatctaggccaggcgtggtggctcacacctgtaatcccagcattttgggaggtcaaggcaagcagattacctgaggtcaggagttcgagaccagcctggccaatatggtgaaatcccatctctattaaaaatacaaaaattaggccaggtgcggtggctcatgcgtgtaatcccagcactttgggaggccgaggcaggtggatcatgaggtcaggagatcgagaccatcctcgctaacacggtgaaaccccgtctctactaaaaatataaaataaaatacaatagccaggtgtggtggtggatgcctgtagtcccagctcccaaagcactgggattacagccacctcacctggcataaaataataaatagtgagtagggtaaattatatattatagcttctatcataccattcccaactcaaataggaagagatataaggtaatttaataacttcagttcgaataaagtaaaggaaaaggattattaaattgaat

SEQ ID NO: 7582 - protein, 45 aa, Homo sapiens
SYNISIKNLYLGQAWWLTPVIPAFWEVKASRLPEVRSSRPAWPIW

SEQ ID NO: 7583 - DNA, 1374 bp, Homo sapiens
gcaaactgttttgtcactgtagtaaggctctagtgctggaaatttatctttgacagaggaagaatgcttttgaaaacagttcttacgtgattttatgtaacttaatttgccctggaaaggaaatgtctcgtctctggtatgggaaaaaagggagaagacatcaaccaattaatcataaatacactctggtagtgtcagtggctgagtatcaccgcaggatcgatgctctaaatactgaagaactgcgcacactctgcagacgcctccagattactacaagggaagacataaattcaaagcaggttgctacagtgaaagcagacctggagtctgaatcttttcgaccaaacctaagtgatcccagtgaacttttactgccagatcaaattgaaaagcttaccaagcatcttccaccaagaacaattggctatccatggactcttgtttatggtactggaaaacatggcacaagcttgaaaactctttatcgaacaatgacaggtttagacaccccagtgctgatggtgattaaagacagtgatggacaggtttttggtgcgttagcatctgagccactgaaagtgagtgatggcttttatggtactggagagacctttgtttttacattctgtccggagtttgaggtctttaagtggacaggagataatatgttttttatcaaaggagacatggattcactagctttcggtggtggaggaggagaatttgcgctttggcttgatggagatctctaccatggaagaagccattcttgtaaaacgtttgggaatcgtacactttctaagaaggaagatttctttatccaagatattgaaatctgggcttttgaataaataaaatgctctctgtcttagcaggagaatggcccaaacctgacatggacaagcattgtttggaaagttcaagaagcaatacagtgtaacatgtcacttgtgctttaaaattagtctgtatcaccatttattacagttataattttggagtttatttttcaaatcatgttcttgtcccagagttctttaggttaacactagggactgcgtccatgtactagtataacagcttgggtttgttagaatttgggcaacattttgattataatgacaacttcattttcacatgttactcagttccctaataggatggtgctcttttgttgaacctgtattgatttttttttttttaactatattgattcgtttactagaacagtctaattggggcattgaggaaatgaagactggatacttctgtatctgtgaagttggcacaggtaacatttggacatgttcatcttattcttaggaaggaaaaaatcacttgccaaaataatacatacttcatagaccactg

SEQ ID NO: 7584 - protein, 243 aa, Homo sapiens
MSRLWYGKKGRRHQPINHKYTLVVSVAEYHRRIDALNTEELRTLCRRLQITTREDINSKQVATVKADLESESFRPNLSDPSELLLPDQIEKLTKHLPPRTIGYPWTLVYGTGKHGTSLKTLYRTMTGLDTPVLMVIKDSDGQVFGALASEPLKVSDGFYGTGETFVFTFCPEFEVFKWTGDNMFFIKGDMDSLAFGGGGGEFALWLDGDLYHGRSHSCKTFGNRTLSKKEDFFIQDIEIWAFE

SEQ ID NO: 7585 - DNA, 1293 bp, Homo sapiens
gcaaactgttttgtcactgtagtaaggctctagtgctggaaatttatctttgacagaggaagaatgcttttgaaaacagttcttacgtgattttatgtaacttaatttgccctggaaaggaaatgtctcgtctctggtatgggaaaaaagggagaagacatcaaccaattaatcataaatacactctgattactacaagggaagacataaattcaaagcaggttgctacagtgaaagcagacctggagtctgaatcttttcgaccaaacctaagtgatcccagtgaacttttactgccagatcaaattgaaaagcttaccaagcatcttccaccaagaacaattggctatccatggactcttgtttatggtactggaaaacatggcacaagcttgaaaactctttatcgaacaatgacaggtttagacaccccagtgctgatggtgattaaagacagtgatggacaggtttttggtgcgttagcatctgagccactgaaagtgagtgatggcttttatggtactggagagacctttgtttttacattctgtccggagtttgaggtctttaagtggacaggagataatatgttttttatcaaaggagacatggattcactagctttcggtggtggaggaggagaatttgcgctttggcttgatggagatctctaccatggaagaagccattcttgtaaaacgtttgggaatcgtacactttctaagaaggaagatttctttatccaagatattgaaatctgggcttttgaataaataaaatgctctctgtcttagcaggagaatggcccaaacctgacatggacaagcattgtttggaaagttcaagaagcaatacagtgtaacatgtcacttgtgctttaaaattagtctgtatcaccatttattacagttataattttggagtttatttttcaaatcatgttcttgtcccagagttctttaggttaacactagggactgcgtccatgtactagtataacagcttgggtttgttagaatttgggcaacattttgattataatgacaacttcattttcacatgttactcagttccctaataggatggtgctcttttgttgaacctgtattgatttttttttttttaactatattgattcgtttactagaacagtctaattggggcattgaggaaatgaagactggatacttctgtatctgtgaagttggcacaggtaacatttggacatgttcatcttattcttaggaaggaaaaaatcacttgccaaaataatacatacttcatagaccactg

SEQ ID NO: 7586 - protein, 216 aa, Homo sapiens
MSRLWYGKKGRRHQPINHKYTLITTREDINSKQVATVKADLESESFRPNLSDPSELLLPDQIEKLTKHLPPRTIGYPWTLVYGTGKHGTSLKTLYRTMTGLDTPVLMVIKDSDGQVFGALASEPLKVSDGFYGTGETFVFTFCPEFEVFKWTGDNMFFIKGDMDSLAFGGGGGEFALWLDGDLYHGRSHSCKTFGNRTLSKKEDFFIQDIEIWAFE

SEQ ID NO: 7587 - DNA, 1472 bp, Homo sapiens
gcaaactgttttgtcactgtagtaaggctctagtgctggaaatttatctttgacagaggaagaatgcttttgaaaacagttcttacgtgattttatgtaacttaatttgccctggaaaggaaatgtctcgtctctggtatgggaaaaaagggagaagacatcaaccaattaatcataaatacactctgattactacaagggaagacataaattcaaagcaggttgctacagtgaaagcagacctggagtctgaatcttttcgaccaaacctaagtgatcccagtgaacttttactgccagatcaaattgaaaagcttaccaagcatcttccaccaagaacaattggctatccatggactcttgtttatggtactggaaaacatggcacaagcttgaaaactctttatcgaacaatgacaggtttagacaccccagtgctgatggtgattaaagacagtgatggacaggtttttggtgcgttagcatctgagccactgaaagtgagtgatggcttttatggtactggagagacctttgtttttacattctgtccggagtttgaggtctttaagtggacaggagataatatgttttttatcaaaggagacatggattcactagctttcggtggtggaggaggagaatttgcgctttggcttgatggagatctctaccatggaagaagccattcttgtaaaacgtttgggaatcgtacactttctaagaaggaagatttctttatccaagatattgaaatctgggcttttgaataaataaaatgctctctgtcttagcaggagaatggcccaaacctgacatggacaagcattgtttggaaagttcaagaagcaatacagtgtaacatgtcacttgtgctttaaaattagtctgtatcaccatttattacagttataattttggagtttatttttcaaatcatgttcttgtcccagagttctttaggttaacactagggactgcgtccatgtactagtataacagcttgggtttgttagaatttgggcaacattttgattataatgacaacttcattttcacatgttactcagttccctaataggatggtgctcttttgttgaacctgtattgatttttttttttttaactatattgattcgtttactagaacagtctaattggggcattgaggaaatgaagactggatacttctgtatctgtgaagttggcacaggtaacatttggacatgttcatcttattcttaggaaggaaaaaatcacttgccaaaataatacatacttcatagaccactgagttctagtttttattcacactacaacattctctttaacgatgttgcaggtattctcaatttccttttaagaaaaatgaaatgtgaggagaattctggttgtaatagatgacagtacatatgatctgcaggtttgggcatatgctttcatcattaaattatctgataaagttacaagtc

SEQ ID NO: 7588 - protein, 216 aa, Homo sapiens; identical to SEQ ID NO: 7586

SEQ ID NO: 7589 - DNA, 1553 bp, Homo sapiens
gcaaactgttttgtcactgtagtaaggctctagtgctggaaatttatctttgacagaggaagaatgcttttgaaaacagttcttacgtgattttatgtaacttaatttgccctggaaaggaaatgtctcgtctctggtatgggaaaaaagggagaagacatcaaccaattaatcataaatacactctggtagtgtcagtggctgagtatcaccgcaggatcgatgctctaaatactgaagaactgcgcacactctgcagacgcctccagattactacaagggaagacataaattcaaagcaggttgctacagtgaaagcagacctggagtctgaatcttttcgaccaaacctaagtgatcccagtgaacttttactgccagatcaaattgaaaagcttaccaagcatcttccaccaagaacaattggctatccatggactcttgtttatggtactggaaaacatggcacaagcttgaaaactctttatcgaacaatgacaggtttagacaccccagtgctgatggtgattaaagacagtgatggacaggtttttggtgcgttagcatctgagccactgaaagtgagtgatggcttttatggtactggagagacctttgtttttacattctgtccggagtttgaggtctttaagtggacaggagataatatgttttttatcaaaggagacatggattcactagctttcggtggtggaggaggagaatttgcgctttggcttgatggagatctctaccatggaagaagccattcttgtaaaacgtttgggaatcgtacactttctaagaaggaagatttctttatccaagatattgaaatctgggcttttgaataaataaaatgctctctgtcttagcaggagaatggcccaaacctgacatggacaagcattgtttggaaagttcaagaagcaatacagtgtaacatgtcacttgtgctttaaaattagtctgtatcaccatttattacagttataattttggagtttatttttcaaatcatgttcttgtcccagagttctttaggttaacactagggactgcgtccatgtactagtataacagcttgggtttgttagaatttgggcaacattttgattataatgacaacttcattttcacatgttactcagttccctaataggatggtgctcttttgttgaacctgtattgatttttttttttttaactatattgattcgtttactagaacagtctaattggggcattgaggaaatgaagactggatacttctgtatctgtgaagttggcacaggtaacatttggacatgttcatcttattcttaggaaggaaaaaatcacttgccaaaataatacatacttcatagaccactgagttctagtttttattcacactacaacattctctttaacgatgttgcaggtattctcaatttccttttaagaaaaatgaaatgtgaggagaattctggttgtaatagatgacagtacatatgatctgcaggtttgggcatatgctttcatcattaaattatctgataaagttacaagtc

SEQ ID NO: 7590 - protein, 243 aa, Homo sapiens; identical to SEQ ID NO: 7584

SEQ ID NO: 7591 - DNA, 2526 bp, Homo sapiens
gcaaactgttttgtcactgtagtaaggctctagtgctggaaatttatctttgacagaggaagaatgcttttgaaaacagttcttacgtgattttatgtaacttaatttgccctggaaaggaaatgtctcgtctctggtatgggaaaaaagggagaagacatcaaccaattaatcataaatacactctgattactacaagggaagacataaattcaaagcaggttgctacagtgaaagcagacctggagtctgaatcttttcgaccaaacctaagtgatcccagtgaacttttactgccagatcaaattgaaaagcttaccaagcatcttccaccaagaacaattggctatccatggactcttgtttatggtactggaaaacatggcacaagcttgaaaactctttatcgaacaatgacaggtttagacaccccagtgctgatggtgattaaagacagtgatggacaggtttttggtgcgttagcatctgagccactgaaagtgagtgatggcttttatggtactggagagacctttgtttttacattctgtccggagtttgaggtctttaagtggacaggagataatatgttttttatcaaaggagacatggattcactagctttcggtggtggaggaggagaatttgcgctttggcttgatggagatctctaccatggaagaagccattcttgtaaaacgtttgggaatcgtacactttctaagaaggaagatttctttatccaagatattgaaatctgggcttttgaataaataaaatgctctctgtcttagcaggagaatggcccaaacctgacatggacaagcattgtttggaaagttcaagaagcaatacagtgtaacatgtcacttgtgctttaaaattagtctgtatcaccatttattacagttataattttggagtttatttttcaaatcatgttcttgtcccagagttctttaggttaacactagggactgcgtccatgtactagtataacagcttgggtttgttagaatttgggcaacattttgattataatgacaacttcattttcacatgttactcagttccctaataggatggtgctcttttgttgaacctgtattgatttttttttttttaactatattgattcgtttactagaacagtctaattggggcattgaggaaatgaagactggatacttctgtatctgtgaagttggcacaggtaacatttggacatgttcatcttattcttaggaaggaaaaaatcacttgccaaaataatacatacttcatagaccactgagttctagtttttattcacactacaacattctctttaacgatgttgcaggtattctcaatttccttttaagaaaaatgaaatgtgaggagaattctggttgtaatagatgacagtacatatgatctgcaggtttgggcatatgctttcatcattaaattatctgataaagttacaagtcacaaaggagaatgagaacttaatgattctattggatttaatatattagcaagaaaacatactatttacatatgtgtagcttagtaaggcattaacataagtacaaaaactatgaaacagatgcatatttcctcaacatactgtgtcaggtatactgttttataatttggttgttttagccttattgcacaccaactcccaaaatataggttactcttgttcaaaaggaaaaaaaaaattgtgattttctttgagtggtatatgttattaattaccattagcatttgctcttataaagggcaatgattatagtagacaatattgtaactcagtagacttgttgaatatgcaaacttactgtcaagtgacctcaaaaaaaaaatgaaaagatagaatacactagtagttcttatcctcttttgtaggaaaccaataatagccattgtggcaataattcatcagttgattttaaagcttcatgttatgcaaaaaagaatcctgctgttatacatgtgacagtgactttgtgctgaaatttcagctattccagataaacattgtatatcttgtaaattaatgtttaaaggtgtagttttgttcttacagaaagtgttgattgccaggttgcttatagcactttaagttattctaaaaatgaaattataagccaaatatttggcttaagtagatttagttgtatagcacttacatatttagttcttttgaaagtttagataattatttaaagaaagcataatgctaatggaaaagaaaatctgatgttctattataatatgctattgctgaatatgaatagaaatacagggcatcatttccttgtctcattataagttagtaacaatatatagattaaatgtttacaatatagggaattgtaaataaatatatcagtttttttccccttcggtcttccacagcagtattattgtctttgtggagttgactaatgataatttaaaaatcctgtaatggatttctactaaaataaggtcatagtggcatataccaaataaaatcaaatacagaaatacaaa

SEQ ID NO: 7592 - protein, 216 aa, Homo sapiens; identical to SEQ ID NO: 7586

SEQ ID NO: 7593 - DNA, 2607 bp, Homo sapiens
gcaaactgttttgtcactgtagtaaggctctagtgctggaaatttatctttgacagaggaagaatgcttttgaaaacagttcttacgtgattttatgtaacttaatttgccctggaaaggaaatgtctcgtctctggtatgggaaaaaagggagaagacatcaaccaattaatcataaatacactctggtagtgtcagtggctgagtatcaccgcaggatcgatgctctaaatactgaagaactgcgcacactctgcagacgcctccagattactacaagggaagacataaattcaaagcaggttgctacagtgaaagcagacctggagtctgaatcttttcgaccaaacctaagtgatcccagtgaacttttactgccagatcaaattgaaaagcttaccaagcatcttccaccaagaacaattggctatccatggactcttgtttatggtactggaaaacatggcacaagcttgaaaactctttatcgaacaatgacaggtttagacaccccagtgctgatggtgattaaagacagtgatggacaggtttttggtgcgttagcatctgagccactgaaagtgagtgatggcttttatggtactggagagacctttgtttttacattctgtccggagtttgaggtctttaagtggacaggagataatatgttttttatcaaaggagacatggattcactagctttcggtggtggaggaggagaatttgcgctttggcttgatggagatctctaccatggaagaagccattcttgtaaaacgtttgggaatcgtacactttctaagaaggaagatttctttatccaagatattgaaatctgggcttttgaataaataaaatgctctctgtcttagcaggagaatggcccaaacctgacatggacaagcattgtttggaaagttcaagaagcaatacagtgtaacatgtcacttgtgctttaaaattagtctgtatcaccatttattacagttataattttggagtttatttttcaaatcatgttcttgtcccagagttctttaggttaacactagggactgcgtccatgtactagtataacagcttgggtttgttagaatttgggcaacattttgattataatgacaacttcattttcacatgttactcagttccctaataggatggtgctcttttgttgaacctgtattgatttttttttttttaactatattgattcgtttactagaacagtctaattggggcattgaggaaatgaagactggatacttctgtatctgtgaagttggcacaggtaacatttggacatgttcatcttattcttaggaaggaaaaaatcacttgccaaaataatacatacttcatagaccactgagttctagtttttattcacactacaacattctctttaacgatgttgcaggtattctcaatttccttttaagaaaaatgaaatgtgaggagaattctggttgtaatagatgacagtacatatgatctgcaggtttgggcatatgctttcatcattaaattatctgataaagttacaagtcacaaaggagaatgagaacttaatgattctattggatttaatatattagcaagaaaacatactatttacatatgtgtagcttagtaaggcattaacataagtacaaaaactatgaaacagatgcatatttcctcaacatactgtgtcaggtatactgttttataatttggttgttttagccttattgcacaccaactcccaaaatataggttactcttgttcaaaaggaaaaaaaaaattgtgattttctttgagtggtatatgttattaattaccattagcatttgctcttataaagggcaatgattatagtagacaatattgtaactcagtagacttgttgaatatgcaaacttactgtcaagtgacctcaaaaaaaaaatgaaaagatagaatacactagtagttcttatcctcttttgtaggaaaccaataatagccattgtggcaataattcatcagttgattttaaagcttcatgttatgcaaaaaagaatcctgctgttatacatgtgacagtgactttgtgctgaaatttcagctattccagataaacattgtatatcttgtaaattaatgtttaaaggtgtagttttgttcttacagaaagtgttgattgccaggttgcttatagcactttaagttattctaaaaatgaaattataagccaaatatttggcttaagtagatttagttgtatagcacttacatatttagttcttttgaaagtttagataattatttaaagaaagcataatgctaatggaaaagaaaatctgatgttctattataatatgctattgctgaatatgaatagaaatacagggcatcatttccttgtctcattataagttagtaacaatatatagattaaatgtttacaatatagggaattgtaaataaatatatcagtttttttccccttcggtcttccacagcagtattattgtctttgtggagttgactaatgataatttaaaaatcctgtaatggatttctactaaaataaggtcatagtggcatataccaaataaaatcaaatacagaaatacaaa

SEQ ID NO: 7594 - protein, 243 aa, Homo sapiens; identical to SEQ ID NO: 7584

SEQ ID NO: 7595 - DNA, 516 bp, Homo sapiens
gcctatattatataggcaccattacattccagctggcattagtattctacataatgaacaacaagctatcaagtaaatactaacactttgttttctaaagcttaccaagcatcttccaccaagaacaattggctatccatggactcttgtttatggtactggaaaacatggcacaagcttgaaaactctttatcgaacaatgacaggtttagacaccccagtgctgatggtgattaaagacagtgatggacaggtttttggtgcgttagcatctgagccactgaaagtgagtgatggcttttatggtactggagagacctttgtttttacattctgtccggagtttgaggtaagaaccactatttcaatattttatttataaagagttgacataacatactgcccaaagcaatttatagattcagtgctattcccattaaactaccactgatattcttcacagaattaggaaaaactattttaaagttcatgtggaacccaaaaagagcccaaata

SEQ ID NO: 7596 - protein, 60 aa, Homo sapiens
MTGLDTPVLMVIKDSDGQVFGALASEPLKVSDGFYGTGETFVFTFCPEFEVRTTISIFYL

SEQ ID NO: 7597 - DNA, 1143 bp, Homo sapiens
ctgcgtccatgtactagtataacagcttgggtttgttagaatttgggcatatgctttcatcattaaattatctgataaagttacaagtcacaaaggagaatgagaacttaatgattctattggatttaatatattagcaagaaaacatactatttacatatgtgtagcttagtaaggcattaacataagtacaaaaactatgaaacagatgcatatttcctcaacatactgtgtcaggtatactgttttataatttggttgttttagccttattgcacaccaactcccaaaatataggttactcttgttcaaaaggaaaaaaaaaattgtgattttctttgagtggtatatgttattaattaccattagcatttgctcttataaagggcaatgattatagtagacaatattgtaactcagtagacttgttgaatatgcaaacttactgtcaagtgacctcaaaaaaaaaatgaaaagatagaatacactagtagttcttatcctcttttgtaggaaaccaataatagccattgtggcaataattcatcagttgattttaaagcttcatgttatgcaaaaaagaatcctgctgttatacatgtgacagtgactttgtgctgaaatttcagctattccagataaacattgtatatcttgtaaattaatgtttaaaggtgtagttttgttcttacagaaagtgttgattgccaggttgcttatagcactttaagttattctaaaaatgaaattataagccaaatatttggcttaagtagatttagttgtatagcacttacatatttagttcttttgaaagtttagataattatttaaagaaagcataatgctaatggaaaagaaaatctgatgttctattataatatgctattgctgaatatgaatagaaatacagggcatcatttccttgtctcattataagttagtaacaatatatagattaaatgtttacaatatagggaattgtaaataaatatatcagtttttttccccttcggtcttccacagcagtattattgtctttgtggagttgactaatgataatttaaaaatcctgtaatggatttctactaaaataaggtcatagtggcatataccaaataaaatcaaatacagaaatacaaa

SEQ ID NO: 7598 - protein, 32 aa, Homo sapiens
MLCKKESCCYTCDSDFVLKFQLFQINIVYLVN

SEQ ID NO: 7599 - DNA, 2754 bp, Homo sapiens
cacactcattttagccagtgtccaggctatcagcagagaaagacaggtgggcagcatggctccgggcgaaaaggaaagcggggagggcccagccaagagcgccctccggaagatacgcacagccaccctggtcatcagcttggcccgaggttggcagcagtgggcgaatgagaacagcatcaggcaggcccaggagcctacaggctggctgccgggagggacccaggactcacctcaagctcctaaaccaatcacaccccctacttcacaccagaaagctcagagtgccccaaagtcgccaccccgcctgccagaaggacatggagatggacaaagctcagagaaagcccctgaggtttctcacatcaaaaagaaagaggtgtccaaaacggtggtcagcaagacttatgagagaggaggggacgtgagccacctcagccacaggtacgagagggatgctggtgtgcttgaacctgggcagccagagaatgacattgacagaatcctccacagccacggctccccaacgcggaggagaaaatgtgccaacctggtgtctgagctaaccaagggctggagagtgatggagcaggaggagcccacatggaggagtgacagcgtagacacagaggacagcggctatggaggagaggctgaggagaggcccgagcaggatggagtgcaggtggctgtggtcaggatcaagcgccccttgccctcccaggtaaacagatttacagagaaactcaactgcaaagcccaacagaaatatagcccagtgggcaacttgaaagggagatggcagcagtgggctgatgaacacatacaatcccagaagctcaatcctttcagtgaagagtttgattacgagctggccatgtccacccgcctacacaaaggagatgagggctatggccgccccaaagaaggaaccaaaactgctgaaagggccaagcgtgctgaggagcacatctacagggaaatgatggacatgtgcttcattatctgcacaatggctcgccacagacgagatggcaagatccaggttacttttggagatctctttgacagatacgttcgtatttcagataaagtagtgggcattctcatgcgtgccaggaaacatggactggtagactttgaaggagagatgctatggcaaggccgagatgaccatgttgtgattacgctactcaagtgaaccttcaaaaacaaaagccaaatttggcccactatggtcttaatgctaaatgctcatgtaggtaaaatgaaaatgcaaactctctgtaataagttagtaaatattaaacaatttttacataaacgactttctggcattctatttctatctagaatgaggaattttggagattttgagaaggcacaaagcatttcagaaagcacatagaatgttaatgtataataatagtattaatagttgaaattccacagggtgtttttgtttttgttttgagacagattctctttatgtcaccaaagctggtcttttaactcctggcctcaagtgatcctctcacctcagcctcccaagtagctgggattataggcatgagcaacagcacccagccacttgtatattttaggcaaaatatttagctagtcattgtagaaactactatagatttttaattaaacattacatctaagaagaatgctgacttgagataaatatcagtagaacatataataatgtgtctttatttggaaaaaagaaaataccattaagtttggtaaaactaaacttaaaattttttcagaagcttgactttgtattattgtttatatcatagcatcacttacaaaacaagcacatatataaaaagttgtcaagatgttgctgaaattgttgaagttcctctgtgggcttggattctaacaggtttccagtaagagttcaccttcctcttgtttgatttcagcaaatcacataaaaacagacacttcctgtcttagtaccaacaaaggaaggcacaccctcactaaaagtagagcagaggtgagagattcagatttacttgcctttgtaggacttcttggagaagtttattgtttcattacatgtcagcatataacgagtcaagctgcttgcattaacatcaatgcaatgatatgtatttctccaacaatggagaaatacagaaaatctatgaagtggaatgttcagtattagaaaaatcccatagaatcattggtgaattaaaaacagatttgagacagtttaatgttcctcatactgtaacaaagaaaactttatgaaatgtttaagtcataaaactgcaatattagttctgccaaagtaaaaaatatacaatgatgatggcaaggagaaaatcattggacattaatgtgcctatgtgatcttaaaaacaaatggaatggaatgtgagattgcaattcttactggattcaatgaaattactaaaatgcattgatagtatagcactttggtgttaaatgtaaaaattaatgtctaaatatgatacctcaaaataataggtattagactgctataagaattatatttgttttcatgtatgagtctctttcaaactgaaggttctggtatcttaagaaagtatgcgtattttgtttccataccgtatttataaagctataagttaatgaccaatatttctaagtaggatttcatgtaagatgcacacttctattacaagtgaaacctacgccaaatgttaaagacaaatagcataagaataaaagatgttttcttgt

SEQ ID NO: 7600 - protein, 381 aa, Homo sapiens; identical to SEQ ID NO: 1059

SEQ ID NO: 7601 - DNA, 9856 bp, Homo sapiens
ggggagggaaaggggggggatgcaggaaagacctttttctctcccccccgcaataatccaagatcaactctgcaaacaacagaagacggttcatggctttggccgccgcgccaccatctttcgggctgccgagggtgttcttgacgattaatcaacagatatggtccggaaaaagaacccccctctgagaaacgttgcaagtgaaggcgagggccagatcctggagcctataggtacagaaagcaaggtatctggaaagaacaaagaattttctgcagatcagatgtcagaaaatacggatcagagtgatgctgcagaactaaatcataaggaggaacatagcttgcatgttcaagatccatcttctagcagtaagaaggacttgaaaagcgcagttctgagtgagaaggctggcttcaattatgaaagccccagtaagggaggaaactttccctcctttccgcatgatgaggtgacagacagaaatatgttggctttctcatctccagctgctgggggagtctgtgagcccttgaagtctccgcaaagagcagaggcagatgaccctcaagatatggcctgcaccccctcaggggactcactggagacaaaggaagatcagaagatgtcaccaaaggctacagaggaaacagggcaagcacagagtggtcaagccaattgtcaaggtttgagcccagtttcagtggcctcaaaaaacccacaagtgccttcagatgggggtgtaagactgaataaatccaaaactgacttactggtgaatgacaacccagacccggcacctctgtctccagagcttcaggactttaaatgcaatatctgtggatatggttactacggcaacgaccccacagatctgattaagcacttccgaaagtatcacttaggactgcataaccgcaccaggcaagatgctgagctggacagcaaaatcttggcccttcataacatggtgcagttcagccattccaaagacttccagaaggtcaaccgttctgtgttttctggtgtgctgcaggacatcaattcttcaaggcctgttttactaaatgggacctatgatgtgcaggtgacttcaggtggaacattcattggcattggacggaaaacaccagattgccaagggaacaccaagtatttccgctgtaaattctgcaatttcacttatatgggcaactcatccaccgaattagaacaacattttcttcagactcacccaaacaaaataaaagcttctctcccctcctctgaggttgcaaaaccttcagagaaaaactctaacaagtccatccctgcacttcaatccagtgattctggagacttgggaaaatggcaggacaagataacagtcaaagcaggagatgacactcctgttgggtactcagtgcccataaagcccctcgattcctctagacaaaatggtacagaggccaccagttactactggtgtaaattttgtagtttcagctgtgagtcatctagctcacttaaactgctagaacattatggcaagcagcacggagcagtgcagtcaggcggccttaatccagagttaaatgataagctttccaggggctctgtcattaatcagaatgatctagccaaaagttcagaaggagagacaatgaccaagacagacaagagctcgagtggggctaaaaagaaggacttctccagcaagggagccgaggataatatggtaacgagctataattgtcagttctgtgacttccgatattccaaaagccatggccctgatgtaattgtagtggggccacttctccgtcattatcaacagctccataacattcacaagtgtaccattaaacactgtccattctgtcccagaggactttgcagcccagaaaagcaccttggagaaattacttatccgtttgcttgtagaaaaagtaattgttcccactgtgcactcttgcttctgcacttgtctcctggggcggctggaagctcgcgagtcaaacatcagtgccatcagtgttcattcaccacccctgacgtagatgtactcctctttcactatgaaagtgtgcatgagtcccaagcatcggatgtcaaacaagaagcaaatcacctgcaaggatcggatgggcagcagtctgtcaaggaaagcaaagaacactcatgtaccaaatgtgattttattacccaagtggaagaagagatttcccgacactacaggagagcacacagctgctacaaatgccgtcagtgcagttttacagctgccgatactcagtcactactggagcacttcaacactgttcactgccaggaacaggacatcactacagccaacggcgaagaggacggtcatgccatatccaccatcaaagaggagcccaaaattgacttcagggtctacaatctgctaactccagactctaaaatgggagagccagtttctgagagtgtggtgaagagagagaagctggaagagaaggacgggctcaaagagaaagtttggaccgagagttccagtgatgaccttcgcaatgtgacttggagaggggcagacatcctgcgggggagtccgtcatacacccaagcaagcctggggctgctgacgcctgtgtctggcacccaagagcagacaaagactctaagggatagtcccaatgtggaggccgcccatctggcgcgacctatttatggcttggctgtggaaaccaagggattcctgcagggggcgccagctggcggagagaagtctggggccctcccccagcagtatcctgcatcgggagaaaacaagtccaaggatgaatcccagtccctgttacggaggcgtagaggctccggtgttttttgtgccaattgcctgaccacaaagacctctctctggcgaaagaatgcaaatggcggatatgtatgcaacgcgtgtggcctctaccagaagcttcactcgactcccaggcctttaaacatcattaaacaaaacaacggtgagcagattattaggaggagaacaagaaagcgccttaacccagaggcacttcaggctgagcagctcaacaaacagcagaggggcagcaatgaggagcaagtcaatggaagcccgttagagaggaggtcagaagatcatctaactgaaagtcaccagagagaaattccactccccagcctaagtaaatacgaagcccagggttcattgactaaaagccattctgctcagcagccagtcctggtcagccaaactctggatattcacaaaaggatgcaacctttgcacattcagataaaaagtcctcaggaaagtactggagatccaggaaatagttcatccgtatctgaagggaaaggaagttctgagagaggcagtcctatagaaaagtacatgagacctgcgaaacacccaaattattcaccaccaggcagccctattgaaaagtaccagtacccactttttggacttccctttgtacataatgacttccagagtgaagctgattggctgcggttctggagtaaatataagctctccgttcctgggaatccgcactacttgagtcacgtgcctggcctaccaaatccttgccaaaactatgtgccttatcccaccttcaatctgcctcctcatttttcagctgttggatcagacaatgacattcctctagatttggcgatcaagcattccagacctgggccaactgcaaacggtgcctccaaggagaaaacgaaggcaccaccaaatgtaaaaaatgaaggtcccttgaatgtagtaaaaacagagaaagttgatagaagtactcaagatgaactttcaacaaaatgtgtgcactgtggcattgtctttctggatgaagtgatgtatgctttgcatatgagttgccatggtgacagtggacctttccagtgcagcatatgccagcatctttgcacggacaaatatgacttcacaacacatatccagaggggcctgcataggaacaatgcacaagtggaaaaaaatggaaaacctaaagagtaaaaccttagcacttagcacaattaaatagaaataggttttcttgatgggaattcaatagcttgtaatgtcttatgaagacctattaaaaaaatacttcatagagcctgccttatccaacatgaaattcccttcttttgttattctttcttttgatgagtaggttaccaagattaaaaagtgagataaatggtcaatgagaaagaatggaagatggtaaacaatcactttttaaaacctgttaagtcaaaaccatcttggctaatatgtactggggaaataatccataagagatatcaccagactagaattaatatatttataaagaaagagaccaaaactgtctagaatttgaaagggtttacatattattatactaaagcagtactggactggccattggaccatttgttccaaaacccataaattgttgcctaaatttataatgatcatgaaaccctaggcagaggaggagaaattgaaggtccagggcaatgaaagaaaaatggcgccctctcaatttagtcttctctcattggccatgtttcagattttgacctagaaatgcgagctgtggttaggcttggttagagtgcagcaagcaacatgacagatggtggcacgctgtttttacccagccctgcctgtacatacacatgcacaccctctctgatatttttgtcctttagatgttcaaatactcagtagtccttttgtttgcggtttagattcattttgtccacacatgtacccattttaaaaaacaatgtcctcgatgcttctgtagtgatttcattttagccaggtatttctttcttgtgtgtgatgaaccagtatggatttgcttttctaagcctcctgttggttactaatctcacttggcacattataactaaaggaatcccctcaattcaaaagcatagatggatacaaatgtcagaccgtgggtttaatttgtttagaacacatggcatttcttcacaaggtaacctgctgtatttatttattttcttttggttaaatataatttccaaactttgtggtcaggcagcgtctaaggttacgttaccacagactgacagttggtatatgtaccagccaatcccttcattaaatgtatacagatttagttaagtagcattaaataggattcttagaagtatgtcctcatagaacttttaatacttaaggctttgtaaaaactatccatgaagggaaagctcctcagcataactgctcagggaaatagggctaaataactgaacattaaataattggttaaaggtgctgttagtcgagcctcaatgcttgctacaaggatgtatgtacaaggactgactttaataatttgcattatattgtcccaaccagtagtttattttttgccacggagatgtagaagatattacaagctactggatgcactgtcagattaacttatttcattaaagaagttgggagaacaaataggaaaaaaaaaacttatttttctagtaaatattaatgtattacatttcaaataatggtgcctgacatattgaataattattttctacagtgtacgtatgcaacaaagatattccatcatgcattagagtcagttctggctctgcctagctgtttacatttgcaaatgtagcaaacaaggtaatgaagcaactatttctattgcagtagatatccttttgtgtgtgtgtgtgtgcattaaagttgtaaacggtaacatgaaacaaatgaaagttcttgctataatggtatggaaaacaagaaggaaatgaaaatatttttatgcctacttaggaaaaaaagggtagcacttattcattccaagtacttttttttttttaatttttaagctcttaactcacattgttatgcttaagatgataaacatatatcctctttttattgctttgtctatgtttcatatgaaacatttcagaaattattttgataagtgttgctggaatctgcaacgctgatttttttttgcattctgtagtcgcatttgcactccatttttacattaattcgcagttgctttgtatcattgttttgtttgggttttgtttctttttcacagtgccgggtcttcgtttcttaaagttggatggcaggtagagttcaaccagttcgtgactgttgtagcgaatgaagttaaaaaaatgtctttctgatgttgtgttgtcattttcatttttgcatttttttgtttgcatattaaaaaaagagaaaagagaaagcaagagacagaaatcaggactaagtcctctgcttcagtttcattgttaacgggccttattctgatctcacctgtcgcgtagctctaatattcacataaactgaaataaagaagtggaatgaggagctttgacattcaaattatgtgatgtaatttatcttccttaggaattttgatggatgcatctcaaaatgtatagccagacttgagaggtgacaattaaagatctaaaaaagagaggagattcccccaaacaacaatatttaattttcttagtaaaaagaataacagaatgcatcgtggcaatccttaagcaacattatctatgtggactgcttaaatcagcaaaacaccagaagtttggttaacttgggcaatatgacaagtattactttttgggcaaaactactcattaagcaatttctctagtgtgtcggacacaaataggttctttatttttggcatgtatgcctttttattttcattcaattttttttttttctcagacagacatagtagtatcaactagcattggaaaatacatatcactattcttggaatatttatggtcagtctactttttagtaaaatatttttggatagcgttgacacgatagatcttattccatacttctttattattgataattttattttcattttttgctttcattattatacatattttggtggagaagaggttgggcttttttgaaagagacaaaaatttattataacactaaacactccttttttgacatattaaagcctttattccatctctcaagatatattataaaatttatttttttaatttaagatttctgaattattttatcttaaattgtgattttaaacgagctattatggtacggaactttttttaatgaggaatttcatgatgatttaggaattttctctcttggaaaaggcttcccctgtgatgaaaatgatgtgccagctaaaattgtgtgccatttaaaaactgaaaatattttaaaattatttgtctatattctaaattgagctttggatcaaactttaggccaggaccagctcatgcgttctcattcttccttttctcactctttctctcatcactcacctctgtattcattctgttgtttgggatagaaaaatcataaagagccaacccatctcagaacgttgtggattgagagagacactacatgactccaagtatatgagaaaaggacagagctctaattgataactctgtagttcaaaaggaaaagagtatgcccaattctctctacatgacatattgagattttttttaatcaacttttaagatagtgatgttctgttctaaactgttctgttttagtgaaggtagatttttataaaacaagcatggggattcttttctaaggtaatattaatgagaagggaaaaaagtatctttaacagctctttgttgaagcctgtggtagcacattatgtttataattgcacatgtgcacataatctattatgatccaatgcaaatacagctccaaaaatattaaatgtatatatattttaaaatgcctgaggaaatacatttttcttaataaactgaagagtctcagtatggctattaaaataattattagcctcctgttgtgtggctgcaaaacatcacaaagtgaccggtcttgagacctgtgaactgctgccctgtttagtaaataaaattaatgcatttctagagggggaatatctgccatccagtggtggaaatgtggagtaaagaagctggtggtctgcttctgtgctgtatgccagccttttgccttaagttgagaggaggtcaactttagctactgtctttggtttgagagccatggcaaaaaaaaaaaaagaaaaaaagatcaagtcgtctttggtgagccagtaaggtgaaagcttgctgactgtccaaggcacaagagaaaattgaggaattgaaatgcaacctgagtatcaaactaaatattctaatcaaaggtaggtactgttaggtggaattctatcagcaggcaactgcaaatgagaagaagatagaaggacgcccgtcgggactttggagggcattgttattttcccaaagaaagacggccaagggcagaggcatggattctttgcagagcacttccttttggtttttcagtactgtttcatagacagtgggctcacatgttcctgatagtgctgcagttgcttagaaagcatcccagttaattgcagtaattagaacttctggaatatgctagggcagaagtatgtcaagtatgtcacatgaagaaaatgtgaaattcaagagtaatccacacgtgagaaactagacaatgtacattcatgtgttctcttgaaaggaaagggagagctgtaagcttcactctgtcctacaccggagaaaagcaggaataactttaccgtggaaataatgtttagcttttatcagagaaaattgtccttctagagcatagagtcccaaaactcaattctggttttcccctgttttttttttttttttttttcccaacatatgaactgcagcatatcactttttctttttgtgcctcaggttcctcacctgtaaaattgaaaaatatatgtattaataatattattaataataataatggtaatgtagtacttgtttgtaaagcactttgagatccttggttgaaaggcaccataggagtgccaagtattattatgtggccaagggggttatttaaactgtcagttcccaaaggccaggaaaggttggggtcatttttcttaaagacgagctgtaaatatcaactaggcagccaatagtgttgactatgaagatgcaaaactattactaggctgataaaatcatagtttcttaatggctaccaataaggcaaatatcacaataataaacgccaaattccttagggcggactatttgacaaccacatggaaaactttgggggaggcatgaggggggaacatctcaaaatgccaatgtaaaatttaacttacagcaatattcaccagcagaaaatgtctttcatatggaatgatttcatgttgctaagaaaaagaattcaatttgtagtcctgatttgaatactagaatgttggctataatagttctgttcttacaacacatgaaattttttcgttttattttattttgttttcatagtgcatgttcatttctactcacaaacatgttcttggtgtatttcttatgcaaacaatcttcaggcagcaaagatgtctgttacatctaaacttgaataataaagttttaccaccagttacacataacggcgttggtatggtttatatggattcactttcatccttctagcaataggaaatacagatcattgtaatatatatatatatatatatatatatatatatatatatatatatatatatatatacaggctctgctgaattgaaatggtgaaatcaaatcaccattctaaaaaattattacttatattgataaagcctggactctctcaacttgttgtgctttgattttttttcttaaacaaacactctctcactgatatattttgtgtaaaaagatatatactactttctccagagagataacataaaaatgtgtttatttc

SEQ ID NO: 7602 - protein, 1281 aa, Homo sapiens
MVRKKNPPLRNVASEGEGQILEPIGTESKVSGKNKEFSADQMSENTDQSDAAELNHKEEHSLHVQDPSSSSKKDLKSAVLSEKAGFNYESPSKGGNFPSFPHDEVTDRNMLAFSSPAAGGVCEPLKSPQRAEADDPQDMACTPSGDSLETKEDQKMSPKATEETGQAQSGQANCQGLSPVSVASKNPQVPSDGGVRLNKSKTDLLVNDNPDPAPLSPELQDFKCNICGYGYYGNDPTDLIKHFRKYHLGLHNRTRQDAELDSKILALHNMVQFSHSKDFQKVNRSVFSGVLQDINSSRPVLLNGTYDVQVTSGGTFIGIGRKTPDCQGNTKYFRCKFCNFTYMGNSSTELEQHFLQTHPNKIKASLPSSEVAKPSEKNSNKSIPALQSSDSGDLGKWQDKITVKAGDDTPVGYSVPIKPLDSSRQNGTEATSYYWCKFCSFSCESSSSLKLLEHYGKQHGAVQSGGLNPELNDKLSRGSVINQNDLAKSSEGETMTKTDKSSSGAKKKDFSSKGAEDNMVTSYNCQFCDFRYSKSHGPDVIVVGPLLRHYQQLHNIHKCTIKHCPFCPRGLCSPEKHLGEITYPFACRKSNCSHCALLLLHLSPGAAGSSRVKHQCHQCSFTTPDVDVLLFHYESVHESQASDVKQEANHLQGSDGQQSVKESKEHSCTKCDFITQVEEEISRHYRRAHSCYKCRQCSFTAADTQSLLEHFNTVHCQEQDITTANGEEDGHAISTIKEEPKIDFRVYNLLTPDSKMGEPVSESVVKREKLEEKDGLKEKVWTESSSDDLRNVTWRGADILRGSPSYTQASLGLLTPVSGTQEQTKTLRDSPNVEAAHLARPIYGLAVETKGFLQGAPAGGEKSGALPQQYPASGENKSKDESQSLLRRRRGSGVFCANCLTTKTSLWRKNANGGYVCNACGLYQKLHSTPRPLNIIKQNNGEQIIRRRTRKRLNPEALQAEQLNKQQRGSNEEQVNGSPLERRSEDHLTESHQREIPLPSLSKYEAQGSLTKSHSAQQPVLVSQTLDIHKRMQPLHIQIKSPQESTGDPGNSSSVSEGKGSSERGSPIEKYMRPAKHPNYSPPGSPIEKYQYPLFGLPFVHNDFQSEADWLRFWSKYKLSVPGNPHYLSHVPGLPNPCQNYVPYPTFNLPPHFSAVGSDNDIPLDLAIKHSRPGPTANGASKEKTKAPPNVKNEGPLNVVKTEKVDRSTQDELSTKCVHCGIVFLDEVMYALHMSCHGDSGPFQCSICQHLCTDKYDFTTHIQRGLHRNNAQVEKNGKPKE

SEQ ID NO: 7603 - DNA, 10340 bp, Homo sapiens
ttcctccgcgaaggctcctttgatattaatagtgttggtgtcttgaaactgacgtaatgcgcggagactgaggtcctgacaagcgataacatttctgataaagacccgatcttactgcaatctctagcgtcctcttttttggtgctgctggtttctccagacctcgcgtcctctcgattgctctctcgccttcctatttcttttttttttttttaaacaaaaaacaacaccccctcccctctcccacccggcaccgggcacatccttgctctatttcctttctctttctctctctctctctctctctctcttttttaataagggtgggggagggaaaggggggggatgcaggaaagacctttttctctcccccccgcaataatccaagatcaactctgcaaacaacagaagacggttcatggctttggccgccgcgccaccatctttcgggctgccgagggtgttcttgacgattaatcaacagatgtacagatcagctctcaaaatgtcttctgtgtcttctgagcgtcttctaagacaattgcattagcctcctgctagttgactaatagaattaataattgtaaaaagcactctaaagccacatgccttatgaagtcaatgctgggtatgattttacaaatatggtccggaaaaagaacccccctctgagaaacgttgcaagtgaaggcgagggccagatcctggagcctataggtacagaaagcaaggtatctggaaagaacaaagaattttctgcagatcagatgtcagaaaatacggatcagagtgatgctgcagaactaaatcataaggaggaacatagcttgcatgttcaagatccatcttctagcagtaagaaggacttgaaaagcgcagttctgagtgagaaggctggcttcaattatgaaagccccagtaagggaggaaactttccctcctttccgcatgatgaggtgacagacagaaatatgttggctttctcatctccagctgctgggggagtctgtgagcccttgaagtctccgcaaagagcagaggcagatgaccctcaagatatggcctgcaccccctcaggggactcactggagacaaaggaagatcagaagatgtcaccaaaggctacagaggaaacagggcaagcacagagtggtcaagccaattgtcaaggtttgagcccagtttcagtggcctcaaaaaacccacaagtgccttcagatgggggtgtaagactgaataaatccaaaactgacttactggtgaatgacaacccagacccggcacctctgtctccagagcttcaggactttaaatgcaatatctgtggatatggttactacggcaacgaccccacagatctgattaagcacttccgaaagtatcacttaggactgcataaccgcaccaggcaagatgctgagctggacagcaaaatcttggcccttcataacatggtgcagttcagccattccaaagacttccagaaggtcaaccgttctgtgttttctggtgtgctgcaggacatcaattcttcaaggcctgttttactaaatgggacctatgatgtgcaggtgacttcaggtggaacattcattggcattggacggaaaacaccagattgccaagggaacaccaagtatttccgctgtaaattctgcaatttcacttatatgggcaactcatccaccgaattagaacaacattttcttcagactcacccaaacaaaataaaagcttctctcccctcctctgaggttgcaaaaccttcagagaaaaactctaacaagtccatccctgcacttcaatccagtgattctggagacttgggaaaatggcaggacaagataacagtcaaagcaggagatgacactcctgttgggtactcagtgcccataaagcccctcgattcctctagacaaaatggtacagaggccaccagttactactggtgtaaattttgtagtttcagctgtgagtcatctagctcacttaaactgctagaacattatggcaagcagcacggagcagtgcagtcaggcggccttaatccagagttaaatgataagctttccaggggctctgtcattaatcagaatgatctagccaaaagttcagaaggagagacaatgaccaagacagacaagagctcgagtggggctaaaaagaaggacttctccagcaagggagccgaggataatatggtaacgagctataattgtcagttctgtgacttccgatattccaaaagccatggccctgatgtaattgtagtggggccacttctccgtcattatcaacagctccataacattcacaagtgtaccattaaacactgtccattctgtcccagaggactttgcagcccagaaaagcaccttggagaaattacttatccgtttgcttgtagaaaaagtaattgttcccactgtgcactcttgcttctgcacttgtctcctggggcggctggaagctcgcgagtcaaacatcagtgccatcagtgttcattcaccacccctgacgtagatgtactcctctttcactatgaaagtgtgcatgagtcccaagcatcggatgtcaaacaagaagcaaatcacctgcaaggatcggatgggcagcagtctgtcaaggaaagcaaagaacactcatgtaccaaatgtgattttattacccaagtggaagaagagatttcccgacactacaggagagcacacagctgctacaaatgccgtcagtgcagttttacagctgccgatactcagtcactactggagcacttcaacactgttcactgccaggaacaggacatcactacagccaacggcgaagaggacggtcatgccatatccaccatcaaagaggagcccaaaattgacttcagggtctacaatctgctaactccagactctaaaatgggagagccagtttctgagagtgtggtgaagagagagaagctggaagagaaggacgggctcaaagagaaagtttggaccgagagttccagtgatgaccttcgcaatgtgacttggagaggggcagacatcctgcgggggagtccgtcatacacccaagcaagcctggggctgctgacgcctgtgtctggcacccaagagcagacaaagactctaagggatagtcccaatgtggaggccgcccatctggcgcgacctatttatggcttggctgtggaaaccaagggattcctgcagggggcgccagctggcggagagaagtctggggccctcccccagcagtatcctgcatcgggagaaaacaagtccaaggatgaatcccagtccctgttacggaggcgtagaggctccggtgttttttgtgccaattgcctgaccacaaagacctctctctggcgaaagaatgcaaatggcggatatgtatgcaacgcgtgtggcctctaccagaagcttcactcgactcccaggcctttaaacatcattaaacaaaacaacggtgagcagattattaggaggagaacaagaaagcgccttaacccagaggcacttcaggctgagcagctcaacaaacagcagaggggcagcaatgaggagcaagtcaatggaagcccgttagagaggaggtcagaagatcatctaactgaaagtcaccagagagaaattccactccccagcctaagtaaatacgaagcccagggttcattgactaaaagccattctgctcagcagccagtcctggtcagccaaactctggatattcacaaaaggatgcaacctttgcacattcagataaaaagtcctcaggaaagtactggagatccaggaaatagttcatccgtatctgaagggaaaggaagttctgagagaggcagtcctatagaaaagtacatgagacctgcgaaacacccaaattattcaccaccaggcagccctattgaaaagtaccagtacccactttttggacttccctttgtacataatgacttccagagtgaagctgattggctgcggttctggagtaaatataagctctccgttcctgggaatccgcactacttgagtcacgtgcctggcctaccaaatccttgccaaaactatgtgccttatcccaccttcaatctgcctcctcatttttcagctgttggatcagacaatgacattcctctagatttggcgatcaagcattccagacctgggccaactgcaaacggtgcctccaaggagaaaacgaaggcaccaccaaatgtaaaaaatgaaggtcccttgaatgtagtaaaaacagagaaagttgatagaagtactcaagatgaactttcaacaaaatgtgtgcactgtggcattgtctttctggatgaagtgatgtatgctttgcatatgagttgccatggtgacagtggacctttccagtgcagcatatgccagcatctttgcacggacaaatatgacttcacaacacatatccagaggggcctgcataggaacaatgcacaagtggaaaaaaatggaaaacctaaagagtaaaaccttagcacttagcacaattaaatagaaataggttttcttgatgggaattcaatagcttgtaatgtcttatgaagacctattaaaaaaatacttcatagagcctgccttatccaacatgaaattcccttcttttgttattctttcttttgatgagtaggttaccaagattaaaaagtgagataaatggtcaatgagaaagaatggaagatggtaaacaatcactttttaaaacctgttaagtcaaaaccatcttggctaatatgtactggggaaataatccataagagatatcaccagactagaattaatatatttataaagaaagagaccaaaactgtctagaatttgaaagggtttacatattattatactaaagcagtactggactggccattggaccatttgttccaaaacccataaattgttgcctaaatttataatgatcatgaaaccctaggcagaggaggagaaattgaaggtccagggcaatgaaagaaaaatggcgccctctcaatttagtcttctctcattggccatgtttcagattttgacctagaaatgcgagctgtggttaggcttggttagagtgcagcaagcaacatgacagatggtggcacgctgtttttacccagccctgcctgtacatacacatgcacaccctctctgatatttttgtcctttagatgttcaaatactcagtagtccttttgtttgcggtttagattcattttgtccacacatgtacccattttaaaaaacaatgtcctcgatgcttctgtagtgatttcattttagccaggtatttctttcttgtgtgtgatgaaccagtatggatttgcttttctaagcctcctgttggttactaatctcacttggcacattataactaaaggaatcccctcaattcaaaagcatagatggatacaaatgtcagaccgtgggtttaatttgtttagaacacatggcatttcttcacaaggtaacctgctgtatttatttattttcttttggttaaatataatttccaaactttgtggtcaggcagcgtctaaggttacgttaccacagactgacagttggtatatgtaccagccaatcccttcattaaatgtatacagatttagttaagtagcattaaataggattcttagaagtatgtcctcatagaacttttaatacttaaggctttgtaaaaactatccatgaagggaaagctcctcagcataactgctcagggaaatagggctaaataactgaacattaaataattggttaaaggtgctgttagtcgagcctcaatgcttgctacaaggatgtatgtacaaggactgactttaataatttgcattatattgtcccaaccagtagtttattttttgccacggagatgtagaagatattacaagctactggatgcactgtcagattaacttatttcattaaagaagttgggagaacaaataggaaaaaaaaaacttatttttctagtaaatattaatgtattacatttcaaataatggtgcctgacatattgaataattattttctacagtgtacgtatgcaacaaagatattccatcatgcattagagtcagttctggctctgcctagctgtttacatttgcaaatgtagcaaacaaggtaatgaagcaactatttctattgcagtagatatccttttgtgtgtgtgtgtgtgcattaaagttgtaaacggtaacatgaaacaaatgaaagttcttgctataatggtatggaaaacaagaaggaaatgaaaatatttttatgcctacttaggaaaaaaagggtagcacttattcattccaagtacttttttttttttaatttttaagctcttaactcacattgttatgcttaagatgataaacatatatcctctttttattgctttgtctatgtttcatatgaaacatttcagaaattattttgataagtgttgctggaatctgcaacgctgatttttttttgcattctgtagtcgcatttgcactccatttttacattaattcgcagttgctttgtatcattgttttgtttgggttttgtttctttttcacagtgccgggtcttcgtttcttaaagttggatggcaggtagagttcaaccagttcgtgactgttgtagcgaatgaagttaaaaaaatgtctttctgatgttgtgttgtcattttcatttttgcatttttttgtttgcatattaaaaaaagagaaaagagaaagcaagagacagaaatcaggactaagtcctctgcttcagtttcattgttaacgggccttattctgatctcacctgtcgcgtagctctaatattcacataaactgaaataaagaagtggaatgaggagctttgacattcaaattatgtgatgtaatttatcttccttaggaattttgatggatgcatctcaaaatgtatagccagacttgagaggtgacaattaaagatctaaaaaagagaggagattcccccaaacaacaatatttaattttcttagtaaaaagaataacagaatgcatcgtggcaatccttaagcaacattatctatgtggactgcttaaatcagcaaaacaccagaagtttggttaacttgggcaatatgacaagtattactttttgggcaaaactactcattaagcaatttctctagtgtgtcggacacaaataggttctttatttttggcatgtatgcctttttattttcattcaattttttttttttctcagacagacatagtagtatcaactagcattggaaaatacatatcactattcttggaatatttatggtcagtctactttttagtaaaatatttttggatagcgttgacacgatagatcttattccatacttctttattattgataattttattttcattttttgctttcattattatacatattttggtggagaagaggttgggcttttttgaaagagacaaaaatttattataacactaaacactccttttttgacatattaaagcctttattccatctctcaagatatattataaaatttatttttttaatttaagatttctgaattattttatcttaaattgtgattttaaacgagctattatggtacggaactttttttaatgaggaatttcatgatgatttaggaattttctctcttggaaaaggcttcccctgtgatgaaaatgatgtgccagctaaaattgtgtgccatttaaaaactgaaaatattttaaaattatttgtctatattctaaattgagctttggatcaaactttaggccaggaccagctcatgcgttctcattcttccttttctcactctttctctcatcactcacctctgtattcattctgttgtttgggatagaaaaatcataaagagccaacccatctcagaacgttgtggattgagagagacactacatgactccaagtatatgagaaaaggacagagctctaattgataactctgtagttcaaaaggaaaagagtatgcccaattctctctacatgacatattgagattttttttaatcaacttttaagatagtgatgttctgttctaaactgttctgttttagtgaaggtagatttttataaaacaagcatggggattcttttctaaggtaatattaatgagaagggaaaaaagtatctttaacagctctttgttgaagcctgtggtagcacattatgtttataattgcacatgtgcacataatctattatgatccaatgcaaatacagctccaaaaatattaaatgtatatatattttaaaatgcctgaggaaatacatttttcttaataaactgaagagtctcagtatggctattaaaataattattagcctcctgttgtgtggctgcaaaacatcacaaagtgaccggtcttgagacctgtgaactgctgccctgtttagtaaataaaattaatgcatttctagagggggaatatctgccatccagtggtggaaatgtggagtaaagaagctggtggtctgcttctgtgctgtatgccagccttttgccttaagttgagaggaggtcaactttagctactgtctttggtttgagagccatggcaaaaaaaaaaaaagaaaaaaagatcaagtcgtctttggtgagccagtaaggtgaaagcttgctgactgtccaaggcacaagagaaaattgaggaattgaaatgcaacctgagtatcaaactaaatattctaatcaaaggtaggtactgttaggtggaattctatcagcaggcaactgcaaatgagaagaagatagaaggacgcccgtcgggactttggagggcattgttattttcccaaagaaagacggccaagggcagaggcatggattctttgcagagcacttccttttggtttttcagtactgtttcatagacagtgggctcacatgttcctgatagtgctgcagttgcttagaaagcatcccagttaattgcagtaattagaacttctggaatatgctagggcagaagtatgtcaagtatgtcacatgaagaaaatgtgaaattcaagagtaatccacacgtgagaaactagacaatgtacattcatgtgttctcttgaaaggaaagggagagctgtaagcttcactctgtcctacaccggagaaaagcaggaataactttaccgtggaaataatgtttagcttttatcagagaaaattgtccttctagagcatagagtcccaaaactcaattctggttttcccctgttttttttttttttttttttcccaacatatgaactgcagcatatcactttttctttttgtgcctcaggttcctcacctgtaaaattgaaaaatatatgtattaataatattattaataataataatggtaatgtagtacttgtttgtaaagcactttgagatccttggttgaaaggcaccataggagtgccaagtattattatgtggccaagggggttatttaaactgtcagttcccaaaggccaggaaaggttggggtcatttttcttaaagacgagctgtaaatatcaactaggcagccaatagtgttgactatgaagatgcaaaactattactaggctgataaaatcatagtttcttaatggctaccaataaggcaaatatcacaataataaacgccaaattccttagggcggactatttgacaaccacatggaaaactttgggggaggcatgaggggggaacatctcaaaatgccaatgtaaaatttaacttacagcaatattcaccagcagaaaatgtctttcatatggaatgatttcatgttgctaagaaaaagaattcaatttgtagtcctgatttgaatactagaatgttggctataatagttctgttcttacaacacatgaaattttttcgttttattttattttgttttcatagtgcatgttcatttctactcacaaacatgttcttggtgtatttcttatgcaaacaatcttcaggcagcaaagatgtctgttacatctaaacttgaataataaagttttaccaccagttacacataacggcgttggtatggtttatatggattcactttcatccttctagcaataggaaatacagatcattgtaatatatatatatatatatatatatatatatatatatatatatatatatatatatacaggctctgctgaattgaaatggtgaaatcaaatcaccattctaaaaaattattacttatattgataaagcctggactctctcaacttgttgtgctttgattttttttcttaaacaaacactctctcactgatatattttgtgtaaaaagatatatactactttctccagagagataacataaaaatgtgtttatttc

SEQ ID NO: 7604 - protein, 1294 aa, Homo sapiens; identical to SEQ ID NO: 1061

SEQ ID NO: 7605 - DNA, 9530 bp, Homo sapiens
ggggagggaaaggggggggatgcaggaaagacctttttctctcccccccgcaataatccaagatcaactctgcaaacaacagaagacggttcatggctttggccgccgcgccaccatctttcgggctgccgagggtgttcttgacgattaatcaacagatatggtccggaaaaagaacccccctctgagaaacgttgcaagtgaaggcgagggccagatcctggagcctataggtacagaaagcaaggtatctggaaagaacaaagaattttctgcagatcagatgtcagaaaatacggatcagagtgatgctgcagaactaaatcataaggaggaacatagcttgcatgttcaagatccatcttctagcagtaagaaggacttgaaaagcgcagttctgagtgagaaggctggcttcaattatgaaagccccagtaagggaggaaactttccctcctttccgcatgatgaggtgacagacagaaatatgttggctttctcatctccagctgctgggggagtctgtgagcccttgaagtctccgcaaagagcagaggcagatgaccctcaagatatggcctgcaccccctcaggggactcactggagacaaaggaagatcagaagatgtcaccaaaggctacagaggaaacagggcaagcacagagtggtcaagccaattgtcaaggtttgagcccagtttcagtggcctcaaaaaacccacaagtgccttcagatgggggtgtaagactgaataaatccaaaactgacttactggtgaatgacaacccagacccggcacctctgtctccagagcttcaggactttaaatgcaatatctgtggatatggttactacggcaacgaccccacagatctgattaagcacttccgaaagtatcacttaggactgcataaccgcaccaggcaagatgctgagctggacagcaaaatcttggcccttcataacatggtgcagttcagccattccaaagacttccagaaggtcaaccgttctgtgttttctggtgtgctgcaggacatcaattcttcaaggcctgttttactaaatgggacctatgatgtgcaggtgacttcaggtggaacattcattggcattggacggaaaacaccagattgccaagggaacaccaagtatttccgctgtaaattctgcaatttcacttatatgggcaactcatccaccgaattagaacaacattttcttcagactcacccaaacaaaataaaagcttctctcccctcctctgaggttgcaaaaccttcagagaaaaactctaacaagtccatccctgcacttcaatccagtgattctggagacttgggaaaatggcaggacaagataacagtcaaagcaggagatgacactcctgttgggtactcagtgcccataaagcccctcgattcctctagacaaaatggtacagaggccaccagttactactggtgtaaattttgtagtttcagctgtgagtcatctagctcacttaaactgctagaacattatggcaagcagcacggagcagtgcagtcaggcggccttaatccagagttaaatgataagctttccaggggctctgtcattaatcagaatgatctagccaaaagttcagaaggagagacaatgaccaagacagacaagagctcgagtggggctaaaaagaaggacttctccagcaagggagccgaggataatatggtaacgagctataattgtcagttctgtgacttccgatattccaaaagccatggccctgatgtaattgtagtggggccacttctccgtcattatcaacagctccataacattcacaagtgtaccattaaacactgtccattctgtcccagaggactttgcagcccagaaaagcaccttggagaaattacttatccgtttgcttgtagaaaaagtaattgttcccactgtgcactcttgcttctgcacttgtctcctggggcggctggaagctcgcgagtcaaacatcagtgccatcagtgttcattcaccacccctgacgtagatgtactcctctttcactatgaaagtgtgcatgagtcccaagcatcggatgtcaaacaagaagcaaatcacctgcaaggatcggatgggcagcagtctgtcaaggaaagcaaagaacactcatgtaccaaatgtgattttattacccaagtggaagaagagatttcccgacactacaggagagcacacagctgctacaaatgccgtcagtgcagttttacagctgccgatactcagtcactactggagcacttcaacactgttcactgccaggaacaggacatcactacagccaacggcgaagaggacggtcatgccatatccaccatcaaagaggagcccaaaattgacttcagggtctacaatctgctaactccagactctaaaatgggagagccagtttctgagagtgtggtgaagagagagaagctggaagagaaggacgggctcaaagagaaagtttggaccgagagttccagtgatgaccttcgcaatgtgacttggagaggggcagacatcctgcgggggagtccgtcatacacccaagcaagcctggggctgctgacgcctgtgtctggcacccaagagcagacaaagactctaagggatagtcccaatgtggaggccgcccatctggcgcgacctatttatggcttggctgtggaaaccaagggattcctgcagggggcgccagctggcggagagaagtctggggccctcccccagcagtatcctgcatcgggagaaaacaagtccaaggatgaatcccagtccctgttacggaggcgtagaggctccggtgttttttgtgccaattgcctgaccacaaagacctctctctggcgaaagaatgcaaatggcggatatgtatgcaacgcgtgtggcctctaccagaagcttcactcgactcccaggcctttaaacatcattaaacaaaacaacggtgagcagattattaggaggagaacaagaaagcgccttaacccagaggcacttcaggctgagcagctcaacaaacagcagaggggcagcaatgaggagcaagtcaatggaagcccgttagagaggaggtcagaagatcatctaactgaaagtcaccagagagaaattccactccccagcctaagtaaatacgaagcccagggttcattgactaaaagccattctgctcagcagccagtcctggtcagccaaactctggatattcacaaaaggatgcaacctttgcacattcagataaaaagtcctcaggaaagtactggagatccaggaaatagttcatccgtatctgaagggaaaggaagttctgagagaggcagtcctatagaaaagtacatgagacctgcgaaacacccaaattattcaccaccaggcagccctattgaaaagtaccagtacccactttttggacttccctttgtacataatgacttccagagtgaagctgattggctgcggttctggagtaaatataagctctccgttcctgggaatccgcactacttgagtcacgtgcctggcctaccaaatccttgccaaaactatgtgccttatcccaccttcaatctgcctcctcatttttcagctgttggatcagacaatgacattcctctagatttggcgatcaagcattccagacctgggccaactgcaaacggtgcctccaaggagaaaacgaaggcaccaccaaatgtaaaaaatgaaggtcccttgaatgtagtaaaaacagagaaagttgatagaagtactcaagatgaactttcaacaaaatgtgtgcactgtggcattgtctttctggatgaagtgatgtatgctttgcatatgagttgccatggtgacagtggacctttccagtgcagcatatgccagcatctttgcacggacaaatatgacttcacaacacatatccagaggggcctgcataggaacaatgcacaagtggaaaaaaatggaaaacctaaagagtaaaaccttagcacttagcacaattaaatagaaataggttttcttgatgggaattcaatagcttgtaatgtcttatgaagacctattaaaaaaatacttcatagagcctgccttatccaacatgaaattcccttcttttgttattctttcttttgatgagtaggttaccaagattaaaaagtgagataaatggtcaatgagaaagaatggaagatggtaaacaatcactttttaaaacctgttaagtcaaaaccatcttggctaatatgtactggggaaataatccataagagatatcaccagactagaattaatatatttataaagaaagagaccaaaactgtctagaatttgaaagggtttacatattattatactaaagcagtactggactggccattggaccatttgttccaaaacccataaattgttgcctaaatttataatgatcatgaaaccctaggcagaggaggagaaattgaaggtccagggcaatgaaagaaaaatggcgccctctcaatttagtcttctctcattggccatgtttcagattttgacctagaaatgcgagctgtggttaggcttggttagagtgcagcaagcaacatgacagatggtggcacgctgtttttacccagccctgcctgtacatacacatgcacaccctctctgatatttttgtcctttagatgttcaaatactcagtagtccttttgtttgcggtttagattcattttgtccacacatgtacccattttaaaaaacaatgtcctcgatgcttctgtagtgatttcattttagccaggtatttctttcttgtgtgtgatgaaccagtatggatttgcttttctaagcctcctgttggttactaatctcacttggcacattataactaaaggaatcccctcaattcaaaagcatagatggatacaaatgtcagaccgtgggtttaatttgtttagaacacatggcatttcttcacaaggtaacctgctgtatttatttattttcttttggttaaatataatttccaaactttgtggtcaggcagcgtctaaggttacgttaccacagactgacagttggtatatgtaccagccaatcccttcattaaatgtatacagatttagttaagtagcattaaataggattcttagaagtatgtcctcatagaacttttaatacttaaggctttgtaaaaactatccatgaagggaaagctcctcagcataactgctcagggaaatagggctaaataactgaacattaaataattggttaaaggtgctgttagtcgagcctcaatgcttgctacaaggatgtatgtacaaggactgactttaataatttgcattatattgtcccaaccagtagtttattttttgccacggagatgtagaagatattacaagctactggatgcactgtcagattaacttatttcattaaagaagttgggagaacaaataggaaaaaaaaaacttatttttctagtaaatattaatgtattacatttcaaataatggtgcctgacatattgaataattattttctacagtgtacgtatgcaacaaagatattccatcatgcattagagtcagttctggctctgcctagctgtttacatttgcaaatgtagcaaacaaggtaatgaagcaactatttctattgcagtagatatccttttgtgtgtgtgtgtgtgcattaaagttgtaaacggtaacatgaaacaaatgaaagttcttgctataatggtatggaaaacaagaaggaaatgaaaatatttttatgcctacttaggaaaaaaagggtagcacttattcattccaagtacttttttttttttaatttttaagctcttaactcacattgttatgcttaagatgataaacatatatcctctttttattgctttgtctatgtttcatatgaaacatttcagaaattattttgataagtgttgctggaatctgcaacgctgatttttttttgcattctgtagtcgcatttgcactccatttttacattaattcgcagttgctttgtatcattgttttgtttgggttttgtttctttttcacagtgccgggtcttcgtttcttaaagttggatggcaggtagagttcaaccagttcgtgactgttgtagcgaatgaagttaaaaaaatgtctttctgatgttgtgttgtcattttcatttttgcatttttttgtttgcatattaaaaaaagagaaaagagaaagcaagagacagaaatcaggactaagtcctctgcttcagtttcattgttaacgggccttattctgatctcacctgtcgcgtagctctaatattcacataaactgaaataaagaagtggaatgaggagctttgacattcaaattatgtgatgtaatttatcttccttaggaattttgatggatgcatctcaaaatgtatagccagacttgagaggtgacaattaaagatctaaaaaagagaggagattcccccaaacaacaatatttaattttcttagtaaaaagaataacagaatgcatcgtggcaatccttaagcaacattatctatgtggactgcttaaatcagcaaaacaccagaagtttggttaacttgggcaatatgacaagtattactttttgggcaaaactactcattaagcaatttctctagtgtgtcggacacaaataggttctttatttttggcatgtatgcctttttattttcattcaattttttttttttctcagacagacatagtagtatcaactagcattggaaaatacatatcactattcttggaatatttatggtcagtctactttttagtaaaatatttttggatagcgttgacacgatagatcttattccatacttctttattattgataattttattttcattttttgctttcattattatacatattttggtggagaagaggttgggcttttttgaaagagacaaaaatttattataacactaaacactccttttttgacatattaaagcctttattccatctctcaagatatattataaaatttatttttttaatttaagatttctgaattattttatcttaaattgtgattttaaacgagctattatggtacggaactttttttaatgaggaatttcatgatgatttaggaattttctctcttggaaaaggcttcccctgtgatgaaaatgatgtgccagctaaaattgtgtgccatttaaaaactgaaaatattttaaaattatttgtctatattctaaattgagctttggatcaaactttaggccaggaccagctcatgcgttctcattcttccttttctcactctttctctcatcactcacctctgtattcattctgttgtttgggatagaaaaatcataaagagccaacccatctcagaacgttgtggattgagagagacactacatgactccaagtatatgagaaaaggacagagctctaattgataactctgtagttcaaaaggaaaagagtatgcccaattctctctacatgacatattgagattttttttaatcaacttttaagatagtgatgttctgttctaaactgttctgttttagtgaaggtagatttttataaaacaagcatggggattcttttctaaggtaatattaatgagaagggaaaaaagtatctttaacagctctttgttgaagcctgtggtagcacattatgtttataattgcacatgtgcacataatctattatgatccaatgcaaatacagctccaaaaatattaaatgtatatatattttaaaatgcctgaggaaatacatttttcttaataaactgaagagtctcagtatggctattaaaataattattagcctcctgttgtgtggctgcaaaacatcacaaagtgaccggtcttgagacctgtgaactgctgccctgtttagtaaataaaattaatgcatttctagagggggaatatctgccatccagtggtggaaatgtggagtaaagaagctggtggtctgcttctgtgctgtatgccagccttttgccttaagttgagaggaggtcaactttagctactgtctttggtttgagagccatggcaaaaaaaaaaaaagaaaaaaagatcaagtcgtctttggtgagccagtaaggtgaaagcttgctgactgtccaaggcacaagagaaaattgaggaattgaaatgcaacctgagtatcaaactaaatattctaatcaaaggtaggtactgttaggtggaattctatcagcaggcaactgcaaatgagaagaagatagaaggacgcccgtcgggactttggagggcattgttattttcccaaagaaagacggccaagggcagaggcatggattctttgcagagcacttccttttggtttttcagtactgtttcatagacagtgggctcacatgttcctgatagtgctgcagttgcttagaaagcatcccagttaattgcagtaattagaacttctggaatatgctagggcagaagtatgtcaagtatgtcacatgaagaaaatgtgaaattcaagagtaatccacacgtgagaaactagacaatgtacattcatgtgttctcttgaaaggaaagggagagctgtaagcttcactctgtcctacaccggagaaaagcaggaataactttaccgtggaaataatgtttagcttttatcagagaaaattgtccttctagagcatagagtcccaaaactcaattctggttttcccctgttttttttttttttttttttcccaacatatgaactgcagcatatcactttttctttttgtgcctcaggttcctcacctgtaaaattgaaaaatatatgtattaataatattattaataataataatggtaatgtagtacttgtttgtaaagcactttgagatccttggttgaaaggcaccataggagtgccaagtattattatgtggccaagggggttatttaaactgtcagttcccaaaggccaggaaaggttggggtcatttttcttaaagacgagctgtaaatatcaactaggcagccaatagtgttgactatgaagatgcaaaactattactaggctgataaaatcatagtttcttaatggctaccaataaggcaaatatcacaataataaacgccaaattccttagggcggactatttgacaaccacatggaaaactttgggggaggcatgaggggggaacatctcaaaatgccaatgtaaaatttaacttacagcaatattcaccagcagaaaatgtctttcatatggaatgatttcatgttgctaagaaaaagaattcaatttgtagtcctgatttgaatactagaatgttggctataatagttctgttcttacaacacatgaaattttttcgttttattttattttgttttcatagtgcatgttcatttctactcacaaacatgttcttggtgtatttcttatgcaaacaatcttcaggcagcaaagatgtctgttacatctaaacttgaataataaagttttaccaccagttac

SEQ ID NO: 7606 - protein, 1281 aa, Homo sapiens; identical to SEQ ID NO: 7602

SEQ ID NO: 7607 - DNA, 2694 bp, Homo sapiens
ggctgtggccaagtgattgttgctgaacttacctgtgtcgaaaggtcagccttccagtgctaaggctgggcacaggcgctaaggcaaattggattgtgaatggaggccctgaggcatgttctgcactttgcaactggtctggcaggctccactcctccaccttctaagtctgccacaggcatgggaaacacctgggcagcgacaaaggtggttaaggcagcttcgccaagaagaggagccaagatggttaactagacgtagccaggaggaacatctcccaccaagagactgagctgtcaggaagactggtacattctgagcagatctttggagggaaggcattgagagtggatggaaggatgatgcagacactgggctgaagaggaaggaagctgggaaccctgtacaggactaccgagcaccaggacttgtttctggccccctgcaactcctgggaaagggagaactcctccagtgctctcaagtgttttacagaccactaattattaaatgtggaagctctggagcagagaacctttcaactgaaatgatgacaaacgatgctggctgaggagagtcagacctgaaaagttaggaatccctaaaatgacgtcaacctataattcctattacagagctctgatttctactgatcgttttaggaaccatatctactatgtgagaaaagctgctggtgggcctaatttagatgaaaagcagaaaggccttaaaaaagaaatgggaaaggaatatacagaagcaagaagatgattgaaaaaagatggcaattcatgtacttgttgaacaccagttctgagctgcagagcaggaggcacaagacgtaaacaaaaaagtctctgttacggtcctaaagaagccaatcatctagagaaatgtatgcacagcaggtccagcagaatgggctttgcgctgatgagggaagcaagaggagagcatggcctgggaaaggagatgatcaggctcacttcccatttctctgtggaagaaccgtggcaaacacagagtcaactcacaacgttcattggaatttttcccacttgactccttcgcaagttggaataaggagtttggaaagggaggatttcttcatataaaaatggtctgggtatatccacgcaaaactaaagggagtggaagagaccctaggtctacacatttgatgggatagatccttcgggctcagcctcacctgcaggtactgaaggaagccttagtctgctatacagagcactctgcaccatggggagaagatcaatatgctaaacttgggtactgggcctaaatcttacgaagtgacctcaaacctaggaagggtagtttcatcagaaaagatcctacaaccttctatctgaagagcatgaatagctgctgcttttttggagttggggcctttcattcaccatgaagatactgcattgtggcacagtccttgaagagacaagtagagacagggtttcaccgtggtgacaggctggtctcgaactcctgacctcaagtgatccgtctgcctcagcatcccaaagtgctgggattacaggcacattgaagaatcagaagatgttttccccctgtgtttttgatggaaggaagaaagcaggatttgccaggatgcattctgcatccaagaacatgaacggaaatgagccacagaaaatctggagtgatggcagctgttgtgagaggtggcaatgaaatggatttctcagacacagagatgtggtctcccaccaggtcccatttcagtgtatggtttcttggatttctctgccagcttcaaacagtgcttctgataaagtgatttatgaagtaatgggaaatgtatgttgactcatggagtaacaatgaggaaataggcattggcaccaggactctgttgacatcaggacttcagtgagggggaaattctgcagagatgtgcataaactcatcgcagctgctctaccatctgacaacctgatggtcatgggggacctcaatgcacgtgttggtggtagtgccaaaatgtggaagaaaattattggaccacagaggattagtctcttcctgcatggtgaacagaccgagcaataacttgtaatcacagacaacagcgtcaatcatataagttaggagaaaaatatcatggatatgccacaaatcaaaaacagtgacatcacacccattctgccattgtttcacagcagaatgccaacaagctgacaatctgaatgggtctgagatcgttacccaatatgcttcaaatcaggagaacatacggcaacactcattgacttacatattctgggtaagacacagagcaaagaactgcaacagaggttaaagtttcagaaagaggcaagtaagcagccttcactatatcagacagatgaatccagctccaatcaataattgagttttggattggaggaaagaatatttggacattaaagaaaataagcagagagtgcctaatctcttcaattctcaagatcatgcttaacatgaccacattaattacagcagagtgagacaggcacagaagaggagggacttggaacctgacctaaatacagaagtgtcaagcctagaaggaagtaaaatttggaagaaagtacatggcatatgaaagaaaaataacaacccaacaacatctgacattatggaatacttaaataaaaataaaattttagattc

SEQ ID NO: 7608 - protein, 58 aa, Homo sapiens
MFCTLQLVWQAPLLHLLSLPQAWETPGQRQRWLRQLRQEEEPRWLTRRSQEEHLPPRD

SEQ ID NO: 7609 - DNA, 6246 bp, Homo sapiens
atgcaggatggggactatgggtcaaaaataagtaaaggtgttgactcttctagagggcccacccagcaggcctcctattacacagcgcctgggcggataggcatccggggcagctgggcttcggcgcatggggccattacagtggcctcggtcctagggcagagcctggaggccgccggcaggtccaggaccacagtggctccacccacaaggttaagatataatgtaatatctcatgacagtatacagatttcatggaaggctccaagagggaaatttggtggttacaaacttcttgtgactccaacttcaggtggaaaaactaaccagctgaatctgcagaacactgcaactaaagcaattattcaaggccttatgccagaccagaattacacagttcaaattattgcatacaataaagataaagaaagcaagccagctcaaggccaattcagaattaaagatttagaaaaaagaaaggatccaaagcccagagtcaaagttgtggacagaggaaatgggagtagaccatcttcaccagaagaagtgaaatttgtctgtcaaactccagcaattgctgacattgtaatcctggtcgatggttcatggagtattggaagattcaacttcagactggttcggcatttcttggaaaacctggttacagcattcgatgtgggctcagagaagacacgaattggtcttgcacagtatagtggtgaccccagaatagaatggcacttgaatgcatttagcacaaaagatgaagtgattgaagctgtccgaaacctcccatataaaggaggaaatacactaacaggtcttgctttgaactacatttttgaaaatagcttcaaaccagaagcaggatcaaggactggagtatccaaaattggcattttaatcacagatggaaaatcccaagatgacattattccaccatctagaaatcttcgtgagtctggtgtagaactgtttgccataggggtgaaaaacgcggatgtgaatgagctgcaggagatcgcctctgaaccagacagcactcatgtgtacaatgttgccgaattcgatctgatgcacacagttgtggagagtctgaccaggactctctgctctagagtggaagaacaggacagagaaattaaagcctcagcccatgccatcactgggccgcctacggagttgattacttctgaagtcactgccagaagctttatggttaactggactcatgccccaggaaatgtggaaaaatacagagttgtgtattatcctaccaggggtggaaaaccagacgaggtggtggtagatggaactgtatcttccacagtgttgaaaaacttgatgtctttaactgaatatcagatagcagtctttgcaatctatgcccacactgctagtgaaggcctacggggaactgaaactacacttgctttaccgatggcttctgaccttctactgtacgacgtgactgagaacagcatgcgagtcaaatgggatgcagtgcctggggcctcaggttacctgatcctttatgctcctctaacagagggcctggctggggatgaaaaagagatgaaaattggagagacccacacagatattgaattgagtgggttgttgcccaatacagaatacacagtcacagtttatgccatgtttggagaagaggccagtgatcctgttacgggacaagaaacaacattggctttaagtccaccaagaaacctgagaatctccaatgttggctctaacagtgctcgattaacctgggacccaacttcaagacagatcaatggttatcgaattgtatataacaatgcagatgggactgaaatcaatgaggttgaagtcgatcctattactaccttccctctgaagggcttgacacctctcacagagtatactattgctattttctccatctatgatgaaggacagtcagagcctctgactggagtttttaccaccgaggaagttccagcccagcaatacttagaaattgatgaggtgacgacagacagttttagggtgacctggcatcccctctcagctgatgaagggctacacaaattgatgtggattccagtctatggggggaagactgaggaggttgtcctgaaagaagagcaggactcacatgttattgaaggcctggagcccggtacggagtatgaagtttcactattggccgtacttgatgatggaagcgagagtgaggtggtgactgctgtcgggaccacacttttccagacgggaatcagaaacctagttgtaggtgatgaaactacttctagcctgcgggtaaaatgggacatttctgacagcgatgtgcagcagtttagggtgacctacatgacagctcaaggggaccctgaggaagaagtcataggaacggttatggtgcctggaagccagaacaacctccttctgaagcctctgcttcctgatactgaatacaaagtcacagtgactcccatctacacggatggcgaaggcgtcagcgtctccgctcctggaaaaaccttaccatcctcggggccccagaacttgcgggtgtccgaggaatggtataaccggttgcgcattacgtgggaccccccatcttccccggtgaaaggctatagaattgtctacaaacctgtcagtgttcctggtccaacactggaaacgtttgtgggagctgacattaacaccatccttatcacaaacctcctcagcggaatggactacaatgtgaagatatttgcctcccaggcctcaggcttcagcgacgccctgacaggcatggtgaaaacattgttcttgggtgttaccaatctccaagccaaacatgttgaaatgaccagcttgtgtgcccactggcaggtacatcgccatgccacagcctatagggttgttatagaatccctccaggataggcaaaagcaagaatccactgtgggtggagggacaaccaggcattgcttctatggacttcagcctgattctgaatataaaatcagtgtttatacaaagctccaggagattgaaggacctagtgtgagcataatggaaaaaacacaatcacttcctacacgaccaccaacttttcctccaaccattccaccagcaaaagaagtatgtaaggcggccaaggctgacctggtatttatggtggatggatcctggagcattggagatgaaaatttcaataagatcatcagctttctatacagcactgttggagccctgaacaagattggcacagatggaacccaagttgcaatggttcagttcactgatgatcccagaacagaatttaaactaaatgcttacaaaaccaaagagactcttcttgatgcaattaaacacatttcatacaaaggaggaaatacaaaaacaggaaaagcaattaagtatgttcgagataccttgttcactgcagagtcaggtacaagaaggggcatcccaaaggttatcgtggttataactgatggaagatcacaagatgatgtgaacaaaatctccagggagatgcaattagatggctatagcatttttgcaattggtgtggccgatgcagattactcggagttggttagcattggcagtaagcccagcgcacgccatgtcttctttgtggatgactttgacgcctttaagaaaatcgaagatgagttaattacttttgtctgcgaaacagcatcagcaacctgtccagtggtacacaaggatggcattgatcttgcaggatttaagatgatggaaatgtttggtttggttgaaaaagatttttcatcagtggaaggggtttctatggagcctggtaccttcaatgtgtttccatgttaccaactccataaagatgccctggtttcccagccaaccaggtacttgcacccagaaggattgccctccgactacacaatcagttttctattccggattcttcctgacactccacaggagccatttgctctttgggagattttaaataaaaattctgacccattggttggggttattttagacaatggtgggaaaactctaacatatttcaactatgaccagagtggggattttcaaactgttactttcgaaggacctgaaattaggaaaattttttatggaagctttcacaagctacacattgttgtcagtgagactttggtcaaagtggttattgactgcaagcaagtgggtgagaaggcaatgaacgcatcagctaatatcacgtcagatggtgtagaagtgctagggaaaatggttcgatcaagaggaccaggtggaaactctgcaccgttccagttacagatgtttgatattgtttgctccacatcatgggccaatacagacaaatgctgtgaacttccaggcctgagagatgatgagtcttgcccagaccttccccattcctgctcctgttctgaaaccaatgaagtggctctgggaccagcgggcccaccaggtggtccaggactccgaggaccaaagggccagcaaggtgaaccgggtccaaagggaccagatggccctcggggtgaaattggtctgccaggacctcagggtccacctggacctcaaggaccaagtggtctgtccattcaaggaatgcccggaatgccaggagaaaaaggagagaaaggagatactggccttccaggtccacagggtatcccaggaggcgttggttcaccaggacgtgatggctcaccaggccagaggggccttccgggaaaggatggatcctcgggacctccaggaccaccagggccaataggcattcctggcacccctggagtcccagggatcacaggaagcatgggaccgcaaggcgccctgggaccacctggtgtccctggagcaaagggggaacgaggagagcggggtgacctgcagtctcaagccatggtgagatcagtggcgcgtcaagtatgcgaacagctcatccagagtcacatggccaggtacactgccatcctcaaccagattcccagccactcctcatccatccggactgtccaagggcctcctggggagcctgggaggccaggctcacctggagcccctggtgaacaaggacccccaggcacaccaggcttccccggaaatgcaggcgtgccagggaccccaggagaacgaggtctaactggtatcaaaggagaaaaaggaaatccaggcgttggaacccaaggtccaagaggcccccctggaccagcaggaccttcaggggagagtcggcctggcagccctgggccccctggctctcctggaccaagaggcccaccaggtcatctgggggttcctggaccccaaggtccttctggccagcctggatattgtgacccctcatcatgttctgcctatggtgtgagagctccccatccagatcagccagagttcacccctgtccaagatgagctggaagccatggaactgtggggccctggagtctgatagcctcaggagaaatttgaagaccaactgcaagaactcttaaggaatcttgtttgagaaaatgttgttatgtggtttgtatgctacttttggggggcagggctcatttcagcagcctaaatctcctccttggataatgttaatattattattattattaacaaaaaatatatatttttaaaaagttcccttaatctatgacatggtagcaatgatttccctttggtgtcttaatggcatgtcagataatttgtttttccagagaagagagctcaaagaggaattgggaaaaataaattgaactctggaatcttctctctcaagtcctaaaatgaacaaacagatatgattgtgtttgagggaaatatgtccctagcaggaaaagaattcaaagaggttcaaagaatatgtcacttactcctacttgctgtaggaataaccttgctgataagaaaaaaagggacaatattggagaaactacctcttgtttaattgatctgtccaactctgagatcacttggtaactggtttcatgtgtatccaaaaatcagcatttggatttaagctttctgaatttggtagtttaagaaacagatttagtttttcagtggttttaactcatgtgaaataatgattttccaccagctctgatgcaaagagatataattttaatgaacgatttatccagcagtgtgttccaggggttgcctctccttatctacggggattactttgtacatgcagataagttttcgcaaacctatttccattttcttttgtaagcaaataaaactttaaaacaatgta

SEQ ID NO: 7610 - protein, 1812 aa, Homo sapiens
MQDGDYGSKISKGVDSSRGPTQQASYYTAPGRIGIRGSWASAHGAITVASVLGQSLEAAGRSRTTVAPPTRLRYNVISHDSIQISWKAPRGKFGGYKLLVTPTSGGKTNQLNLQNTATKAIIQGLMPDQNYTVQIIAYNKDKESKPAQGQFRIKDLEKRKDPKPRVKVVDRGNGSRPSSPEEVKFVCQTPAIADIVILVDGSWSIGRFNFRLVRHFLENLVTAFDVGSEKTRIGLAQYSGDPRIEWHLNAFSTKDEVIEAVRNLPYKGGNTLTGLALNYIFENSFKPEAGSRTGVSKIGILITDGKSQDDIIPPSRNLRESGVELFAIGVKNADVNELQEIASEPDSTHVYNVAEFDLMHTVVESLTRTLCSRVEEQDREIKASAHAITGPPTELITSEVTARSFMVNWTHAPGNVEKYRVVYYPTRGGKPDEVVVDGTVSSTVLKNLMSLTEYQIAVFAIYAHTASEGLRGTETTLALPMASDLLLYDVTENSMRVKWDAVPGASGYLILYAPLTEGLAGDEKEMKIGETHTDIELSGLLPNTEYTVTVYAMFGEEASDPVTGQETTLALSPPRNLRISNVGSNSARLTWDPTSRQINGYRIVYNNADGTEINEVEVDPITTFPLKGLTPLTEYTIAIFSIYDEGQSEPLTGVFTTEEVPAQQYLEIDEVTTDSFRVTWHPLSADEGLHKLMWIPVYGGKTEEVVLKEEQDSHVIEGLEPGTEYEVSLLAVLDDGSESEVVTAVGTTLFQTGIRNLVVGDETTSSLRVKWDISDSDVQQFRVTYMTAQGDPEEEVIGTVMVPGSQNNLLLKPLLPDTEYKVTVTPIYTDGEGVSVSAPGKTLPSSGPQNLRVSEEWYNRLRITWDPPSSPVKGYRIVYKPVSVPGPTLETFVGADINTILITNLLSGMDYNVKIFASQASGFSDALTGMVKTLFLGVTNLQAKHVEMTSLCAHWQVHRHATAYRVVIESLQDRQKQESTVGGGTTRHCFYGLQPDSEYKISVYTKLQEIEGPSVSIMEKTQSLPTRPPTFPPTIPPAKEVCKAAKADLVFMVDGSWSIGDENFNKIISFLYSTVGALNKIGTDGTQVAMVQFTDDPRTEFKLNAYKTKETLLDAIKHISYKGGNTKTGKAIKYVRDTLFTAESGTRRGIPKVIVVITDGRSQDDVNKISREMQLDGYSIFAIGVADADYSELVSIGSKPSARHVFFVDDFDAFKKIEDELITFVCETASATCPVVHKDGIDLAGFKMMEMFGLVEKDFSSVEGVSMEPGTFNVFPCYQLHKDALVSQPTRYLHPEGLPSDYTISFLFRILPDTPQEPFALWEILNKNSDPLVGVILDNGGKTLTYFNYDQSGDFQTVTFEGPEIRKIFYGSFHKLHIVVSETLVKVVIDCKQVGEKAMNASANITSDGVEVLGKMVRSRGPGGNSAPFQLQMFDIVCSTSWANTDKCCELPGLRDDESCPDLPHSCSCSETNEVALGPAGPPGGPGLRGPKGQQGEPGPKGPDGPRGEIGLPGPQGPPGPQGPSGLSIQGMPGMPGEKGEKGDTGLPGPQGIPGGVGSPGRDGSPGQRGLPGKDGSSGPPGPPGPIGIPGTPGVPGITGSMGPQGALGPPGVPGAKGERGERGDLQSQAMVRSVARQVCEQLIQSHMARYTAILNQIPSHSSSIRTVQGPPGEPGRPGSPGAPGEQGPPGTPGFPGNAGVPGTPGERGLTGIKGEKGNPGVGTQGPRGPPGPAGPSGESRPGSPGPPGSPGPRGPPGHLGVPGPQGPSGQPGYCDPSSCSAYGVRAPHPDQPEFTPVQDELEAMELWGPGV

SEQ ID NO: 7611 - DNA, 749 bp, Homo sapiens
ctcaccctttcactctatatacctttaccttgctttaaaaaaaatagtgttcatgtatcacctgaaatgttatgtgactgtggggatcatgttgttataatgaacacaagacacattgcattttctggaaacaaatgggaacaaaaagtatactcttcgcatactggctacccaggtggatttagacaagtaacagctgctcagcttcacctgagggatccagtggcaattgtaaaactagctatttatggcatgctgccaaaaaaccttcacagaagaacaatgatggaaaggttgcatctttttccagatgagtatattccagaagatattcttaagaatttagtagaggagcttcctcaaccacgaaaaatacctaaacgtctagatgagtacacacaagaagaaatagacgccttcccaagattgtggactccacctgaagattatcggctataagagaataagaattgcagaaaataacagtgaagtgattgaaactttcttctgatgagtttctctaacctacaggatggagtaaaacaactgctacagttcagcacctgttttatgtgccgaatcactgtggggaaaggtcaggaaggtatagtccttcaataggaaattgtaattaaaatataattttatagaaccatttttatgtaatctgatttgaatgttatagttgataataataaaatcacttacttggttgactatttagtgttgcatttaatgataaaaaacag

SEQ ID NO: 7612 - protein, 130 aa, Homo sapiens
MLCDCGDHVVIMNTRHIAFSGNKWEQKVYSSHTGYPGGFRQVTAAQLHLRDPVAIVKLAIYGMLPKNLHRRTMMERLHLFPDEYIPEDILKNLVEELPQPRKIPKRLDEYTQEEIDAFPRLWTPPEDYRL

SEQ ID NO: 7613 - DNA, 755 bp, Homo sapiens
atgcagccacctggcaaacttgctgctatggcatctataagacttcagggattacataaacctgtgtaccatgcactgagtgactgtggggatcatgttgttataatgaacacaagacacattgcattttctggaaacaaatgggaacaaaaagtatactcttcgcatactggctacccaggtggatttagacaagtaacagctgctcagcttcacctgagggatccagtggcaattgtaaaactagctatttatggcatgctgccaaaaaaccttcacagaagaacaatgatggaaaggttgcatctttttccagatgagtatattccagaagatattcttaagaatttagtagaggagcttcctcaaccacgaaaaatacctaaacgtctagatgagtacacacaagaagaaatagacgccttcccaagattgtggactccacctgaagattatcggctataagagaataagaattgcagaaaataacagtgaagtgattgaaactttcttctgatgagtttctctaacctacaggatggagtaaaacaactgctacagttcagcacctgttttatgtgccgaatcactgtggggaaaggtcaggaaggtatagtccttcaataggaaattgtaattaaaatataattttatagaaccatttttatgtaatctgatttgaatgttatagttgataataataaaatcacttacttggttgactatttagtgttgcatttaatgataaaaaacag

SEQ ID NO: 7614 - protein, 154 aa, Homo sapiens
MQPPGKLAAMASIRLQGLHKPVYHALSDCGDHVVIMNTRHIAFSGNKWEQKVYSSHTGYPGGFRQVTAAQLHLRDPVAIVKLAIYGMLPKNLHRRTMMERLHLFPDEYIPEDILKNLVEELPQPRKIPKRLDEYTQEEIDAFPRLWTPPEDYRL

SEQ ID NO: 7615 - DNA, 1140 bp, Homo sapiens
gacgcatttccggttcccttcgtttaggtcggctggaaattatgtcctccgtcggttttccgcagtttttccaccaagcgagatatttttgggagttattccctaaataactgcattatatgctcctttcatgacgaaattgctgccgtggagaagactggaggaaactcgaggaagagggagaagccgacaagtgctcgacgggctaggaactgtcctgcttgggtgttagcgtttcccgccgggccagtaaggctgagtgacccggcgtggctactaggagaaggacgtacggtcctgctagtagaggaatatgtcgagtttctctagggcgccccagcaatgggccacttttgctagaatatggtatctcttagatgggaaaatgcagccacctggcaaacttgctgctatggcatctataagacttcagggattacataaacctgtgtaccatgcactgagtgactgtggggatcatgttgttataatgaacacaagacacattgcattttctggaaacaaatgggaacaaaaagtatactcttcgcatactggctacccaggtggatttagacaagtaacagctgctcagcttcacctgagggatccagtggcaattgtaaaactagctatttatggcatgctgccaaaaaaccttcacagaagaacaatgatggaaaggttgcatctttttccagatgagtatattccagaagatattcttaagaatttagtagaggagcttcctcaaccacgaaaaatacctaaacgtctagatgagtacacacaagaagaaatagacgccttcccaagattgtggactccacctgaagattatcggctataagagaataagaattgcagaaaataacagtgaagtgattgaaactttcttctgatgagtttctctaacctacaggatggagtaaaacaactgctacagttcagcacctgttttatgtgccgaatcactgtggggaaaggtcaggaaggtatagtccttcaataggaaattgtaattaaaatataattttatagaaccatttttatgtaatctgatttgaatgttatagttgataataataaaatcacttacttggttgactatttagtgttgcatttaatgataaaaaacag

SEQ ID NO: 7616 - protein, 178 aa, Homo sapiens; identical to SEQ ID NO: 1065

SEQ ID NO: 7617 - DNA, 2372 bp, Homo sapiens
ctcattttgcattgattttaaccattcagcaaaatcctctaatagtaaagaaatttggctcattgtattcaaaattctattccattcagcaaacattagctaggaagccactgtgttccacatgctctacgctgaatgagcacttagcagctttttgaaattgtctttacaactgatctagggaattttatactggctttccaaagaagtatgaaatatttatacatctttggaaatatctgacaggtaggcgccttcaataagtaaaaaataagtatcaccaacaatcttttatatgtccaggcatcctctgcttgccctgactctgtaattattgtgcagatttgaatatactgagaaagtgataacaataggagaaaggatgttaaatattgttaaatgcttttcagtgaagaagcacattatcaagagtatctattgtgttttctgtatgttgatagtgacccagcctatccaaaccacaatttttaaaattcatttaaattgcctaaaatattataaatattttgctatattgggttttagaacaagcttacaggacagtagagctctgtgatcctaaagttataaaattttatcctgattcttaagacaacatgtcttaagacaacatgtcttaagaattgatcaaagtgctgccttatttgatgccatgtccttggccagatattggattcccacttgtaatagtgcgctctgcagagagctgtaatttactgtgtgataatccttttatcgaaaattcctgtacacatactataatgagaagagggaattatatctactctccttataagaatgcctataagacacttccatactgatatcttaccgttatttaaaaagagttcccaaaatcaatttatcatccagtctcaatacagttcattctcccagctgccttatttctgcatcatgagtacaatataaatgttcattcttttggttacccacactcttcattttatcattcctccttagtctgtctaattccaatgctttcttcttttaaaatgtcttagatatgtgctttactctttagtgtgcctttcagtatctaaactcaaactttaaaaaatcttaccttgattactgaaacagccacttaactcttcttgtctccagcttttctccactgcagttcattgtgtctactgttggcaggtcaatcttccaactcttcatttttctgaatattggatacatagtaggggggaaagtggtcctggtcaggggaatacaattaataaagatatcatgatttgagtctagagcaacacatgaaaggttgaggaggttgattagacagaaaccatggttgtgtctgtggagagtgacattggagaggtggactagtggtaacgacactgtctagctaagcaaatttagcaaaggagttagagctttatcctgaaaaattttaagctgagaggtgactttttaaaaattataagcctttagaaggcttgatctttttattttcctttatatggccagcacctggcacaatttttggttcttagaagttcaataaatgtttcttagataaataaatgactcaaagattttcattttcaaatttttttctggccacagttggagcactgattgaaaggtagtggcactaaacccggtagacccagtacatatacttgtcagatgagaaagcatgagaatgagccatagcagtgtctttttgcaattgaaaagagggaaataaacagcacattttaaaaaataggtatcttattataatgggattacttgtattattaacctaatgtacttttggggaatttttataaggtttttattttaaagattttatgttttccttattctacgagcattcttttgcttatttttttaacacttatgaagtattagtaatttattgctaagaaagatattttaagaaaattaagtctaaatttttttttaatgtagtatattccagaagatattcttaagaatttagtagaggagcttcctcaaccacgaaaaatacctaaacgtctagatgagtacacacaagaagaaatagacgccttcccaagattgtggactccacctgaagattatcggctataagagaataagaattgcagaaaataacagtgaagtgattgaaactttcttctgatgagtttctctaacctacaggatggagtaaaacaactgctacagttcagcacctgttttatgtgccgaatcactgtggggaaaggtcaggaaggtatagtccttcaataggaaattgtaattaaaatataattttatagaaccatttttatgtaatctgatttgaatgttatagttgataataataaaatcacttacttggttgacta

SEQ ID NO: 7618 - protein, 64 aa, Homo sapiens [sequence omitted]

SEQ ID NO: 7619 - DNA, 718 bp, Homo sapiens
ctcaccctttcactctatatacctttaccttgctttaaaaaaaatagtgttcatgtatcacctgaaatgttatgtgactgtggggatcatgttgttataatgaacacaagacacattgcattttctggaaacaaatgggaacaaaaagtatactcttcgcatactggctacccaggtggatttagacaagtaacagctgctcagcttcacctgagggatccagtggcaattgtaaaactagctatttatggcatgctgccaaaaaaccttcacagaagaacaatgatggaaaggttgcatctttttccagatgagtatattccagaagatattcttaagaatttagtagaggagcttcctcaaccacgaaaaatacctaaacgtctagatgagtacacacaagaagaaatagacgccttcccaagattgtggactccacctgaagattatcggctataagagaataagaattgcagaaaataacagtgaagtgattgaaactttcttctgatgagtttctctaacctacaggatggagtaaaacaactgctacagttcagcacctgttttatgtgccgaatcactgtggggaaaggtcaggaaggtatagtccttcaataggaaattgtaattaaaatataattttatagaaccatttttatgtaatctgatttgaatgttatagttgataataataaaatcacttacttggttgact

SEQ ID NO: 7620 - protein, 130 aa, Homo sapiens; identical to SEQ ID NO: 7612

SEQ ID NO: 7621 - DNA, 724 bp, Homo sapiens
atgcagccacctggcaaacttgctgctatggcatctataagacttcagggattacataaacctgtgtaccatgcactgagtgactgtggggatcatgttgttataatgaacacaagacacattgcattttctggaaacaaatgggaacaaaaagtatactcttcgcatactggctacccaggtggatttagacaagtaacagctgctcagcttcacctgagggatccagtggcaattgtaaaactagctatttatggcatgctgccaaaaaaccttcacagaagaacaatgatggaaaggttgcatctttttccagatgagtatattccagaagatattcttaagaatttagtagaggagcttcctcaaccacgaaaaatacctaaacgtctagatgagtacacacaagaagaaatagacgccttcccaagattgtggactccacctgaagattatcggctataagagaataagaattgcagaaaataacagtgaagtgattgaaactttcttctgatgagtttctctaacctacaggatggagtaaaacaactgctacagttcagcacctgttttatgtgccgaatcactgtggggaaaggtcaggaaggtatagtccttcaataggaaattgtaattaaaatataattttatagaaccatttttatgtaatctgatttgaatgttatagttgataataataaaatcacttacttggttgact

SEQ ID NO: 7622 - protein, 154 aa, Homo sapiens; identical to SEQ ID NO: 7614

SEQ ID NO: 7623 - DNA, 1109 bp, Homo sapiens
gacgcatttccggttcccttcgtttaggtcggctggaaattatgtcctccgtcggttttccgcagtttttccaccaagcgagatatttttgggagttattccctaaataactgcattatatgctcctttcatgacgaaattgctgccgtggagaagactggaggaaactcgaggaagagggagaagccgacaagtgctcgacgggctaggaactgtcctgcttgggtgttagcgtttcccgccgggccagtaaggctgagtgacccggcgtggctactaggagaaggacgtacggtcctgctagtagaggaatatgtcgagtttctctagggcgccccagcaatgggccacttttgctagaatatggtatctcttagatgggaaaatgcagccacctggcaaacttgctgctatggcatctataagacttcagggattacataaacctgtgtaccatgcactgagtgactgtggggatcatgttgttataatgaacacaagacacattgcattttctggaaacaaatgggaacaaaaagtatactcttcgcatactggctacccaggtggatttagacaagtaacagctgctcagcttcacctgagggatccagtggcaattgtaaaactagctatttatggcatgctgccaaaaaaccttcacagaagaacaatgatggaaaggttgcatctttttccagatgagtatattccagaagatattcttaagaatttagtagaggagcttcctcaaccacgaaaaatacctaaacgtctagatgagtacacacaagaagaaatagacgccttcccaagattgtggactccacctgaagattatcggctataagagaataagaattgcagaaaataacagtgaagtgattgaaactttcttctgatgagtttctctaacctacaggatggagtaaaacaactgctacagttcagcacctgttttatgtgccgaatcactgtggggaaaggtcaggaaggtatagtccttcaataggaaattgtaattaaaatataattttatagaaccatttttatgtaatctgatttgaatgttatagttgataataataaaatcacttacttggttgact

SEQ ID NO: 7624 - protein, 178 aa, Homo sapiens; identical to SEQ ID NO: 1065

SEQ ID NO: 7625 - DNA, 689 bp, Homo sapiens
gcatttccggttcccttcgtttaggtcggctggaaattatgtcctccgtcggttttccgcagtttttccaccaagcgagatatttttgggagttattccctaaataactgcattatatgctcctttcatgacgaaattgctgccgtggagaagactggaggaaactcgaggaagagggagaagccgacaagtgctcgacgggctaggaactgtcctgcttgggtgttagcgtttcccgccgggccagtaaggctgagtgacccggcgtggctactaggagaaggacgtacggtcctgctagtagaggaatatgtcgagtttctctagggcgccccagcaatgggccacttttgctagaatatggtatctcttagatgggaaaatgcagccacctggcaaacttgctgctatggcatctataagacttcagggattacataaacctgtgtaccatgcactgagtgactgtggggatcatgttgttataatgaacacaagacacattgcatttgttacttttcatctctttccccaagtgcatcttaaatatttggaacaactgttttgcttccttgagccagcctttgcccattcctccccttaaaatacattcatgaaatctttatataatttaacaaaactgaatttacatccgtctttagtaatttcagctattggcagatctctat

SEQ ID NO: 7626 - protein, 97 aa, Homo sapiens
MSSFSRAPQQWATFARIWYLLDGKMQPPGKLAAMASIRLQGLHKPVYHALSDCGDHVVIMNTRHIAFVTFHLFPQVHLKYLEQLFCFLEPAFAHSSP

SEQ ID NO: 7627 - DNA, 3065 bp, Homo sapiens
gtttggatgtggaagccgagacctaaagttggggggtgatctctgaggagatggatcggtacctgctgctggtgatctggggggaaggaaaattcccgtcggcggccagtagggaggcagaacatgggccagaggtgtcgtcgggtgagggtactgagaatcagccggacttcacagcagcaaatgtttatcacctcttgaaaagaagcattagtgcttcaattaatccagaagatagtactttccctgcctgttcagtgggaggtatacctggttccaagaagtggttctttgcagtgcaggcaatatatggattttatcagttttgtagttctgattggcaagagatacattttgatacagaaaaagataaaattgaagatgttcttcaaacgaatatcgaagaatgtttgggtgctgttgagtgttttgaagaagaagacagtaatagcagggaatcattatccttggctgatctctatgaagaagctgcagaaaatttgcatcagctgtcagacaagcttcctgctcctggtagagcaatggtagatataatactgttgctttctgacaaagatcctcctaaattgaaagactatttacctactgtaggagcattaaaacatttgagagaatggtattcagcaaagatcactatagcaggaaatcattgtgaaataaactgtcagaaaattgcagaatacctttctgctaatgttgtatctttagaagatctcagaaatgttattgactcaaaggaattatggagggggaaaatacagatatgggaaagaaagtttggatttgaaattagttttcctgaattttgtttaaagggagtcacacttaagaattttagtacttctaatttaaatactgacttccttgccaaaaagatcataccatcaaaggataagaatattttgccaaaggttttccattattatggccctgctttagaatttgtgcagatgataaaattatcagatctaccctcctgctatatgtcggatattgaatttgagttaggattgacaaacagtaccaaacagaattctgtgttgctgttggagcagatttcttctctgtgtagcaaggttggtgctctttttgtattgccatgtaccattagtaacatactgattccacctcccaaccaactcagttcaagaaaatggaaggaatatatagctaaaaagcctaaaacaatcagtgttccagatgttgaagtgaaaggagagtgttctagctattatctcttgttacaaggtaatggcaatagaagatgtaaagccacattgattcactcagccaaccagatcaatggctcatttgcactcaatttaattcatggaaagatgaaaacaaagacagaagaagccaaattgagttttccttttgacttattatcacttccacatttttctggggagcagattgtacagagagagaaacagttagctaatgttcaagttttagctttggaagaatgcctaaaaagacgaaagttggcaaagcagcctgaaacagtttctgttgctgaactcaaaagtctgttagtactcacaaggaaacactttttagattattttgatgctgtgattcctaaaatgattctaagaaagatggacaaaattaaaaccttcaatatattaaatgattttagtccagtggaacctaattcctcaagtctaatggaaaccaatcctctggaatggccagaaaggcatgttcttcaaaatttggaaacttttgaaaaaactaaacaaaaaatgagaactggttcattacctcattcatctgaacagttgctgggccacaaagagggtcctcgggactcaatcacattgttggatgctaaagaattgctgaagtactttacctcagatggattacccattggagatcttcaacctttaccgattcaaaagggggaaaagacttttgttttgacaccagaacttagtcctgggaaacttcaggtcttaccttttgagaaagcctcagtatgtcattatcatggaattgaatattgcttggatgaccgaaaagctttggaaagagatggaggattttctgaacttcagtctcgtcttattcgttatgaaactcaaactacctgcaccagagaaagttttccagtacctactgtgttgagccctcttccatctcctgtagtttcgtcagatcctggaagtgtccctgacggagaagttttacaaaatgaacttcgaactgaagtatcccgattgaaacggagatctaaagatctgaattgcctttatcccagaaaaagacttgtgaaatctgaaagttcagagtctcttctttctcagacaactggtaatagtaatcactatcatcatcatgtgacatccagaaagccacaaacagaacggtccttaccagtgacttgtccattggttccaattcctagctgtgaaactccaaaacttgctacaaagaccagttcaggtcaaaaaagtatgcatgaatcaaaaacatcaaggcaaattaaggaatcaagatcacagaaacacacacggatactgaaagaagtagttactgaaaccctgaagaaacacagtattaccgagactcatgaatgtttcactgcatgcagccagcgtctctttgaaatctctaagttctatctaaaggatcttaaaacttcaaggggtctatttgaagaaatgaagaaaacagcaaacaacaatgctgtacaggtgattgactgggtattagaaaagacaagcaagaaatgatacataatcattctctttaagacaattataaattggatggagctattattcactacttcttttcttagtttgaaaattataaacaaattttaagctttattcaaagaatagatgttatatttctaaagaatttcatgaatatatattctatatttgtatagtttgagggatgctatgttaatgtatttttaattagatacatattttgtaaagtgttactatattttaaagttatttttatatgttttaaaatgtttactcttatttaattattacaataaacagaatttttttttttta

SEQ ID NO: 7628 - protein, 904 aa, Homo sapiens; identical to SEQ ID NO: 1067

SEQ ID NO: 7629 - DNA, 1978 bp, Homo sapiens
ggatgtggaagccgagacctaaagttggggggtgatctctgaggagatggatcggtacctgctgctggtgatctggggggaaggaaaattcccgtcggcggccagtagggaggcagaacatgggccagaggtgtcgtcgggtgagggtactgagaatcagccggacttcacagcagcaaatgtttatcacctcttgaaaagaagcattagtgcttcaattaatccagaagatagtactttccctgcctgttcagtgggaggtatacctggttccaagaagtggttctttgcagtgcaggcaatatatggattttatcagttttgtagttctgattggcaagagatacattttgatacagaaaaagataaaattgaagatgttcttcaaacgaatatcgaagaatgtttgggtgctgttgagtgttttgaagaagaagacagtaatagcagggaatcattatccttggctgagtatgcttatatggtttttgtattatcattaaaatacttaatattagacagttattttaatccatgagaatgaagattatatattttagcatctttactgaagaaactctagttaattgaaatttttgactctcaatttgggccttttatttgaataaaattctttaaaatgcatgtttcttaagcttacataatgtcaagaatcataaaaagtgatattttaataaacatgttcctttcttgaagataaattctgcctaatattttattttatttttgaaacagggtcttgctgtgtcacccaggctgcagtgcagtggtgcagtcacggcttgctacagcctagacctgggctcaagcgatcctccgacctcagcttccagagtagctggaactacaggtgtgcaccaccacacccagctaatttttgtatttttttttgtagaaatatcatttcgccatgttgttcaggctgacctcgaattcctgagctcaagcaatctgcctgccttggcctcccaaactgctgggagtacagctgtgagccaccgtgcctggccaataatgtattttaaaagcttgaatagaaatgttatttaatgttaatagctagcattcataccaaagtatcattttcattttgctatttgaggctgaaatatgtgacttctttaatttatgtgtatttgcagcatttcaggtaccttttaaaatccatagagtttgtgaggattatatgtacatgattgagttcacttttaggtttttttcaattgtggtacaatatgtaagttgatccaggtgacataagttgtgataataatttttctcttgatgaaatatcccacctcttatagttaataccttttattttagtctttcataacatttcatgacaaaactgctcttattttagtattcacatattatatctgtaagtagctgtagacttaaaaattttcattttcctttttccagatcatatttgtttgtactgattaataaaaggagacctttccaaaccagagaaatatcattgaaccagggattagtagaggtagactttatttacacaatcttaggccagtcacgtaacttctctggtcgtttgttttctcatccataaagtattgaagtacttttagataatttcttaggtgctttcatttacccttaaaaactcttatcatcccatatgttttcctaccactgttaaagacaagtatagccaggcacagtggctcacgcctgtaatcccagcactttgggaggccgaggcgggtgggtcacaaggtcaggagttcaagaccagcctggctaacatggtgaaaccccttttctactgaaaatagaaaaaattagccgggcgtggtggcaggtgtctgtaatctcagctactcgggagcctgaggctggagaattgcttgaacccgggaggcggaggttgcagtgagctgagattctgccactgtactccagcctgagcgacagagcaacactccgtctc

SEQ ID NO: 7630 - protein, 163 aa, Homo sapiens
MDRYLLLVIWGEGKFPSAASREAEHGPEVSSGEGTENQPDFTAANVYHLLKRSISASINPEDSTFPACSVGGIPGSKKWFFAVQAIYGFYQFCSSDWQEIHFDTEKDKIEDVLQTNIEECLGAVECFEEEDSNSRESLSLAEYAYMVFVLSLKYLILDSYFNP

SEQ ID NO: 7631 - DNA, 574 bp, Homo sapiens
gtggaagccgagacctaaagttggggggtgatctctgaggagatggatcggtacctgctgctggtgatctggggggaaggaaaattcccgtcggcggccagtagggaggcagaacatgggccagaggtgtcgtcgggtgagggtactgagaatcagccggacttcacagcagcaaatgtttatcacctcttgaaaagaagcattagtgcttcaattaatccagaagatagtactttccctgcctgttcagtgggaggtatacctggttccaagaagtggttctttgcagtgcaggcaatatatggattttatcaggtaatataaatttaaagatagctactaatgaatgtctttactaatataaataatttcatgatccattatttaatacaatcttttgatttgttagttttgtagttctgattggcaagagatacattttgatacagaaaaagataaaattgaagatgttcttcaaacgaatatcgaagaatgtttgggtgctgttgagtgttttgaagaagaagacagtaatagcagggaatcattatccttggctgagtatgcttatatg

SEQ ID NO: 7632 - protein, 93 aa, Homo sapiens [sequence omitted]

SEQ ID NO: 7633 - DNA, 3372 bp, Homo sapiens
gtacttctaatttaaatactgacttccttgccaaaaagatcataccatcaaaggataagaatattttgccaaaggttttccattattatggccctgctttagaatttgtgcagatgataaaattatcagatctaccctcctgctatatgtcggatattgaatttgagttaggattgacaaacagtaccaaacagaattctgtgttgctgttggagcagatttcttctctgtgtagcaaggttggtgctctttttgtattgccatgtaccattagtaacatactgattccacctcccaaccaactcagttcaagaaaatggaaggaatatatagctaaaaagcctaaaacaatcagtggtaagtattacatgtttcggttgttttaatgatgcagcatagttaatgtatgtatcaaatttgaagtgaagataacatttctatatgagaaaacaggatttcatattattgctactgattaccaggagtccacatcattttaagatttttaattgcaacctactgtaacataaagtatctctaaccatattcatttaaaatgctagtgatctaaaggcagaactcttggttcattagatagctaattatactgaacatgggttttttagagacatttcaggaatcaaatttgtgaaaagagcagttcatttattatatggtacataaaaaacctgtgataattttttgaagaaattagtagaagttatttatttatttatttagagatagagtctcgctttgtcacccaggctagagtgcggtggcacgatcttggttcactgcaacctccacctcctgggttcaagtgattctcctgcttcagcctcccaagtatatgggattacaggcacccaccaccatgcctggctaatttttatatttttagtcgagatgcggtttcaccatgttggccaggctggtctcgaactcctgacctcaagtgattcacctgcctccgcctcccagagtgctaggattacaggcgtgggccaccgcacttgacctaaagttttttatttaacagtttaactgtatgttacacagtattccaagtattctattttagaaatattgattcatttaatttttgtaataaccccatatacttatttttatccccattttacagatgaaggaattggagcttagagaagtgacagagctgttaattggcagaacctacggctctgtcacttctccaagggtttgaatctgtgctcttgtgctctttaccactacactgtgtttccactctgttcctctagtatgttcaagatgtctttatccaaatgaaaatttctgttataaaatcagagattaagtccaaaccctagtatttcatgaggtgattctggcttagaatgttaaaattgctttcccaaagtcacattggtgaagtgtgttccatcatactttggccttgatgtgtgttttttaaattgaacaaaaattgtttactttttttttagcttatagtttttgtgacccataatgtgatgggactaagaactgtaattgaaactattatgaagaaatctgtagaaatactccacagcgcccttgaattttgaggaatacagttttaaaatcagtagcttatacagtacagattttctatttttctgtataagaaacaggagagatactgaattctattttagcagatgttgaatttcaaatgtaggtaagatatctatgtggaaatttaaatgtagagtttgaaatttagatacagatctctaggtaatagtcagggctggagatctagattttgagttttccagcagttttgtttatctattgcgtaataagccaccccgaaacttagtggcttgaaagagcaaacattttatttgcttatagtttgcagtctgagctgccctcagcagagtagttctactgatctcacgagaagtcattgatgtgggtgttttgaacttgcagatgatttggaggctgggttcagtggagctggctggctttctctctccgtttagtcttagagccttttccttgccacatggtcttctcagatgatctctcctgcaagttagctggaatttttccatggtggctcaggacaaacatatagaacttgaaactaccaagactttttaaggcttaatcccaggactagcccagtcttacttctgttacattccgttatttagagctagttacaagaatagtctaaattcaagggggaagtacctatccaaaggtgtgaataataggaagccaccaatgtaaaaagtctaccataggtgcctgtaagttaggaatgtagaatgttagttaggaatggttgaaaacaacaatacataaagaacatggctagagaagagagccaaggatagggtctttagaaatatagtcatccctcagtatccactggggattggttccaggacccctgtggataacaaaattcctagatgctcaaacccctcatataaaatggagtaggagttgtatataacttctgcacatcctcctgtatattttacatcatctctagattacttataatgcctgatacaatgtaaatgctatgtaaatacttgttatgctatattctttttttaaatttgtattcttcttggttattaatttgttatttttaaattttttttggaatattttcaattcgtggttggttgaatccacagtgtgaaacccatggatgtagaggcaaattgtacctgcatgtaaggtgaaagtggagaaaagttaggaaatgatatggtaaatggtctttggaagaccctagcaagttatcgttaacatcagcattaaaataccatttatacagagcgtggtgcaaagtgtgggaaataaaggagcatcaaactgggtttttacacttaaggaagtagattcattgtctttttcgctgtgaaatttatactcaagtgaggaatgtacctaggacaataattataagtctgtttggccaacactgtgaaggcaaaatggaaggtacttccagagtgtatgacctaacatagccttaagagctcaagaaaagtttcctataggaggagacattattactgtaacttactgcaccatactaatacatgaataagtgcagcttttaacccttctcatctcacagggaacaaatatatatttggtaattttggcacttgctaaaacaaaatcagaaatagattttctgagtggcaatatagtcaatttcgcttattctacatatagtcatgggataatactgatccatttctcagctttacatatgtctaaaattgattagacatatgtagacatatgcaatcagttaatcataatattaacatctccttaataaacttgagtgtattctggcaacccatt

SEQ ID NO: 7634 - protein, 90 aa, Homo sapiens
MIKLSDLPSCYMSDIEFELGLTNSTKQNSVLLLEQISSLCSKVGALFVLPCTISNILIPPPNQLSSRKWKEYIAKKPKTISGKYYMFRLF

SEQ ID NO: 7635 - DNA, 8461 bp, Homo sapiens
gggcaagcagtggtttctcctccttcctcccaggaagggccaggaaaatggccctggtcctggagatcttcaccctgctggcctccatctgctgggtgtcggccaatatcttcgagtaccaggtggatgcccagccccttcgtccctgtgagctgcagagggaaacggcctttctgaagcaagcagactacgtgccccagtgtgcagaggatggcagcttccagactgtccagtgccagaacgacggccgctcctgctggtgtgtgggtgccaacggcagtgaagtgctgggcagcaggcagccaggacggcctgtggcttgtctgtcattttgtcagctacagaaacagcagatcttactgagtggctacattaacagcacagacacctcctacctccctcagtgtcaggattcaggggactacgcgcctgttcagtgtgatgtgcagcaggtccagtgctggtgtgtggacgcagaggggatggaggtgtatgggacccgccagctggggaggccaaagcgatgtccaaggagctgtgaaataagaaatcgtcgtcttctccacggggtgggagataagtcaccaccccagtgttctgcggagggagagtttatgcctgtccagtgcaaatttgtcaacaccacagacatgatgatttttgatctggtccacagctacaacaggtttccagatgcatttgtgaccttcagttccttccagaggaggttccctgaggtatctgggtattgccactgtgctgacagccaagggcgggaactggctgagacaggtttggagttgttactggatgaaatttatgacaccatttttgctggcctggaccttccttccaccttcactgaaaccaccctgtaccggatactgcagagacggttcctcgcagttcaatcagtcatctctggcagattccgatgccccacaaaatgtgaagtggagcggtttacagcaaccagctttggtcacccctatgttccaagctgccgccgaaatggcgactatcaggcggtgcagtgccagacggaagggccctgctggtgtgtggacgcccaggggaaggaaatgcatggaacccggcagcaaggggagccgccatcttgtgctgaaggccaatcttgtgcctccgaaaggcagcaggccttgtccagactctactttgggacctcaggctacttcagccagcacgacctgttctcttccccagagaaaagatgggcctctccaagagtagccagatttgccacatcctgcccacccacgatcaaggagctctttgtggactctgggcttctccgcccaatggtggagggacagagccaacagttttctgtctcagaaaatcttctcaaagaagccatccgagcaatttttccctcccgagggctggctcgtcttgcccttcagtttaccaccaacccaaagagactccagcaaaacctttttggagggaaatttttggtgaatgttggccagtttaacttgtctggagcccttggcacaagaggcacatttaacttcagtcaatttttccagcaacttggtcttgcaagcttcttgaatggagggagacaagaagatttggccaagccactctctgtgggattagattcaaattcttccacaggaacccctgaagctgctaagaaggatggtactatgaataagccaactgtgggcagctttggctttgaaattaacctacaagagaaccaaaatgccctcaaattccttgcttctctcctggagcttccagaattccttctcttcttgcaacatgctatctctgtgccagaagatgtggcaagagatttaggtgatgtgatggaaacggtactcagctcccagacctgtgagcagacacctgaaaggctatttgtcccatcatgcacgacagaaggaagctatgaggatgtccaatgcttttccggagagtgctggtgtgtgaattcctggggcaaagagcttccaggctcaagagtcagaggtggacagccaaggtgccccacagactgtgaaaagcaaagggctcgcatgcaaagcctcatgggcagccagcctgctggctccaccttgtttgtccctgcttgtactagtgagggacatttcctgcctgtccagtgcttcaactcagagtgctactgtgttgatgctgagggtcaggccattcctggaactcgaagtgcaatagggaagcccaagaaatgccccacgccctgtcaattacagtctgagcaagctttcctcaggacggtgcaggccctgctctctaactccagcatgctacccaccctttccgacacctacatcccacagtgcagcaccgatgggcagtggagacaagtgcaatgcaatgggcctcctgagcaggtcttcgagttgtaccaacgatgggaggctcagaacaagggccaggatctgacgcctgccaagctgctagtgaagatcatgagctacagagaagcagcttccggaaacttcagtctctttattcaaagtctgtatgaggctggccagcaagatgtcttcccggtgctgtcacaatacccttctctgcaagatgtcccactagcagcactggaagggaaacggccccagcccagggagaatatcctcctggagccctacctcttctggcagatcttaaatggccaactcagccaatacccggggtcctactcagacttcagcactcctttggcacattttgatcttcggaactgctggtgtgtggatgaggctggccaagaactggaaggaatgcggtctgagccaagcaagctcccaacatgtcctggctcctgtgaggaagcaaagctccgtgtactgcagttcattagggaaacggaagagattgtttcagcttccaacagttctcggttccctctgggggagagtttcctggtggccaagggaatccggctgaggaatgaggacctcggccttcctccgctcttcccgccccgggaggctttcgcggagcagtttctgcgtgggagtgattacgccattcgcctggcggctcagtctaccttaagcttctatcagagacgccgcttttccccggacgactcggctggagcatccgcccttctgcggtcgggcccctacatgccacagtgtgatgcgtttggaagttgggagcctgtgcagtgccacgctgggactgggcactgctggtgtgtagatgagaaaggagggttcatccctggctcactgactgcccgctctctgcagattccacagtgcccgacaacctgcgagaaatctcgaaccagtgggctgctttccagttggaaacaggctagatcccaagaaaacccatctccaaaagacctgttcgtcccagcctgcctagaaacaggagagtatgccaggctgcaggcatcgggggctggcacctggtgtgtggaccctgcatcaggagaagagttgcggcctggctcgagcagcagtgcccagtgcccaagcctctgcaatgtgctcaagagtggagtcctctccaggagagtcagcccaggctatgtcccagcctgcagggcagaggatgggggcttttccccagtgcaatgtgaccaggcccagggcagctgctggtgtgtcatggacagcggagaagaggtgcctgggacgcgcgtgaccgggggccagcccgcctgtgagagcccgcggtgtccgctgccattcaacgcgtcggaggtggttggtggaacaatcctgtgtgagacaatctcgggccccacaggctctgccatgcagcagtgccaattgctgtgccgccagggctcctggagcgtgtttccaccagggccattgatatgtagcctggagagcggacgctgggagtcacagctgcctcagccccgggcctgccaacggccccagctgtggcagaccatccagacccaagggcactttcagctccagctcccgccgggcaagatgtgcagtgctgactacgcggatttgctgcagactttccaggttttcatattggatgagctgacagcccgcggcttctgccagatccaggtgaagacttttggcaccctggtttccattcctgtctgcaacaactcctctgtgcaggtgggttgtctgaccagggagcgtttaggagtgaatgttacatggaaatcacggcttgaggacatcccagtggcttctcttcctgacttacatgacattgagagagccttggtgggcaaggatctccttgggcgcttcacagatctgatccagagtggctcattccagcttcatctggactccaagacgttcccagcggaaaccatccgcttcctccaaggggaccactttggcacctctcccaggacatggtttgggtgctcggaaggattctaccaagtcttgacaagtgaggccagtcaggacggactgggatgcgttaagtgtcctgaaggaagctattcccaagatgaggaatgcattccttgtcctgttggattctaccaagaacaggcagggagcttggcctgtgtcccatgtcctgtgggcagaacgaccatttctgctggagctttcagccagactcactgtgtcactgactgtcagaggaacgaagcaggcctgcaatgtgaccagaatggccagtatcgagccagccagaaggacaggggcagtgggaaggccttctgtgtggacggcgaggggcggaggctgccatggtgggaaacagaggcccctcttgaggactcacagtgtttgatgatgcagaagtttgagaaggttccagaatcaaaggtgatcttcgacgccaatgctcctgtggctgtcagatccaaagttcctgattctgagttccccgtgatgcagtgcttgacagattgcacagaggacgaggcctgcagcttcttcaccgtgtccacgacggagccagagatttcctgtgatttctatgcttggacaagtgacaatgttgcctgcatgacttctgaccagaaacgagatgcactggggaactcaaaggccaccagctttggaagtcttcgctgccaggtgaaagtgaggagccatggtcaagattctccagctgtgtatttgaaaaagggccaaggatccaccacaacacttcagaaacgctttgaacccactggtttccaaaacatgctttctggattgtacaaccccattgtgttctcagcctcaggagccaatctaaccgatgctcacctcttctgtcttcttgcatgcgaccgtgatctgtgttgcgatggcttcgtcctcacacaggttcaaggaggtgccatcatctgtgggttgctgagctcacccagtgtcctgctttgtaatgtcaaagactggatggatccctctgaagcctgggctaatgctacatgtcctggtgtgacatatgaccaggagagccaccaggtgatattgcgtcttggagaccaggagttcatcaagagtctgacacccttagaaggaactcaagacacctttaccaattttcagcaggtttatctctggaaagattctgacatggggtctcggcctgagtctatgggatgtagaaaagacacagtgccaaggccagcatctccaacagaagcaggtttgacaacagaacttttctcccctgtggacctcaaccaggtcattgtcaatggaaatcaatcactatccagccagaagcactggcttttcaagcacctgttttcagcccagcaggcaaacctatggtgcctttctcgttgtgtgcaggagcactctttctgtcagctcgcagagataacagagagtgcatccttgtacttcacctgcaccctctacccagaggcacaggtgtgtgatgacatcatggagtccaatgcccagggctgcagactgatcctgcctcagatgccaaaggccctgttccggaagaaagttatactggaagataaagtgaagaacttttacactcgcctgccgttccaaaaactgatggggatatccattagaaataaagtgcccatgtctgaaaaatctatttctaatgggttctttgaatgtgaacgacggtgcgatgcggacccatgctgcactggctttggatttctaaatgtttcccagttaaaaggaggagaggtgacatgtctcactctgaacagcttgggaattcagatgtgcagtgaggagaatggaggagcctggcgcattttggactgtggctctcctgacattgaagtccacacctatcccttcggatggtaccagaagcccattgctcaaaataatgctcccagtttttgccctttggttgttctgccttccctcacagagaaagtgtctctggactcgtggcagtccctggccctctcttcagtggttgttgatccatccattaggcactttgatgttgcccatgtcagcactgctgccaccagcaatttctctgctgtccgagacctctgtttgtcggaatgttcccaacatgaggcctgtctcatcaccactctgcaaacccaacctggggctgtgagatgtatgttctatgctgatactcaaagctgcacacatagtctgcagggtcagaactgccgacttctgcttcgtgaagaggccacccacatctaccggaagccaggaatctctctgctcagctatgaggcatctgtaccttctgtgcccatttccacccatggccggctgctgggcaggtcccaggccatccaggtgggtacctcatggaagcaagtggaccagttccttggagttccatatgctgccccgcccctggcagagaggcgcttccaggcaccagagcccttgaactggacaggctcctgggatgccagcaagccaagggccagctgctggcagccaggcaccagaacatccacgtctcctggagtcagtgaagattgtttgtatctcaatgtgttcatccctcagaatgtggcccctaacgcgtctgtgctggtgttcttccacaacaccatggacagggaggagagtgaaggatggccggctatcgacggctccttcttggctgctgttggcaacctcatcgtggtcactgccagctaccgagtgggtgtcttcggcttcctgagttctgggtccggagaggtgagtggcaactgggggctgctggaccaggtggcggctctgacctgggtgcagacccacatccgaggatttggcggggaccctcggcgcgtgtccctggcagcagaccgtggcggggctgatgtggccagcatccaccttctcacggccagggccaccaactcccaacttttccggagagctgtgctgatgggaggctccgcactctccccggccgccgtcatcagccatgagagggctcagcagcaggcaattgctttggcaaaggaggtcagttgccccatgtcatccagccaagaagtggtgtcctgcctccgccagaagcctgccaatgtcctcaatgatgcccagaccaagctcctggccgtgagtggccctttccactactggggtcctgtgatcgatggccacttcctccgtgagcctccagccagagcactgaagaggtctttatgggtagaggtcgatctgctcattgggagttctcaggacgacgggctcatcaacagagcaaaggctgtgaagcaatttgaggaaagtcgaggccggaccagtagcaaaacagccttttaccaggcactgcagaattctctgggtggcgaggactcagatgcccgcgtcgaggctgctgctacatggtattactctctggagcactccacggatgactatgcctccttctcccgggctctggagaatgccacccgggactactttatcatctgccctataatcgacatggccagtgcctgggcaaagagggcccgaggaaacgtcttcatgtaccatgctcctgaaaactacggccatggcagcctggagctgctggcggatgttcagtttgccttggggcttcccttctacccagcctacgaggggcagttttctctggaggagaagagcctgtcgctgaaaatcatgcagtacttttcccacttcatcagatcaggaaatcccaactacccttatgagttctcacggaaagtacccacatttgcaaccccctggcctgactttgtaccccgtgctggtggagagaactacaaggagttcagtgagctgctccccaatcgacagggcctgaagaaagccgactgctccttctggtccaagtacatctcgtctctgaagacatctgcagatggagccaagggcgggcagtcagcagagagtgaagaggaggagttgacggctggatctgggctaagagaagatctcctaagcctccaggaaccaggctctaagacctacagcaagtgaccagcccttgagctccccaaaaacctcacccgaggctgcccactatggtcatctttttctctaaaatagccacttaccttcaataaagtatctacatgcggtgaagc

SEQ ID NO: 7636 - protein, 2768 aa, Homo sapiens; identical to SEQ ID NO: 1069

SEQ ID NO: 7637 - DNA, 8503 bp, Homo sapiens
gggcaagcagtggtttctcctccttcctcccaggaagggccaggaaaatggccctggtcctggagatcttcaccctgctggcctccatctgctgggtgtcggccaatatcttcgagtaccaggtggatgcccagccccttcgtccctgtgagctgcagagggaaacggcctttctgaagcaagcagactacgtgccccagtgtgcagaggatggcagcttccagactgtccagtgccagaacgacggccgctcctgctggtgtgtgggtgccaacggcagtgaagtgctgggcagcaggcagccaggacggcctgtggcttgtctgtcattttgtcagctacagaaacagcagatcttactgagtggctacattaacagcacagacacctcctacctccctcagtgtcaggattcaggggactacgcgcctgttcagtgtgatgtgcagcaggtccagtgctggtgtgtggacgcagaggggatggaggtgtatgggacccgccagctggggaggccaaagcgatgtccaaggagctgtgaaataagaaatcgtcgtcttctccacggggtgggagataagtcaccaccccagtgttctgcggagggagagtttatgcctgtccagtgcaaatttgtcaacaccacagacatgatgatttttgatctggtccacagctacaacaggtttccagatgcatttgtgaccttcagttccttccagaggaggttccctgaggtatctgggtattgccactgtgctgacagccaagggcgggaactggctgagacaggtttggagttgttactggatgaaatttatgacaccatttttgctggcctggaccttccttccaccttcactgaaaccaccctgtaccggatactgcagagacggttcctcgcagttcaatcagtcatctctggcagattccgatgccccacaaaatgtgaagtggagcggtttacagcaaccagctttggtcacccctatgttccaagctgccgccgaaatggcgactatcaggcggtgcagtgccagacggaagggccctgctggtgtgtggacgcccaggggaaggaaatgcatggaacccggcagcaaggggagccgccatcttgtgctgaaggccaatcttgtgcctccgaaaggcagcaggccttgtccagactctactttgggacctcaggctacttcagccagcacgacctgttctcttccccagagaaaagatgggcctctccaagagtagccagatttgccacatcctgcccacccacgatcaaggagctctttgtggactctgggcttctccgcccaatggtggagggacagagccaacagttttctgtctcagaaaatcttctcaaagaagccatccgagcaatttttccctcccgagggctggctcgtcttgcccttcagtttaccaccaacccaaagagactccagcaaaacctttttggagggaaatttttggtgaatgttggccagtttaacttgtctggagcccttggcacaagaggcacatttaacttcagtcaatttttccagcaacttggtcttgcaagcttcttgaatggagggagacaagaagatttggccaagccactctctgtgggattagattcaaattcttccacaggaacccctgaagctgctaagaaggatggtactatgaataagccaactgtgggcagctttggctttgaaattaacctacaagagaaccaaaatgccctcaaattccttgcttctctcctggagcttccagaattccttctcttcttgcaacatgctatctctgtgccagaagatgtggcaagagatttaggtgatgtgatggaaacggtactcagctcccagacctgtgagcagacacctgaaaggctatttgtcccatcatgcacgacagaaggaagctatgaggatgtccaatgcttttccggagagtgctggtgtgtgaattcctggggcaaagagcttccaggctcaagagtcagaggtggacagccaaggtgccccacagactgtgaaaagcaaagggctcgcatgcaaagcctcatgggcagccagcctgctggctccaccttgtttgtccctgcttgtactagtgagggacatttcctgcctgtccagtgcttcaactcagagtgctactgtgttgatgctgagggtcaggccattcctggaactcgaagtgcaatagggaagcccaagaaatgccccacgccctgtcaattacagtctgagcaagctttcctcaggacggtgcaggccctgctctctaactccagcatgctacccaccctttccgacacctacatcccacagtgcagcaccgatgggcagtggagacaagtgcaatgcaatgggcctcctgagcaggtcttcgagttgtaccaacgatgggaggctcagaacaagggccaggatctgacgcctgccaagctgctagtgaagatcatgagctacagagaagcagcttccggaaacttcagtctctttattcaaagtctgtatgaggctggccagcaagatgtcttcccggtgctgtcacaatacccttctctgcaagatgtcccactagcagcactggaagggaaacggccccagcccagggagaatatcctcctggagccctacctcttctggcagatcttaaatggccaactcagccaatacccggggtcctactcagacttcagcactcctttggcacattttgatcttcggaactgctggtgtgtggatgaggctggccaagaactggaaggaatgcggtctgagccaagcaagctcccaacatgtcctggctcctgtgaggaagcaaagctccgtgtactgcagttcattagggaaacggaagagattgtttcagcttccaacagttctcggttccctctgggggagagtttcctggtggccaagggaatccggctgaggaatgaggacctcggccttcctccgctcttcccgccccgggaggctttcgcggagcagtttctgcgtgggagtgattacgccattcgcctggcggctcagtctaccttaagcttctatcagagacgccgcttttccccggacgactcggctggagcatccgcccttctgcggtcgggcccctacatgccacagtgtgatgcgtttggaagttgggagcctgtgcagtgccacgctgggactgggcactgctggtgtgtagatgagaaaggagggttcatccctggctcactgactgcccgctctctgcagattccacagtgcccgacaacctgcgagaaatctcgaaccagtgggctgctttccagttggaaacaggctagatcccaagaaaacccatctccaaaagacctgttcgtcccagcctgcctagaaacaggagagtatgccaggctgcaggcatcgggggctggcacctggtgtgtggaccctgcatcaggagaagagttgcggcctggctcgagcagcagtgcccagtgcccaagcctctgcaatgtgctcaagagtggagtcctctccaggagagtcagcccaggctatgtcccagcctgcagggcagaggatgggggcttttccccagtgcaatgtgaccaggcccagggcagctgctggtgtgtcatggacagcggagaagaggtgcctgggacgcgcgtgaccgggggccagcccgcctgtgagagcccgcggtgtccgctgccattcaacgcgtcggaggtggttggtggaacaatcctgtgtgagacaatctcgggccccacaggctctgccatgcagcagtgccaattgctgtgccgccagggctcctggagcgtgtttccaccagggccattgatatgtagcctggagagcggacgctgggagtcacagctgcctcagccccgggcctgccaacggccccagctgtggcagaccatccagacccaagggcactttcagctccagctcccgccgggcaagatgtgcagtgctgactacgcggatttgctgcagactttccaggttttcatattggatgagctgacagcccgcggcttctgccagatccaggtgaagacttttggcaccctggtttccattcctgtctgcaacaactcctctgtgcaggtgggttgtctgaccagggagcgtttaggagtgaatgttacatggaaatcacggcttgaggacatcccagtggcttctcttcctgacttacatgacattgagagagccttggtgggcaaggatctccttgggcgcttcacagatctgatccagagtggctcattccagcttcatctggactccaagacgttcccagcggaaaccatccgcttcctccaaggggaccactttggcacctctcccaggacatggtttgggtgctcggaaggattctaccaagtcttgacaagtgaggccagtcaggacggactgggatgcgttaagtgtcctgaaggaagctattcccaagatgaggaatgcattccttgtcctgttggattctaccaagaacaggcagggagcttggcctgtgtcccatgtcctgtgggcagaacgaccatttctgctggagctttcagccagactcactgtgtcactgactgtcagaggaacgaagcaggcctgcaatgtgaccagaatggccagtatcgagccagccagaaggacaggggcagtgggaaggccttctgtgtggacggcgaggggcggaggctgccatggtgggaaacagaggcccctcttgaggactcacagtgtttgatgatgcagaagtttgagaaggttccagaatcaaaggtgatcttcgacgccaatgctcctgtggctgtcagatccaaagttcctgattctgagttccccgtgatgcagtgcttgacagattgcacagaggacgaggcctgcagcttcttcaccgtgtccacgacggagccagagatttcctgtgatttctatgcttggacaagtgacaatgttgcctgcatgacttctgaccagaaacgagatgcactggggaactcaaaggccaccagctttggaagtcttcgctgccaggtgaaagtgaggagccatggtcaagattctccagctgtgtatttgaaaaagggccaaggatccaccacaacacttcagaaacgctttgaacccactggtttccaaaacatgctttctggattgtacaaccccattgtgttctcagcctcaggagccaatctaaccgatgctcacctcttctgtcttcttgcatgcgaccgtgatctgtgttgcgatggcttcgtcctcacacaggttcaaggaggtgccatcatctgtgggttgctgagctcacccagtgtcctgctttgtaatgtcaaagactggatggatccctctgaagcctgggctaatgctacatgtcctggtgtgacatatgaccaggagagccaccaggtgatattgcgtcttggagaccaggagttcatcaagagtctgacacccttagaaggaactcaagacacctttaccaattttcagcaggtttatctctggaaagattctgacatggggtctcggcctgagtctatgggatgtagaaaagacacagtgccaaggccagcatctccaacagaagcaggtttgacaacagaacttttctcccctgtggacctcaaccaggtcattgtcaatggaaatcaatcactatccagccagaagcactggcttttcaagcacctgttttcagcccagcaggcaaacctatggtgcctttctcgttgtgtgcaggagcactctttctgtcagctcgcagagataacagagagtgcatccttgtacttcacctgcaccctctacccagaggcacaggtgtgtgatgacatcatggagtccaatgcccagggctgcagactgatcctgcctcagatgccaaaggccctgttccggaagaaagttatactggaagataaagtgaagaacttttacactcgcctgccgttccaaaaactgatggggatatccattagaaataaagtgcccatgtctgaaaaatctatttctaatgggttctttgaatgtgaacgacggtgcgatgcggacccatgctgcactggctttggatttctaaatgtttcccagttaaaaggaggagaggtgacatgtctcactctgaacagcttgggaattcagatgtgcagtgaggagaatggaggagcctggcgcattttggactgtggctctcctgacattgaagtccacacctatcccttcggatggtaccagaagcccattgctcaaaataatgctcccagtttttgccctttggttgttctgccttccctcacagagaaagtgtctctggactcgtggcagtccctggccctctcttcagtggttgttgatccatccattaggcactttgatgttgcccatgtcagcactgctgccaccagcaatttctctgctgtccgagacctctgtttgtcggaatgttcccaacatgaggcctgtctcatcaccactctgcaaacccaacctggggctgtgagatgtatgttctatgctgatactcaaagctgcacacatagtctgcagggtcagaactgccgacttctgcttcgtgaagaggccacccacatctaccggaagccaggaatctctctgctcagctatgaggcatctgtaccttctgtgcccatttccacccatggccggctgctgggcaggtcccaggccatccaggtgggtacctcatggaagcaagtggaccagttccttggagttccatatgctgccccgcccctggcagagaggcgcttccaggcaccagagcccttgaactggacaggctcctgggatgccagcaagccaagggccagctgctggcagccaggcaccagaacatccacgtctcctggagtcagtgaagattgtttgtatctcaatgtgttcatccctcagaatgtggcccctaacgcgtctgtgctggtgttcttccacaacaccatggacagggaggagagtgaaggatggccggctatcgacggctccttcttggctgctgttggcaacctcatcgtggtcactgccagctaccgagtgggtgtcttcggcttcctgagttctgggtccggagaggtgagtggcaactgggggctgctggaccaggtggcggctctgacctgggtgcagacccacatccgaggatttggcggggaccctcggcgcgtgtccctggcagcagaccgtggcggggctgatgtggccagcatccaccttctcacggccagggccaccaactcccaacttttccggagagctgtgctgatgggaggctccgcactctccccggccgccgtcatcagccatgagagggctcagcagcaggcaattgctttggcaaaggaggtcagttgccccatgtcatccagccaagaagtggtgtcctgcctccgccagaagcctgccaatgtcctcaatgatgcccagaccaagctcctggccgtgagtggccctttccactactggggtcctgtgatcgatggccacttcctccgtgagcctccagccagagcactgaagaggtctttatgggtagaggtcgatctgctcattgggagttctcaggacgacgggctcatcaacagagcaaaggctgtgaagcaatttgaggaaagtcgaggccggaccagtagcaaaacagccttttaccaggcactgcagaattctctgggtggcgaggactcagatgcccgcgtcgaggctgctgctacatggtattactctctggagcactccacggatgactatgcctccttctcccgggctctggagaatgccacccgggactactttatcatctgccctataatcgacatggccagtgcctgggcaaagagggcccgaggaaacgtcttcatgtaccatgctcctgaaaactacggccatggcagcctggagctgctggcggatgttcagtttgccttggggcttcccttctacccagcctacgaggggcagttttctctggaggagaagagcctgtcgctgaaaatcatgcagtacttttcccacttcatcagatcaggaaatcccaactacccttatgagttctcacggaaagtacccacatttgcaaccccctggcctgactttgtaccccgtgctggtggagagaactacaaggagttcagtgagctgctccccaatcgacagggcctgaagaaagccgactgctccttctggtccaagtacatctcgtctctgaagacatctgcagatggagccaagggcgggcagtcagcagagagtgaagaggaggagttgacggctggatctgggctaagagaagatctcctaagcctccaggaaccaggctctaagacctacagcaagtgaccagcccttgagctccccaaaaacctcacccgaggctgcccactatggtcatctttttctctaaaatagccacttaccttcaataaagtatctacatgcggtgaagcattgttgactctaatgtgtgaatccaaggcaattcgttggta

SEQ ID NO: 7638 - protein, 2768 aa, Homo sapiens; identical to SEQ ID NO: 1069

SEQ ID NO: 7639 - DNA, 563 bp, Homo sapiens
gctgctaagaaggatggtactatgaataagccaactgtgggcagctttggctttgaaattaactacaaggagttcagtgagctgctccccaatcgacagggcctgaagaaagccgactgctccttctggtccaagtacatctcgtctctgaagacatctgcagatggagccaagggcgggcagtcagcagagagtgaagaggaggagttgacggctggatctgggctaagagaagatctcctaagcctccaggaaccaggctctaagacctacagcaagtgaccagcccttgagctccccaaaaacctcacccgaggctgcccactatggtcatctttttctctaaaatagccacttaccttcaataaagtatctacatgcggtgaagcattgttgactctaatgtgtgaatccaaggcaattcgttggtaacaccaactatatcttaataatctttctaaggtttgaatcccaggctgctgtttccattcaacaaatgtttatgagcatctgttatgcaccaggccctgtgctgggtgctggagaaacaaggactttgctcc

SEQ ID NO: 7640 - protein, 86 aa, Homo sapiens
MNKPTVGSFGFEINYKEFSELLPNRQGLKKADCSFWSKYISSLKTSADGAKGGQSAESEEEELTAGSGLREDLLSLQEPGSKTYSK

SEQ ID NO: 7641 - DNA, 4016 bp, Homo sapiens
ctgtctcaacagctggaggaggtcacgtgacattcacaggcatccagtcccagggtacctcctgctgcctggccccactgggtttatttgaatagtctgacttgatcaatccacagagccttctaacaattcaagtccttgcagagagaagcttgctcagagtggttactgaaaacaggaacctgcccttctgcaagccctgtgccttcctcgttcctagcagaggaagtatgcggccagtttagcaactgcagttcttctgtgtagcatgggctgcttctccacaaccgcgagaagcccggctgcctgtttattctggagcagcagcagttgacagacggagaggcagtgactctgcacccagcaatccctctgcagacagctcccacaggagtcatgcccagtgtgtgaaggctctgggcatcaccagcggccccagggaaaaagaaagaaatgggaaacagcatgaaatccacccctgcgcctgccgagaggcccctgcccaacccggagggactggatagcgacttccttgccgtgctaagtgactacccgtctcctgacatcagccccccgatattccgccgaggggagaaactgcgtgtgatttctgatgaagggggctggtggaaagctatttctcttagcactggtcgagagagttacatccctggaatatgtgtggccagagtttaccatggctggctgtttgagggcctgggcagagacaaggccgaggagctgctgcagctgccagacacaaaggtcggctccttcatgatcagagagagtgagaccaagaaagggttttactcactgtcggtgagacacaggcaggtaaagcattaccgcattttccgtctgcccaacaactggtactacatttccccgaggctcaccttccagtgcctggaggacctggtgaaccactattctgaggtggctgatggcctgtgctgtgtgctcaccacgccctgcctgacacaaagcacggctgccccagcagtgagggcctccagctcacctgtcaccttgcgtcagaagactgtggactggaggagagtgtccagactgcaggaggaccccgagggaacagagaacccgcttggggtagacgagtcccttttcagctatggccttcgagagagcattgcctcttacctgtccctgaccagtgaggacaacacctcctttgatcgaaagaagaaaagcatctccctgatgtatggtggcagcaagagaaagagctcattcttctcatcaccaccttactttgaggactagccaagaacagacacaatggttcatgcccaaaaggaacagaagttccaactattgcctgggatcttgcgaaaagcgaggttccctgatccctgggagcctcacgtattttagaagccaagagaagccacatggagactcaaattcgcatcttctctatccacatcatgaccaaaggaacccctccctggtgtctgatcagggctgtggcatcacgaaacattggatcatgacatgtcgggcgatgcttggaagagcccagcatgtatgtatgcacacattgtgtgtgtgggaaggacaaagccactctcacaagaaagggcaccaggactgctctccaaggaactggacctgtccagacagttacactccaaggtcattggagagaacttctgtatgggcaagcctgagagggagaggaaacaaaagctgtgtcctggcagaaggtctgggtttgcagatgggtgccctgaatggaactactttaactaatccatagggacttctggtatgctttcctctctttttaaaggaacttcgtgacactaaacattagcccaaaggacttcttagccttcaattgggagatacctttggtctgctcctgcaccaaagccatatgggtggaagtcagttggcctccctggttctgcagagggccagaagaatgagagagaggaagactgctggcagggaaatcgaggaggcgagactagaactgcaccagcttccctgatgtctgcagccatggctttgcagcgcagacagagcttctctgggatgctgggattcttgcctgtatgaatgcatcaagtattcatttattgcccgaataggcattgcattaagtcctctgtaaggtgtcaggcaagccaaaaaaaaaaaaaagatgcgtaagtcctaacccccaacagaggtgttcacagtgtagacagggaaaaaatgtataaacaaatgtgtaaaaagagaaatcagctcatggcttaggatggaattagagacaggtgagggacactcaggagctcattttccagctgctcttcagagtggaagggctggctggatcgggtaggtaagaatagctggattttttagaaaagaaatggatacagtctaaagaattaactcacccggtactttattctaagaagggtctggcatccatatgaggaaaaatgctcagctccaggaaagatggggagtccaagtggattaatgatgtcatgcataattttaagagacaagggagaaaacacaatgtatagccagagaaggagaagctcccatccaaatcctactaggaagagagtgggctgcagatgaatctgtgactcatgtttccctgtttcaaagggatcctggggaaggaggggaacatgcttgcagtatctctccctgtctgtctgctcacataagcattccgtccatctgagctcatcgtgctactggtatgtgtatgtgcagttacacagttttctgtatcatagattctagtgtgtttatacaaggagacatctgtggtttccccaaccgttccaaaaggctatttcaaaggaaccagccaacgtatgagaaatgaatgtaacactgtggacattgacttcccgcataaggcagggtgaccccctgaactccagatgtctgcacagtatcttatgtgttgttttccgttgtgacgaatgtgattggaacatttggggagcacccagagggatttctcagtgggaagcattacactttgctaaatcatgtatttattcctgattaaaacaaacctaataaatatttaacccttggcacacagggagagtttctgggttgaggaggatgggtggttcattcagaagctcagtgggtttcaaattttcaaataaacgtgcaactagagagagaggagtaaagatcacccagagaaacctggtgccagttagcagctcagcatcttctttaggtgtgaccttaagaaaaagcagattgtatgactctggggggtgtcttacgaaacttgaagatgggcctaagggattgaaggaaacaccaaattctgaacgattgttataaaaacgtcctgcctagattttctgcacgttacttgtgatagctgcgctatttgttcttccaagaatttctttctgcagatatttctggacacctactaaatagacactgctcaggtactggggctatagcaatgaaaaccagatgaggtctctgatatcatggagcttgacatcataaataaacaagatgcttggtaatgatggtgatgaggatgagggcaggctccaagcagtcacctggcaggcaggacatccttcaggtccaggcttaggaaaggcctccaagcagaggcaatgtttgggctgaggcctgaaagatgagcagcaaacagccttgtaaagatctaggaagtgtatggagtcagcaggaataatggggcaattcctgcaggcaggaagagcaagactgcatgctgaaggagctaaaaggaggcagggtggccagactgagggagctagggaaggagggagtgtgcttaggaggtatcaggaaggtcctgcagggccctagagggtaggggatggcatagggtccattccaggagacatgaggagccattgaaaggatccaagtagggggtaagaccatttcactgatatgtttaaaagatcatgctgtgtggaggacaaatctttaaaattccagcattgtattgtctattgacacacaaagtt

SEQ ID NO: 7642 - protein, 276 aa, Homo sapiens
MGNSMKSTPAPAERPLPNPEGLDSDFLAVLSDYPSPDISPPIFRRGEKLRVISDEGGWWKAISLSTGRESYIPGICVARVYHGWLFEGLGRDKAEELLQLPDTKVGSFMIRESETKKGFYSLSVRHRQVKHYRIFRLPNNWYYISPRLTFQCLEDLVNHYSEVADGLCCVLTTPCLTQSTAAPAVRASSSPVTLRQKTVDWRRVSRLQEDPEGTENPLGVDESLFSYGLRESIASYLSLTSEDNTSFDRKKKSISLMYGGSKRKSSFFSSPPYFED

SEQ ID NO: 7643 - DNA, 3926 bp, Homo sapiens
ttgctgcgaatggagaacatctcaggcagccctgatgctccaccgtccttgcagagagaagcttgctcagagtggttactgaaaacaggaacctgcccttctgcaagccctgtgccttcctcgttcctagcagaggaagtatgcggccagtttagcaactgcagttcttctgtgtagcatgggctgcttctccacaaccgcgagaagcccggctgcctgtttattctggagcagcagcagttgacagacggagaggcagtgactctgcacccagcaatccctctgcagacagctcccacaggagtcatgcccagtgtgtgaaggctctgggcatcaccagcggccccagggaaaaagaaagaaatgggaaacagcatgaaatccacccctgcgcctgccgagaggcccctgcccaacccggagggactggatagcgacttccttgccgtgctaagtgactacccgtctcctgacatcagccccccgatattccgccgaggggagaaactgcgtgtgatttctgatgaagggggctggtggaaagctatttctcttagcactggtcgagagagttacatccctggaatatgtgtggccagagtttaccatggctggctgtttgagggcctgggcagagacaaggccgaggagctgctgcagctgccagacacaaaggtcggctccttcatgatcagagagagtgagaccaagaaagggttttactcactgtcggtgagacacaggcaggtaaagcattaccgcattttccgtctgcccaacaactggtactacatttccccgaggctcaccttccagtgcctggaggacctggtgaaccactattctgaggtggctgatggcctgtgctgtgtgctcaccacgccctgcctgacacaaagcacggctgccccagcagtgagggcctccagctcacctgtcaccttgcgtcagaagactgtggactggaggagagtgtccagactgcaggaggaccccgagggaacagagaacccgcttggggtagacgagtcccttttcagctatggccttcgagagagcattgcctcttacctgtccctgaccagtgaggacaacacctcctttgatcgaaagaagaaaagcatctccctgatgtatggtggcagcaagagaaagagctcattcttctcatcaccaccttactttgaggactagccaagaacagacacaatggttcatgcccaaaaggaacagaagttccaactattgcctgggatcttgcgaaaagcgaggttccctgatccctgggagcctcacgtattttagaagccaagagaagccacatggagactcaaattcgcatcttctctatccacatcatgaccaaaggaacccctccctggtgtctgatcagggctgtggcatcacgaaacattggatcatgacatgtcgggcgatgcttggaagagcccagcatgtatgtatgcacacattgtgtgtgtgggaaggacaaagccactctcacaagaaagggcaccaggactgctctccaaggaactggacctgtccagacagttacactccaaggtcattggagagaacttctgtatgggcaagcctgagagggagaggaaacaaaagctgtgtcctggcagaaggtctgggtttgcagatgggtgccctgaatggaactactttaactaatccatagggacttctggtatgctttcctctctttttaaaggaacttcgtgacactaaacattagcccaaaggacttcttagccttcaattgggagatacctttggtctgctcctgcaccaaagccatatgggtggaagtcagttggcctccctggttctgcagagggccagaagaatgagagagaggaagactgctggcagggaaatcgaggaggcgagactagaactgcaccagcttccctgatgtctgcagccatggctttgcagcgcagacagagcttctctgggatgctgggattcttgcctgtatgaatgcatcaagtattcatttattgcccgaataggcattgcattaagtcctctgtaaggtgtcaggcaagccaaaaaaaaaaaaaagatgcgtaagtcctaacccccaacagaggtgttcacagtgtagacagggaaaaaatgtataaacaaatgtgtaaaaagagaaatcagctcatggcttaggatggaattagagacaggtgagggacactcaggagctcattttccagctgctcttcagagtggaagggctggctggatcgggtaggtaagaatagctggattttttagaaaagaaatggatacagtctaaagaattaactcacccggtactttattctaagaagggtctggcatccatatgaggaaaaatgctcagctccaggaaagatggggagtccaagtggattaatgatgtcatgcataattttaagagacaagggagaaaacacaatgtatagccagagaaggagaagctcccatccaaatcctactaggaagagagtgggctgcagatgaatctgtgactcatgtttccctgtttcaaagggatcctggggaaggaggggaacatgcttgcagtatctctccctgtctgtctgctcacataagcattccgtccatctgagctcatcgtgctactggtatgtgtatgtgcagttacacagttttctgtatcatagattctagtgtgtttatacaaggagacatctgtggtttccccaaccgttccaaaaggctatttcaaaggaaccagccaacgtatgagaaatgaatgtaacactgtggacattgacttcccgcataaggcagggtgaccccctgaactccagatgtctgcacagtatcttatgtgttgttttccgttgtgacgaatgtgattggaacatttggggagcacccagagggatttctcagtgggaagcattacactttgctaaatcatgtatttattcctgattaaaacaaacctaataaatatttaacccttggcacacagggagagtttctgggttgaggaggatgggtggttcattcagaagctcagtgggtttcaaattttcaaataaacgtgcaactagagagagaggagtaaagatcacccagagaaacctggtgccagttagcagctcagcatcttctttaggtgtgaccttaagaaaaagcagattgtatgactctggggggtgtcttacgaaacttgaagatgggcctaagggattgaaggaaacaccaaattctgaacgattgttataaaaacgtcctgcctagattttctgcacgttacttgtgatagctgcgctatttgttcttccaagaatttctttctgcagatatttctggacacctactaaatagacactgctcaggtactggggctatagcaatgaaaaccagatgaggtctctgatatcatggagcttgacatcataaataaacaagatgcttggtaatgatggtgatgaggatgagggcaggctccaagcagtcacctggcaggcaggacatccttcaggtccaggcttaggaaaggcctccaagcagaggcaatgtttgggctgaggcctgaaagatgagcagcaaacagccttgtaaagatctaggaagtgtatggagtcagcaggaataatggggcaattcctgcaggcaggaagagcaagactgcatgctgaaggagctaaaaggaggcagggtggccagactgagggagctagggaaggagggagtgtgcttaggaggtatcaggaaggtcctgcagggccctagagggtaggggatggcatagggtccattccaggagacatgaggagccattgaaaggatccaagtagggggtaagaccatttcactgatatgtttaaaagatcatgctgtgtggaggacaaatctttaaaattccagcattgtattgtctattgacacacaaagtt

SEQ ID NO: 7644 - protein, 276 aa, Homo sapiens; identical to SEQ ID NO: 7642

SEQ ID NO: 7645 - DNA, 4300 bp, Homo sapiens
ctgtgtccatttgaaggctaaagaaactgcagctcagaccagttcagcaactctcctacatcgtgtggctaaagctaagaattgtgacccatttttctgaatccaggtccccgcgatgccctgggttcagaccctaacaccctcccgtccctgagtgctggggatttaaggcagcagtgcctcctttcaggaaatcacacacacactggaaactcctgcatactcctcttactataatctgtcaccaaagactggatattcctgtgctggggctcgtgccagcgcctcgggctgccaggtgctgctttccaactcccacatgggctgccctccccctactgctacccacagggcccccactccacctgctcccagacgaggccaactcctggccaagcttaggggcacagcggaggcgctctgtttctgatttttctcgccttccttggagatgcctgtgcttggaagggaaggcagaacattgcatcttggaacaaatctgcttttgatcatgcaaatgaatgcctggataatgtaggcagactgtcaatttcaccagttagaaagaaagagaaaagggggagaaattccccatgacagcgactgatgaagaatttcaatagaaagctgctacttcagaaaataagatcatttgctgcgaatggagaacatctcaggcagccctgatgctccaccggctctgggcatcaccagcggccccagggaaaaagaaagaaatgggaaacagcatgaaatccacccctgcgcctgccgagaggcccctgcccaacccggagggactggatagcgacttccttgccgtgctaagtgactacccgtctcctgacatcagccccccgatattccgccgaggggagaaactgcgtgtgatttctgatgaagggggctggtggaaagctatttctcttagcactggtcgagagagttacatccctggaatatgtgtggccagagtttaccatggctggctgtttgagggcctgggcagagacaaggccgaggagctgctgcagctgccagacacaaaggtcggctccttcatgatcagagagagtgagaccaagaaagggttttactcactgtcggtgagacacaggcaggtaaagcattaccgcattttccgtctgcccaacaactggtactacatttccccgaggctcaccttccagtgcctggaggacctggtgaaccactattctgaggtggctgatggcctgtgctgtgtgctcaccacgccctgcctgacacaaagcacggctgccccagcagtgagggcctccagctcacctgtcaccttgcgtcagaagactgtggactggaggagagtgtccagactgcaggaggaccccgagggaacagagaacccgcttggggtagacgagtcccttttcagctatggccttcgagagagcattgcctcttacctgtccctgaccagtgaggacaacacctcctttgatcgaaagaagaaaagcatctccctgatgtatggtggcagcaagagaaagagctcattcttctcatcaccaccttactttgaggactagccaagaacagacacaatggttcatgcccaaaaggaacagaagttccaactattgcctgggatcttgcgaaaagcgaggttccctgatccctgggagcctcacgtattttagaagccaagagaagccacatggagactcaaattcgcatcttctctatccacatcatgaccaaaggaacccctccctggtgtctgatcagggctgtggcatcacgaaacattggatcatgacatgtcgggcgatgcttggaagagcccagcatgtatgtatgcacacattgtgtgtgtgggaaggacaaagccactctcacaagaaagggcaccaggactgctctccaaggaactggacctgtccagacagttacactccaaggtcattggagagaacttctgtatgggcaagcctgagagggagaggaaacaaaagctgtgtcctggcagaaggtctgggtttgcagatgggtgccctgaatggaactactttaactaatccatagggacttctggtatgctttcctctctttttaaaggaacttcgtgacactaaacattagcccaaaggacttcttagccttcaattgggagatacctttggtctgctcctgcaccaaagccatatgggtggaagtcagttggcctccctggttctgcagagggccagaagaatgagagagaggaagactgctggcagggaaatcgaggaggcgagactagaactgcaccagcttccctgatgtctgcagccatggctttgcagcgcagacagagcttctctgggatgctgggattcttgcctgtatgaatgcatcaagtattcatttattgcccgaataggcattgcattaagtcctctgtaaggtgtcaggcaagccaaaaaaaaaaaaaagatgcgtaagtcctaacccccaacagaggtgttcacagtgtagacagggaaaaaatgtataaacaaatgtgtaaaaagagaaatcagctcatggcttaggatggaattagagacaggtgagggacactcaggagctcattttccagctgctcttcagagtggaagggctggctggatcgggtaggtaagaatagctggattttttagaaaagaaatggatacagtctaaagaattaactcacccggtactttattctaagaagggtctggcatccatatgaggaaaaatgctcagctccaggaaagatggggagtccaagtggattaatgatgtcatgcataattttaagagacaagggagaaaacacaatgtatagccagagaaggagaagctcccatccaaatcctactaggaagagagtgggctgcagatgaatctgtgactcatgtttccctgtttcaaagggatcctggggaaggaggggaacatgcttgcagtatctctccctgtctgtctgctcacataagcattccgtccatctgagctcatcgtgctactggtatgtgtatgtgcagttacacagttttctgtatcatagattctagtgtgtttatacaaggagacatctgtggtttccccaaccgttccaaaaggctatttcaaaggaaccagccaacgtatgagaaatgaatgtaacactgtggacattgacttcccgcataaggcagggtgaccccctgaactccagatgtctgcacagtatcttatgtgttgttttccgttgtgacgaatgtgattggaacatttggggagcacccagagggatttctcagtgggaagcattacactttgctaaatcatgtatttattcctgattaaaacaaacctaataaatatttaacccttggcacacagggagagtttctgggttgaggaggatgggtggttcattcagaagctcagtgggtttcaaattttcaaataaacgtgcaactagagagagaggagtaaagatcacccagagaaacctggtgccagttagcagctcagcatcttctttaggtgtgaccttaagaaaaagcagattgtatgactctggggggtgtcttacgaaacttgaagatgggcctaagggattgaaggaaacaccaaattctgaacgattgttataaaaacgtcctgcctagattttctgcacgttacttgtgatagctgcgctatttgttcttccaagaatttctttctgcagatatttctggacacctactaaatagacactgctcaggtactggggctatagcaatgaaaaccagatgaggtctctgatatcatggagcttgacatcataaataaacaagatgcttggtaatgatggtgatgaggatgagggcaggctccaagcagtcacctggcaggcaggacatccttcaggtccaggcttaggaaaggcctccaagcagaggcaatgtttgggctgaggcctgaaagatgagcagcaaacagccttgtaaagatctaggaagtgtatggagtcagcaggaataatggggcaattcctgcaggcaggaagagcaagactgcatgctgaaggagctaaaaggaggcagggtggccagactgagggagctagggaaggagggagtgtgcttaggaggtatcaggaaggtcctgcagggccctagagggtaggggatggcatagggtccattccaggagacatgaggagccattgaaaggatccaagtagggggtaagaccatttcactgatatgtttaaaagatcatgctgtgtggaggacaaatctttaaaattccagcattgtattgtctattgacacacaaagtt

SEQ ID NO: 7646 - protein, 293 aa, Homo sapiens
MLHRLWASPAAPGKKKEMGNSMKSTPAPAERPLPNPEGLDSDFLAVLSDYPSPDISPPIFRRGEKLRVISDEGGWWKAISLSTGRESYIPGICVARVYHGWLFEGLGRDKAEELLQLPDTKVGSFMIRESETKKGFYSLSVRHRQVKHYRIFRLPNNWYYISPRLTFQCLEDLVNHYSEVADGLCCVLTTPCLTQSTAAPAVRASSSPVTLRQKTVDWRRVSRLQEDPEGTENPLGVDESLFSYGLRESIASYLSLTSEDNTSFDRKKKSISLMYGGSKRKSSFFSSPPYFED

SEQ ID NO: 7647 - DNA, 3083 bp, Homo sapiens
ctgtctcaacagctggaggaggtcacgtgacattcacaggcatccagtcccagggtacctcctgctgcctggccccactgggtttatttgaatagtctgacttgatcaatccacagagccttctaacaattcaagtccttgcagagagaagcttgctcagagtggttactgaaaacaggaacctgcccttctgcaagccctgtgccttcctcgttcctagcagaggaagtatgcggccagtttagcaactgcagttcttctgtgtagcatgggctgcttctccacaaccgcgagaagcccggctgcctgtttattctggagcagcagcagttgacagacggagaggcagtgactctgcacccagcaatccctctgcagacagctcccacaggagtcatgcccagtgtgtgaaggctctgggcatcaccagcggccccagggaaaaagaaagaaatgggaaacagcatgaaatccacccctgcgcctgccgagaggcccctgcccaacccggagggactggatagcgacttccttgccgtgctaagtgactacccgtctcctgacatcagccccccgatattccgccgaggggagaaactgcgtgtgatttctgatgaagggggctggtggaaagctatttctcttagcactggtcgagagagttacatccctggaatatgtgtggccagagtttaccatggctggctgtttgagggcctgggcagagacaaggccgaggagctgctgcagctgccagacacaaaggtcggctccttcatgatcagagagagtgagaccaagaaagggttttactcactgtcggtgagacacaggcaggtaaagcattaccgcattttccgtctgcccaacaactggtactacatttccccgaggctcaccttccagtgcctggaggacctggtgaaccactattctgaggtggctgatggcctgtgctgtgtgctcaccacgccctgcctgacacaaagcacggctgccccagcagtgagggcctccagctcacctgtcaccttgcgtcagaagactgtggactggaggagagtgtccagactgcaggaggaccccgagggaacagagaacccgcttggggtagacgagtcccttttcagctatggccttcgagagagcattgcctcttacctgtccctgaccagtgaggacaacacctcctttgatcgaaagaagaaaagcatctccctgatgtatggtggcagcaagagaaagagctcattcttctcatcaccaccttactttgaggactagccaagaacagacacaatggttcatgcccaaaaggaacagaagttccaactattgcctgggatcttgcgaaaagcgaggttccctgatccctgggagcctcacgtattttagaagccaagagaagccacatggagactcaaattcgcatcttctctatccacatcatgaccaaaggaacccctccctggtgtctgatcagggctgtggcatcacgaaacattggatcatgacatgtcgggcgatgcttggaagagcccagcatgtatgtatgcacacattgtgtgtgtgggaaggacaaagccactctcacaagaaagggcaccaggactgctctccaaggaactggacctgtccagacagttacactccaaggtcattggagagaacttctgtatgggcaagcctgagagggagaggaaacaaaagctgtgtcctggcagaaggtctgggtttgcagatgggtgccctgaatggaactactttaactaatccatagggacttctggtatgctttcctctctttttaaaggaacttcgtgacactaaacattagcccaaaggacttcttagccttcaattgggagatacctttggtctgctcctgcaccaaagccatatgggtggaagtcagttggcctccctggttctgcagagggccagaagaatgagagagaggaagactgctggcagggaaatcgaggaggcgagactagaactgcaccagcttccctgatgtctgcagccatggctttgcagcgcagacagagcttctctgggatgctgggattcttgcctgtatgaatgcatcaagtattcatttattgcccgaataggcattgcattaagtcctctgtaaggtgtcaggcaagccaaaaaaaaaaaaaagatgcgtaagtcctaacccccaacagaggtgttcacagtgtagacagggaaaaaatgtataaacaaatgtgtaaaaagagaaatcagctcatggcttaggatggaattagagacaggtgagggacactcaggagctcattttccagctgctcttcagagtggaagggctggctggatcgggtaggtaagaatagctggattttttagaaaagaaatggatacagtctaaagaattaactcacccggtactttattctaagaagggtctggcatccatatgaggaaaaatgctcagctccaggaaagatggggagtccaagtggattaatgatgtcatgcataattttaagagacaagggagaaaacacaatgtatagccagagaaggagaagctcccatccaaatcctactaggaagagagtgggctgcagatgaatctgtgactcatgtttccctgtttcaaagggatcctggggaaggaggggaacatgcttgcagtatctctccctgtctgtctgctcacataagcattccgtccatctgagctcatcgtgctactggtatgtgtatgtgcagttacacagttttctgtatcatagattctagtgtgtttatacaaggagacatctgtggtttccccaaccgttccaaaaggctatttcaaaggaaccagccaacgtatgagaaatgaatgtaacactgtggacattgacttcccgcataaggcagggtgaccccctgaactccagatgtctgcacagtatcttatgtgttgttttccgttgtgacgaatgtgattggaacatttggggagcacccagagggatttctcagtgggaagcattacactttgctaaatcatgtatttattcctgattaaaacaaacctaataaatatttaacccttggcacac

SEQ ID NO: 7648 - protein, 276 aa, Homo sapiens; identical to SEQ ID NO: 7642

SEQ ID NO: 7649 - DNA, 3367 bp, Homo sapiens
ctgtgtccatttgaaggctaaagaaactgcagctcagaccagttcagcaactctcctacatcgtgtggctaaagctaagaattgtgacccatttttctgaatccaggtccccgcgatgccctgggttcagaccctaacaccctcccgtccctgagtgctggggatttaaggcagcagtgcctcctttcaggaaatcacacacacactggaaactcctgcatactcctcttactataatctgtcaccaaagactggatattcctgtgctggggctcgtgccagcgcctcgggctgccaggtgctgctttccaactcccacatgggctgccctccccctactgctacccacagggcccccactccacctgctcccagacgaggccaactcctggccaagcttaggggcacagcggaggcgctctgtttctgatttttctcgccttccttggagatgcctgtgcttggaagggaaggcagaacattgcatcttggaacaaatctgcttttgatcatgcaaatgaatgcctggataatgtaggcagactgtcaatttcaccagttagaaagaaagagaaaagggggagaaattccccatgacagcgactgatgaagaatttcaatagaaagctgctacttcagaaaataagatcatttgctgcgaatggagaacatctcaggcagccctgatgctccaccggctctgggcatcaccagcggccccagggaaaaagaaagaaatgggaaacagcatgaaatccacccctgcgcctgccgagaggcccctgcccaacccggagggactggatagcgacttccttgccgtgctaagtgactacccgtctcctgacatcagccccccgatattccgccgaggggagaaactgcgtgtgatttctgatgaagggggctggtggaaagctatttctcttagcactggtcgagagagttacatccctggaatatgtgtggccagagtttaccatggctggctgtttgagggcctgggcagagacaaggccgaggagctgctgcagctgccagacacaaaggtcggctccttcatgatcagagagagtgagaccaagaaagggttttactcactgtcggtgagacacaggcaggtaaagcattaccgcattttccgtctgcccaacaactggtactacatttccccgaggctcaccttccagtgcctggaggacctggtgaaccactattctgaggtggctgatggcctgtgctgtgtgctcaccacgccctgcctgacacaaagcacggctgccccagcagtgagggcctccagctcacctgtcaccttgcgtcagaagactgtggactggaggagagtgtccagactgcaggaggaccccgagggaacagagaacccgcttggggtagacgagtcccttttcagctatggccttcgagagagcattgcctcttacctgtccctgaccagtgaggacaacacctcctttgatcgaaagaagaaaagcatctccctgatgtatggtggcagcaagagaaagagctcattcttctcatcaccaccttactttgaggactagccaagaacagacacaatggttcatgcccaaaaggaacagaagttccaactattgcctgggatcttgcgaaaagcgaggttccctgatccctgggagcctcacgtattttagaagccaagagaagccacatggagactcaaattcgcatcttctctatccacatcatgaccaaaggaacccctccctggtgtctgatcagggctgtggcatcacgaaacattggatcatgacatgtcgggcgatgcttggaagagcccagcatgtatgtatgcacacattgtgtgtgtgggaaggacaaagccactctcacaagaaagggcaccaggactgctctccaaggaactggacctgtccagacagttacactccaaggtcattggagagaacttctgtatgggcaagcctgagagggagaggaaacaaaagctgtgtcctggcagaaggtctgggtttgcagatgggtgccctgaatggaactactttaactaatccatagggacttctggtatgctttcctctctttttaaaggaacttcgtgacactaaacattagcccaaaggacttcttagccttcaattgggagatacctttggtctgctcctgcaccaaagccatatgggtggaagtcagttggcctccctggttctgcagagggccagaagaatgagagagaggaagactgctggcagggaaatcgaggaggcgagactagaactgcaccagcttccctgatgtctgcagccatggctttgcagcgcagacagagcttctctgggatgctgggattcttgcctgtatgaatgcatcaagtattcatttattgcccgaataggcattgcattaagtcctctgtaaggtgtcaggcaagccaaaaaaaaaaaaaagatgcgtaagtcctaacccccaacagaggtgttcacagtgtagacagggaaaaaatgtataaacaaatgtgtaaaaagagaaatcagctcatggcttaggatggaattagagacaggtgagggacactcaggagctcattttccagctgctcttcagagtggaagggctggctggatcgggtaggtaagaatagctggattttttagaaaagaaatggatacagtctaaagaattaactcacccggtactttattctaagaagggtctggcatccatatgaggaaaaatgctcagctccaggaaagatggggagtccaagtggattaatgatgtcatgcataattttaagagacaagggagaaaacacaatgtatagccagagaaggagaagctcccatccaaatcctactaggaagagagtgggctgcagatgaatctgtgactcatgtttccctgtttcaaagggatcctggggaaggaggggaacatgcttgcagtatctctccctgtctgtctgctcacataagcattccgtccatctgagctcatcgtgctactggtatgtgtatgtgcagttacacagttttctgtatcatagattctagtgtgtttatacaaggagacatctgtggtttccccaaccgttccaaaaggctatttcaaaggaaccagccaacgtatgagaaatgaatgtaacactgtggacattgacttcccgcataaggcagggtgaccccctgaactccagatgtctgcacagtatcttatgtgttgttttccgttgtgacgaatgtgattggaacatttggggagcacccagagggatttctcagtgggaagcattacactttgctaaatcatgtatttattcctgattaaaacaaacctaataaatatttaacccttggcacac

SEQ ID NO: 7650 - protein, 293 aa, Homo sapiens; identical to SEQ ID NO: 7646

SEQ ID NO: 7651 - DNA, 3645 bp, Homo sapiens
ctgtgtccatttgaaggctaaagaaactgcagctcagaccagttcagcaactctcctacatcgtgtggctaaagctaagaattgtgacccatttttctgaatccaggtccccgcgatgccctgggttcagaccctaacaccctcccgtccctgagtgctggggatttaaggcagcagtgcctcctttcaggaaatcacacacacactggaaactcctgcatactcctcttactataatctgtcaccaaagactggatattcctgtgctggggctcgtgccagcgcctcgggctgccaggtgctgctttccaactcccacatgggctgccctccccctactgctacccacagggcccccactccacctgctcccagacgaggccaactcctggccaagcttaggggcacagcggaggcgctctgtttctgatttttctcgccttccttggagatgcctgtgcttggaagggaaggcagaacattgcatcttggaacaaatctgcttttgatcatgcaaatgaatgcctggataatgtaggcagactgtcaatttcaccagttagaaagaaagagaaaagggggagaaattccccatgacagcgactgatgaagaatttcaatagaaagctgctacttcagaaaataagatcatttgctgcgaatggagaacatctcaggcagccctgatgctccaccgtccttgcagagagaagcttgctcagagtggttactgaaaacaggaacctgcccttctgcaagccctgtgccttcctcgttcctagcagaggaagtatgcggccagtttagcaactgcagttcttctgtgtagcatgggctgcttctccacaaccgcgagaagcccggctgcctgtttattctggagcagcagcagttgacagacggagaggcagtgactctgcacccagcaatccctctgcagacagctcccacaggagtcatgcccagtgtgtgaaggctctgggcatcaccagcggccccagggaaaaagaaagaaatgggaaacagcatgaaatccacccctgcgcctgccgagaggcccctgcccaacccggagggactggatagcgacttccttgccgtgctaagtgactacccgtctcctgacatcagccccccgatattccgccgaggggagaaactgcgtgtgatttctgatgaagggggctggtggaaagctatttctcttagcactggtcgagagagttacatccctggaatatgtgtggccagagtttaccatggctggctgtttgagggcctgggcagagacaaggccgaggagctgctgcagctgccagacacaaaggtcggctccttcatgatcagagagagtgagaccaagaaagggttttactcactgtcggtgagacacaggcaggtaaagcattaccgcattttccgtctgcccaacaactggtactacatttccccgaggctcaccttccagtgcctggaggacctggtgaaccactattctgaggtggctgatggcctgtgctgtgtgctcaccacgccctgcctgacacaaagcacggctgccccagcagtgagggcctccagctcacctgtcaccttgcgtcagaagactgtggactggaggagagtgtccagactgcaggaggaccccgagggaacagagaacccgcttggggtagacgagtcccttttcagctatggccttcgagagagcattgcctcttacctgtccctgaccagtgaggacaacacctcctttgatcgaaagaagaaaagcatctccctgatgtatggtggcagcaagagaaagagctcattcttctcatcaccaccttactttgaggactagccaagaacagacacaatggttcatgcccaaaaggaacagaagttccaactattgcctgggatcttgcgaaaagcgaggttccctgatccctgggagcctcacgtattttagaagccaagagaagccacatggagactcaaattcgcatcttctctatccacatcatgaccaaaggaacccctccctggtgtctgatcagggctgtggcatcacgaaacattggatcatgacatgtcgggcgatgcttggaagagcccagcatgtatgtatgcacacattgtgtgtgtgggaaggacaaagccactctcacaagaaagggcaccaggactgctctccaaggaactggacctgtccagacagttacactccaaggtcattggagagaacttctgtatgggcaagcctgagagggagaggaaacaaaagctgtgtcctggcagaaggtctgggtttgcagatgggtgccctgaatggaactactttaactaatccatagggacttctggtatgctttcctctctttttaaaggaacttcgtgacactaaacattagcccaaaggacttcttagccttcaattgggagatacctttggtctgctcctgcaccaaagccatatgggtggaagtcagttggcctccctggttctgcagagggccagaagaatgagagagaggaagactgctggcagggaaatcgaggaggcgagactagaactgcaccagcttccctgatgtctgcagccatggctttgcagcgcagacagagcttctctgggatgctgggattcttgcctgtatgaatgcatcaagtattcatttattgcccgaataggcattgcattaagtcctctgtaaggtgtcaggcaagccaaaaaaaaaaaaaagatgcgtaagtcctaacccccaacagaggtgttcacagtgtagacagggaaaaaatgtataaacaaatgtgtaaaaagagaaatcagctcatggcttaggatggaattagagacaggtgagggacactcaggagctcattttccagctgctcttcagagtggaagggctggctggatcgggtaggtaagaatagctggattttttagaaaagaaatggatacagtctaaagaattaactcacccggtactttattctaagaagggtctggcatccatatgaggaaaaatgctcagctccaggaaagatggggagtccaagtggattaatgatgtcatgcataattttaagagacaagggagaaaacacaatgtatagccagagaaggagaagctcccatccaaatcctactaggaagagagtgggctgcagatgaatctgtgactcatgtttccctgtttcaaagggatcctggggaaggaggggaacatgcttgcagtatctctccctgtctgtctgctcacataagcattccgtccatctgagctcatcgtgctactggtatgtgtatgtgcagttacacagttttctgtatcatagattctagtgtgtttatacaaggagacatctgtggtttccccaaccgttccaaaaggctatttcaaaggaaccagccaacgtatgagaaatgaatgtaacactgtggacattgacttcccgcataaggcagggtgaccccctgaactccagatgtctgcacagtatcttatgtgttgttttccgttgtgacgaatgtgattggaacatttggggagcacccagagggatttctcagtgggaagcattacactttgctaaatcatgtatttattcctgattaaaacaaacctaataaatatttaacccttggcacac

SEQ ID NO: 7652 - protein, 276 aa, Homo sapiens; identical to SEQ ID NO: 7642

SEQ ID NO: 7653 - DNA, 603 bp, Homo sapiens
agcaatttgaggaaagtcgaggccggaccagtagcaaaacagccttttaccaggcactgcagaattctctgggtggcgaggactcagatgcccgcgtcgaggctgctgctacatggtattttctctggaggagaagagcctgtcgctgaaaatcatgcagtacttttcccacttcatcagatcaggaaatcccaactacccttatgagttctcacggaaagtacccacatttgcaaccccctggcctgactttgtaccccgtgctggtggagagaactacaaggagttcagtgagctgctccccaatcgacagggcctgaagaaagccgactgctccttctggtccaagtacatctcgtctctgaagacatctgcagatggagccaagggcgggcagtcagcagagagtgaagaggaggagttgacggctggatctgggctaagagaagatctcctaagcctccaggaaccaggctctaagacctacagcaagtgaccagcccttgagctccccaaaaacctcacccgaggctgcccactatggtcatctttttctctaaaatagccacttaccttcaataaagtatctacatgcggtgaagc

SEQ ID NO: 7654 - protein, 127 aa, Homo sapiens
MVFSLEEKSLSLKIMQYFSHFIRSGNPNYPYEFSRKVPTFATPWPDFVPRAGGENYKEFSELLPNRQGLKKADCSFWSKYISSLKTSADGAKGGQSAESEEEELTAGSGLREDLLSLQEPGSKTYSK

SEQ ID NO: 7655 - DNA, 645 bp, Homo sapiens
agcaatttgaggaaagtcgaggccggaccagtagcaaaacagccttttaccaggcactgcagaattctctgggtggcgaggactcagatgcccgcgtcgaggctgctgctacatggtattttctctggaggagaagagcctgtcgctgaaaatcatgcagtacttttcccacttcatcagatcaggaaatcccaactacccttatgagttctcacggaaagtacccacatttgcaaccccctggcctgactttgtaccccgtgctggtggagagaactacaaggagttcagtgagctgctccccaatcgacagggcctgaagaaagccgactgctccttctggtccaagtacatctcgtctctgaagacatctgcagatggagccaagggcgggcagtcagcagagagtgaagaggaggagttgacggctggatctgggctaagagaagatctcctaagcctccaggaaccaggctctaagacctacagcaagtgaccagcccttgagctccccaaaaacctcacccgaggctgcccactatggtcatctttttctctaaaatagccacttaccttcaataaagtatctacatgcggtgaagcattgttgactctaatgtgtgaatccaaggcaattcgttggta

SEQ ID NO: 7656 - protein, 127 aa, Homo sapiens; identical to SEQ ID NO: 7654

SEQ ID NO: 7657 - DNA, 514 bp, Homo sapiens
cgagtgcaagtgggaagtgattcaggtgatgaaaggaaagacaaatttccctcatggatatttctttcttctcatttgcccagaaatcccaactacccttatgagttctcacggaaagtacccacatttgcaaccccctggcctgactttgtaccccgtgctggtggagagaactacaaggagttcagtgagctgctccccaatcgacagggcctgaagaaagccgactgctccttctggtccaagtacatctcgtctctgaagacatctgcagatggagccaagggcgggcagtcagcagagagtgaagaggaggagttgacggctggatctgggctaagagaagatctcctaagcctccaggaaccaggctctaagacctacagcaagtgaccagcccttgagctccccaaaaacctcacccgaggctgcccactatggtcatctttttctctaaaatagccacttaccttcaataaagtatctacatgcggtgaagcattgttgactctaa

SEQ ID NO: 7658 - protein, 62 aa, Homo sapiens
MKGKTNFPHGYFFLLICPEIPTTLMSSHGKYPHLQPPGLTLYPVLVERTTRSSVSCSPIDRA

SEQ ID NO: 7659 - DNA, 323 bp, Homo sapiens
aaggagttcagtgagctgctccccaatcgacagggcctgaagaaagccgactgctccttctggtccaagtacatctcgtctctgaagacatctgcagatggagccaagggcgggcagtcagcagagagtgaagaggaggagttgacggctggatctgggctaagagaagatctcctaagcctccaggaaccaggctctaagacctacagcaagtgaccagcccttgagctccccaaaaacctcacccgaggctgcccactatggtcatctttttctctaaaatagccacttaccttcaataaagtatctacatgcggtgaagc

SEQ ID NO: 7660 - protein, 71 aa, Homo sapiens
KEFSELLPNRQGLKKADCSFWSKYISSLKTSADGAKGGQSAESEEEELTAGSGLREDLLSLQEPGSKTYSK

SEQ ID NO: 7661 - DNA, 581 bp, Homo sapiens
gagtttgaaccatggtcctgccacttcctgataatggcacctcagatgcagcctacatcaaggaagctgcctgctgttaggggaacaggatacctgcagaggctccggtcctgacaatgccttcagctccacctcccaccaaagacctgtgtggtgtcagcagcagccccatttgcagaacttcccagagcaggttatctgcaatggaagcagtgatgcagcacccacatgtcccagaggaagggttgtcagctgacagctcacagctggatcacgctgggggattttttttctttcccctggagaaaatgcatctaatgactgattgagatgacgaacagaagtctggccctttgcgtatctgggctgctgacccaataaaatggagcccctgtgacctgctttcagggctttcacaactggtcccgcatgacgaccctgcctgacaaccccaacttggcttcagccttcctcttgctggatgacttcagcaagtcagacactctccatgcatgtgccttctcgtttataaaacaaagacaggattattgtgagaatcaaataaaataatggatataagc

SEQ ID NO: 7662 - protein, 70 aa, Homo sapiens
MPSAPPPTKDLCGVSSSPICRTSQSRLSAMEAVMQHPHVPEEGLSADSSQLDHAGGFFFFPLEKMHLMTD

SEQ ID NO: 7663 - DNA, 3741 bp, Homo sapiens
gagtgaggcgtggaaagcgagacagactccagtggaaggctgtggggcgggactcagggttcccggagaggccgccccagctcctgccgcagcgctgggcgccctaccacgcctgctccctagggaccccgggcgtcccacgcacgcacccaccctccttcccgggcctgccgctcctccctccttcctcgctggttggcccaggcgccgcagagcgcggcggcagcaggaggagccgggcgcgcctgccacgcaaaactaccgggctggcagggcggcgggcgcggtgcgcgatcccgggtggcggcggcaacggcggtggtgacggcggcgactgcagcggccggctctcacctctcccctgtgcacccgcatctcgccgcgccgccgagcagccagcagtccccgggtcgcccagcccacgcgcgcacggccgagcccagcgcacaatagcggcgacagccatggggaaaccggcgaggaaaggatgcgagtggaagcgcttcctgaagaataactgggtgttgctgtccaccgtggccgcggtggtgctaggcattaccacaggagtcttggttcgagaacacagcaacctctcaactctagagaaattctactttgcttttcctggagaaattctaatgcggatgctgaaactcatcattttgccattaattatatccagcatgattacaggtgttgctgcactggattccaacgtatccggaaaaattggtctgcgcgctgtcgtgtattatttctgtaccactctcattgctgttattctaggtattgtgctggtggtgagcatcaagcctggtgtcacccagaaagtgggtgaaattgcgaggacaggcagcacccctgaagtcagtacggtggatgccatgttagatctcatcaggaatatgttccctgagaatcttgtccaggcctgttttcagcagtacaaaactaagcgtgaagaagtgaagcctcccagcgatccagagatgaacatgacagaagagtccttcacagctgtcatgacaactgcaatttccaagaacaaaacaaaggaatacaaaattgttggcatgtattcagatggcataaacgtcctgggcttgattgtcttttgccttgtctttggacttgtcattggaaaaatgggagaaaagggacaaattctggtggatttcttcaatgctttgagtgatgcaaccatgaaaatcgttcagatcatcatgtgttatatgccactaggtattttgttcctgattgctgggaagatcatagaagttgaagactgggaaatattccgcaagctgggcctttacatggccacagtcctgactgggcttgcaatccactccattgtaattctcccgctgatatatttcatagtcgtacgaaagaaccctttccgatttgccatgggaatggcccaggctctcctgacagctctcatgatctcttccagttcagcaacactgcctgtcaccttccgctgtgctgaagaaaataaccaggtggacaagaggatcactcgattcgtgttacccgttggtgcaacaatcaacatggatgggactgcgctctatgaagcagtggcagcggtgtttattgcacagttgaatgacctggacttgggcattgggcagatcatcaccatcagtatcacggccacatctgccagcatcggagctgctggcgtgccccaggctggcctggtgaccatggtgattgtgctgagtgccgtgggcctgcccgccgaggatgtcaccctgatcattgctgtcgactggctcctggaccggttcaggaccatggtcaacgtccttggtgatgcttttgggacgggcattgtggaaaagctctccaagaaggagctggagcagatggatgtttcatctgaagtcaacattgtgaatccctttgccttggaatccacaatccttgacaacgaagactcagacaccaagaagtcttatgtcaatggaggctttgcagtagacaagtctgacaccatctcattcacccagacctcacagttctagggcccctggctgcagatgactggaaacaaggaaggacatttccgtgagagtcatctcaaacactgcttaaggaaaagagaaacactaatggccaagtgtacatttgatttgatatacagacctccagattattttctatatttggattcacagcctttgcgctctgggttttgggatttgggtgtggggtaagttgaagggaaatcaatttaaaggaaagttctattatctgggttttagaaattctataagagacaaagtttggaagtacataaagtaataactgttagaattaggtaatggatatgaaagagaaaatgctttctcatgcatagacaagtgttttgggtttttaaaaaaaatattctgtcattggttacaaatttttactcaggctttctattggcatggatttcctttgacctctcacttttttataaattataatgcatctaaaccacctgtccccagttaatgtgccaaaatgtcaatttttaacttatctccagccaatttcaaagaaaacagaccagcatagttctgcaataacagttttaagatgggcatagggtttggaagaaagggagaaggattcttttttcaatgtactgtattgggacgctggtaactgttaacccagtgttcagcatagagctatatatatatatatatgtatatatttattattttcatataatttgccagacagagatcagaattgaaccgtcaatgtgaaataaagagttctccttgtacttgaataataaccacgattccaacccaggtctgctttggggcttatcagaactcctttctaaggagcactagaatgagaaatcatgttgttcgatcgtttcacatctgtatatcagctctaaagcagagatgtattatggtgatactccaaggtggcatagccattcatttacaacttccagatttgagctgcctggagggaatccatatcagctctgcataagattatatacaaagctgtcactcacaaaaggctggatgtgctttcatccaactggaaggctttattcttccaagttcattcatactcaaagaggccagtactttgccatccttgcacttctgttatcagggcccaaataacagtggcaagctaccaactaagttgtattttaataaagattccatgggttgaacaagccacgttgcagaaaaagagcttcccctaacctgggttgttgcagagtaaatcccacgacataagctggtatcagtggttcgggggaaatagttccattctatgactcttgtctcctcctccaggaggactgttctaactagtaatcttggccctattcattacatcctctgcttgtcattctgctaatttatgaagatagtttattatagtctgtacttcagttctcatcttgtaaataatgcttaacataaacttgtacttacactgaaatccaaaatagtcatgtttctgcagtattctgtagccaacttaaacctgtgctttcatgtttaagaaatgagaaattgtgccaaagatagcagaagagtagataagtgctcagtattgacgacctacatctgaaatctacaacataatgatactgaattgttatgtaaacatcataaatagtaaataatgattcaatgtgaattttaaaatgcaaatattgctattgtttataggaaataaatctaaatataaatg

SEQ ID NO: 7664 - protein, 524 aa, Homo sapiens; identical to SEQ ID NO: 1071

SEQ ID NO: 7665 - DNA, 3950 bp, Homo sapiens
gagtgaggcgtggaaagcgagacagactccagtggaaggctgtggggcgggactcagggttcccggagaggccgccccagctcctgccgcagcgctgggcgccctaccacgcctgctccctagggaccccgggcgtcccacgcacgcacccaccctccttcccgggcctgccgctcctccctccttcctcgctggttggcccaggcgccgcagagcgcggcggcagcaggaggagccgggcgcgcctgccacgcaaaactaccgggctggcagggcggcgggcgcggtgcgcgatcccgggtggcggcggcaacggcggtggtgacggcggcgactgcagcggccggctctcacctctcccctgtgcacccgcatctcgccgcgccgccgagcagccagcagtccccgggtcgcccagcccacgcgcgcacggccgagcccagcgcacaatagcggcgacagccatggggaaaccggcgaggaaaggatgcgagtggaagcgcttcctgaagaataactgggtgttgctgtccaccgtggccgcggtggtgctaggcattaccacaggagtcttggttcgagaacacagcaacctctcaactctagagaaattctactttgcttttcctggagaaattctaatgcggatgctgaaactcatcattttgccattaattatatccagcatgattacaggtgttgctgcactggattccaacgtatccggaaaaattggtctgcgcgctgtcgtgtattatttctgtaccactctcattgctgttattctaggtattgtgctggtggtgagcatcaagcctggtgtcacccagaaagtgggtgaaattgcgaggacaggcagcacccctgaagtcagtacggtggatgccatgttagatctcatcaggaatatgttccctgagaatcttgtccaggcctgttttcagcagtacaaaactaagcgtgaagaagtgaagcctcccagcgatccagagatgaacatgacagaagagtccttcacagctgtcatgacaactgcaatttccaagaacaaaacaaaggaatacaaaattgttggcatgtattcagatggcataaacgtcctgggcttgattgtcttttgccttgtctttggacttgtcattggaaaaatgggagaaaagggacaaattctggtggatttcttcaatgctttgagtgatgcaaccatgaaaatcgttcagatcatcatgtgttatatgccactaggtattttgttcctgattgctgggaagatcatagaagttgaagactgggaaatattccgcaagctgggcctttacatggccacagtcctgactgggcttgcaatccactccattgtaattctcccgctgatatatttcatagtcgtacgaaagaaccctttccgatttgccatgggaatggcccaggctctcctgacagctctcatgatctcttccagttcagcaacactgcctgtcaccttccgctgtgctgaagaaaataaccaggtggacaagaggatcactcgattcgtgttacccgttggtgcaacaatcaacatggatgggactgcgctctatgaagcagtggcagcggtgtttattgcacagttgaatgacctggacttgggcattgggcagatcatcaccatcagtatcacggccacatctgccagcatcggagctgctggcgtgccccaggctggcctggtgaccatggtgattgtgctgagtgccgtgggcctgcccgccgaggatgtcaccctgatcattgctgtcgactggctcctggaccggttcaggaccatggtcaacgtccttggtgatgcttttgggacgggcattgtggaaaagctctccaagaaggagctggagcagatggatgtttcatctgaagtcaacattgtgaatccctttgccttggaatccacaatccttgacaacgaagactcagacaccaagaagtcttatgtcaatggaggctttgcagtagacaagtctgacaccatctcattcacccagacctcacagttctagggcccctggctgcagatgactggaaacaaggaaggacatttccgtgagagtcatctcaaacactgcttaaggaaaagagaaacactaatggccaagtgtacatttgatttgatatacagacctccagattattttctatatttggattcacagcctttgcgctctgggttttgggatttgggtgtggggtaagttgaagggaaatcaatttaaaggaaagttctattatctgggttttagaaattctataagagacaaagtttggaagtacataaagtaataactgttagaattaggtaatggatatgaaagagaaaatgctttctcatgcatagacaagtgttttgggtttttaaaaaaaatattctgtcattggttacaaatttttactcaggctttctattggcatggatttcctttgacctctcacttttttataaattataatgcatctaaaccacctgtccccagttaatgtgccaaaatgtcaatttttaacttatctccagccaatttcaaagaaaacagaccagcatagttctgcaataacagttttaagatgggcatagggtttggaagaaagggagaaggattcttttttcaatgtactgtattgggacgctggtaactgttaacccagtgttcagcatagagctatatatatatatatatgtatatatttattattttcatataatttgccagacagagatcagaattgaaccgtcaatgtgaaataaagagttctccttgtacttgaataataaccacgattccaacccaggtctgctttggggcttatcagaactcctttctaaggagcactagaatgagaaatcatgttgttcgatcgtttcacatctgtatatcagctctaaagcagagatgtattatggtgatactccaaggtggcatagccattcatttacaacttccagatttgagctgcctggagggaatccatatcagctctgcataagattatatacaaagctgtcactcacaaaaggctggatgtgctttcatccaactggaaggctttattcttccaagttcattcatactcaaagaggccagtactttgccatccttgcacttctgttatcagggcccaaataacagtggcaagctaccaactaagttgtattttaataaagattccatgggttgaacaagccacgttgcagaaaaagagcttcccctaacctgggttgttgcagagtaaatcccacgacataagctggtatcagtggttcgggggaaatagttccattctatgactcttgtctcctcctccaggaggactgttctaactagtaatcttggccctattcattacatcctctgcttgtcattctgctaatttatgaagatagtttattatagtctgtacttcagttctcatcttgtaaataatgcttaacataaacttgtacttacactgaaatccaaaatagtcatgtttctgcagtattctgtagccaacttaaacctgtgctttcatgtttaagaaatgagaaattgtgccaaagatagcagaagagtagataagtgctcagtattgacgacctacatctgaaatctacaacataatgatactgaattgttatgtaaacatcataaatagtaaataatgattcaatgtgaattttaaaatgcaaatattgctattgtttataggaaataaatctaaatataaatgaaattgaatcagtaatttatcttgggctaaatggttctaccccttactaggttgccccaattagtggcactagttggcagagctgttcatgagctgccagttatcattttggagtcagtttgaaaccagcctcttaacacactgctgttaactcataaaagagaagagtgttccatttcagtctcaataaacacttccctcattctttc

SEQ ID NO: 7666 - protein, 524 aa, Homo sapiens; identical to SEQ ID NO: 1071

SEQ ID NO: 7667 - DNA, 733 bp, Homo sapiens
gatggagagtctctgtcacccagaatggagtgcagtggcaccaactcagctcactgcaacctccgccttccgagttcaagcgattctcctgcctcagcacctgtagtcccagccacttgggaggttgaggcaggagaatggcgtgaacccgggaggtggaccttgcaagtgagccaaagtggcgccactgcactccagcctgggtgacacagcaagactctgtctcaaaaaagaaaaaaaaaaatagattccaagagtaaacaaaatcctcaagtgttactgtgcaaagattatactcaccatgtttgatttttttggtctctggtggtcatcccagatgcattcacagtcatttctggacctttaatgtaatccactgttgttattaaatgagctgatccacatggagttactttttgaaatcatgaagttccttatgaatgtttgttattgtgtcttaaattctttaaattcttaaaatatgtcttaactcacttaaagataaaagtaaatgtttctgtggtccttctgggagtggggaaagttacaactccacaaatgttaagagagaagggtgaacagttagcagtcaggcagcatggttgggagtcatgaggaagagcattcaagatgacacaagttttgtaagcagacctaaggaacgggctgaagaatgttgtggagacccaggtacttcgacttagcattctgagttcagagttcgcccaggagt

SEQ ID NO: 7668 - protein, 60 aa, Homo sapiens
MECSGTNSAHCNLRLPSSSDSPASAPVVPATWEVEAGEWREPGRWTLQVSQSGATALQPG

SEQ ID NO: 7669 - DNA, 1296 bp, Homo sapiens
ggaactgcaattaatatgacacctgcgctgacatctacaggtgtttctgcccagaaattagtttttattaatgccccagttcctagtggtacatcaaccccaactcttgttgcagaatcattaaaacaaactcttcctcctccattgcataaagcatatgttaagactccagagcaaccccaaatagtactgattccgtctacagtgggcacaccaataaaaataaattcatcaccagctgtgtctcagataaaggatgtgaaaattggactaaacataggtcaagcaattgtaaatacttcaggcactgtgccagctataccatcaattaacatattacaaaatgtaaccccaaaaggagaagacaaaagtagcaagggctatattttgccattgtcaacaagtggtaattcagttccagtaagctcaaattttgtgagtcagaatattacccctgttaatgaatcagtggtttcttcagcaagagcagtaaatgtgctttcagttaccggagcaaatttatctttgggttcctttccagtgacctcagcctctgcttcagctggggcacaacctcctgttttagtcagtggaaatgatacctcttcaagaattatgcctattttgtcaaatagactttgctcatcaagtctcggaaacactgtggctatatcaactgtgaaaacaggacaccttgcatcatctgttctgatttcaactacacaaccagtagtgtctcctaaatgtttaacatcagctttgcaaattcctgttacggttgccttacctacacctgcgactacatcccctaaaataataaacacagttccacattcggcagcagtaccaggagccacacgttctgtatctatttctaaaagacaatctcggacttcactccagttccattcaccagggatttcaactacagtgccaacaaatgtaaacacaaataaacctcaaactgaattgtcgtccctttcaacaagtccagtgagctttctcttaagtgtgccaagctgccatccaactttcttgagcattttttctcatgggaaatgatcaagttttgatagcagaaagtgcttctttccaagactttctcgaggccatcttcctgtaggcgtcatgcttctgatgttacacagctgatattttcatatgagctgcatttttagactacaaagatgcttactcagcagtcatcaacacagaagacttctgtgaccacatgtgagaagtgtttctttccactgccaagcaagcaatcaagtctgcggtggatacccactgggt

SEQ ID NO: 7670 - protein, 348 aa, Homo sapiens
MTPALTSTGVSAQKLVFINAPVPSGTSTPTLVAESLKQTLPPPLHKAYVKTPEQPQIVLIPSTVGTPIKINSSPAVSQIKDVKIGLNIGQAIVNTSGTVPAIPSINILQNVTPKGEDKSSKGYILPLSTSGNSVPVSSNFVSQNITPVNESVVSSARAVNVLSVTGANLSLGSFPVTSASASAGAQPPVLVSGNDTSSRIMPILSNRLCSSSLGNTVAISTVKTGHLASSVLISTTQPVVSPKCLTSALQIPVTVALPTPATTSPKIINTVPHSAAVPGATRSVSISKRQSRTSLQFHSPGISTTVPTNVNTNKPQTELSSLSTSPVSFLLSVPSCHPTFLSIFSHGK

SEQ ID NO: 7671 - DNA, 831 bp, Homo sapiens
tgacctcagcctctgcttcagctggggcacaacctcctgttttagtcagtggaaatgatacctcttcaagaattatgcctattttgtcaaatagactttgctcatcaagtctcggaaacactgtggctatatcaactgtgaaaacaggacaccttgcatcatctgttctgatttcaactacacaaccagtagtgtctcctaaatgtttaacatcagctttgcaaattcctgttacggttgccttacctacacctgcgactacatcccctaaaataataaacacagttccacattcggcagcagtaccaggagccacacgttctgtatctatttctaaaagacaatctcggacttcactccagttccattcaccagggatttcaactacagtgccaacaaatgtaaacacaaataaacctcaaactgaattgtcgtccctttcaacaagtccagtgagctttctcttaagtgtgccaagctgccatccaactttcttgagcattttttctcatgggaaatgatcaagttttgatagcagaaagtgcttctttccaagactttctcgaggccatcttcctgtaggcgtcatgcttctgatgttacacagctgatattttcatatgagctgcatttttagactacaaagatgcttactcagactcagcccaagtctccatgtccatcacctgggacactgtctgaggaactctgtgaggagagccttttccacagagaaatgagagcaccctcagtatcgctctgaagacttgatgaaggtttgctgacaagaaagggcttactcactgtacacagcccttcaataactcctac

SEQ ID NO: 7672 - protein, 148 aa, Homo sapiens
MPILSNRLCSSSLGNTVAISTVKTGHLASSVLISTTQPVVSPKCLTSALQIPVTVALPTPATTSPKIINTVPHSAAVPGATRSVSISKRQSRTSLQFHSPGISTTVPTNVNTNKPQTELSSLSTSPVSFLLSVPSCHPTFLSIFSHGK

SEQ ID NO: 7673 - DNA, 522 bp, Homo sapiens
cagaacctctggatatcctggagaaagatcactttgattcaggtaagcattaaactttttttttaagtcaacactgaaggcacaaagagaagtttttgtttgctgtgaaggcaaaagataatatggtcaatgaaatatattgattagggaaatctgttatgttttgaagaagtagtgtccacatccttataagaagtttctactagcctaggcaacatagcgagaccccatctcaacaaaaaaataaataaaaattagccaggcatggtggttgcatccctgtagtcccagctattcaagaggtcgagataggagtatcacttgaggccaggaatttaaggttacagtgagctgtccactgctttctagactgggcaacagagcaaaatgctgtctcaaaaaaaaaaaaaaaaaagaaaagaaaagaaaaaggacctaagcaaaaagaacaaaactggaaggatcacattatgtgacttcaaattacactacaaagcctatagtaaccaaaacatcatggta

SEQ ID NO: 7674 - protein, 44 aa, Homo sapiens
MLSQKKKKKRKEKKKDLSKKNKTGRITLCDFKLHYKAYSNQNIM

SEQ ID NO: 7675 - DNA, 7137 bp, Homo sapiens
atggagccggctggggaggaagagcggccgccaccggcggccgaaggagaggacgacgaggaggaggtggcagcggcggcccagacctcagggccggcccacggaaggagtgcctcctcgctggaggacgcggacgatcaggaggaagagatggaggcgatggtgatcggaggcggttgctgcaaggagcaggagctgacctacgagctacagcagggctaccgcatcctgggcgagttcctgcaggagaagcaccggggcctcaccgccccctttctgcagcccttggggggcgttgccaccgcggaggaggaggtggcggaagggccgcgcagcgggggccggggcggtcgcgccttcccgcagcagcccggacagggcatgtgtctgctgcagatggaagagaagttcgccagcggccagtacgggggcatcaccgagttcgtggcggacttcaggttgatgctggagacgtgctaccgcctgcacggagtggaccactggatctccaaacagggccagaagctggagatgatgctggagcagaagttagcgcttctctctcggcacttgagagaaaagacaacgatagcagttacatctagaggctattatggattggaggatgagaagggaactgcatgtacctcaacaaggcgtcggtcaacaccgcgaagtttggcaggcttgacaagtggagtttttgaatctataatggttcaagttttgagacaggaagaacagctgagagcaaaagaagaaaaaagagcttcacagaactactcctactataggaaaggagggcttatggaaaggggagcaagtcagttggtgctaactttggcctaccaggcaaactgtgtttctgtctcttatactgacctgctaggaaaacctgggggaagttatttcacctttctgtatgtccttaatattcgcagcaggcttcgggagcaggaaagaaaagaagcagaagaagctagtcaaaaggaaatagaagaatgggaaagaaaacttctagctcaagcagctccaacttgtatggagaccatgtgggaaattccagctattgggcatttcctttgtttagctcagcaaattctaaatttgccagaaatagtcttttacgaattggaacgttgtcttctgatgcctcagtgtaatgcttttctatcgaaaataatgacttctctattaagtcctccccatcgcagacctaccttacatcgaagacctactttgccttataggacctgggaagcagcgctgaggcagaaagtacaacagtggtacactgctgtagggcaaactgaaaatcctgataactgtgctgaaaaactggggttgtgtcctcagttttttaaagttcttggagaagttaatccattggaagaaaaaccttttcacgaactacctttttaccaaaaagtgtggctacttaagggtctttgtgactttgtgtatgaaacacaaaaggaagttcaagatgctgtacttggacagcctatccatgaatgcagggaagttattcttggttatgattatttggagaatgcttatgtacattttccacagttctgtggtgcagatgtacggatttataaacagagaccctttcaggccccagaatttccaattccacccattaaaatacaaagagtacctcggattaaattggagaaattgaagtgtgactatgttagtacaagtaatggagaacatagatgtagcagagatagcctgccctcttccttcaagaaagagcaggaaaataattttgatccagcttgctgtcctgctaaaatgatcttggataatcatgacatctctgttgaaatgggagtaaaatccaactatgaaattagaattcgcaggccttgtgaaattaaaaaaactgattgttgtaaagaaaatttagagaaaccaaggagtccaggggaagttactggctttggagagcctcttagtccaggtgaaataaggtttatagaaaatcaggaaaaatacggtgaagcttccagaataaagattgaacccagtccattaaaagaaaatactctaaaatcttgccaaatacatgtaaatggaagtcacagtgatcatccagaaattaactgccacaaagttgtaagggatattctattagagcagtcactacagagccacaagaaactcaaactaactaaaatgagggcaaaaaagaagaaaaagaaaaaaaagaaattgaaagatgttttgaatgaaaacttacagagaaagcgtgaaggtcttcattctcttgcattcaagtcttacaaacctgagatccagaataagttattgatcatcaaaaaaaaagcaaaacacaagaagcacaaatctggaaaaaaatccgtctctaaaaaagcaatcacaaagaagaggaaaactgtcataaagtcacctactgtaccagagtttcagcttatttgcactaatcttgatgaactcagggaattaatcacaaaaatcgagaatgaactcaaagatctggaaaacagtagaaaaaaatcgggaaaatggtatcatcggaggcaagctgtaaaagaattacatagtacattgatacgtcttttaaatgaattgctgccatgggaaccaaagttaatgaaggctttccaaagaaacaggagccgcctgaagaaagactatgatgatttcagaagacaacctgatcatgatacatttaatagagaactatggaccactgatgaaggtgaaggagatcttggaaaagactctcctaagggagaaatcagtaagtctatagactcaacagaacctctggatatcctggagaaagatcactttgattcagatgatatgaagttgtcagaaatagattttcctatggctagaagcaagctgttgaaaaaggaattgccttcaaaagacttaccgaagacactgcttaaaacacttaaacgacagtccaaacaaactgattatgtggatgacagcacaaaagagctttctccaaggaagaaggcaaagttaagcacaaatgagacaacagttgagaatctagaaagtgatgtgcagattgactgtttcagtgaatcaaagcatacagagccatcatttccagagtcatttgcctcattggattcagtaccagtgtctactctccagaaagggaccaaacccattcaggctttgcttgcaaagaatattgggaataaagtgaccttaacaaatcaactgcctccttccacaggtagaaatgctcttgctgtggaaaaaccagttttatctcctccggaagcaagcccgataaagccagcattgacctgccacaccaatacaaaaggtcctttacaaatggtatacaaaatgccctgtggccagtggttgccaatagatcttcaaaatagctctgtaaagattcaggtgcagcctatggtggatcctaaaacaggagaaaaaatcatgcagcaagttcttattctgcctaagaattttgtgattcagcataaagaaggaaaagcagttgcaaaagaagtgccaccacttcaacagaaaggtacagaacaacattgttcatctttcccacagacaacaaatataaattcttctttagcatcagtttttgtcaactcaccaggaactgtttctacccaactaccaaatacagctttcaacaaaacaattacacctttatcaaatataagtagtgctagaccacagcctttgtcgcctgtaacctctgtaagtaacttattaacaccatcagttaagactagccagagtgaggcaggaaaagccaagaatgcagtttcagcagccacattctccttgcccagtgcttcaccgaccatttcctccacaggtcagcctctgtcatcaacaacaacactaaatgggtctacaaatcctggtagttccttcaactgttttgcacaacagactgctgattcttctgaagcaaagcaagagctgaaaactgtgtgcataagagattcacagtcaattcttgttaggacacgaggtgggaacactggagttgtaaaagtacagaccaacccagatcaaaattcacccaatactgtatcttcaagttcagttttcacttttgctcctcagctgcaggcatttctggtgccaaaatcaacaacttcttcctctgctttttcacctgtagctggaacaactactacatctagtctttcaccttttagccaaacaccaacttctgtttccattccagctagctttgccccatccatggggaaaaatctcaaacttacattaggccacaccactggcagtggtgatttgggccacgtgatagataaaacttcacacatgccctcttctcccttgaagtcctctatttgttctagtactctactaccatcaacaacaagtagttcggtaagtgtaattagcatatcagcagcaaattttggacaaaacaatgcaaatattattcatactccaactaaacagcaacaagtagattatatcacaaaaagttaccctgttacaaggtcagaagcaacagcagcaacaaatggagatgtaatcagtgggactccagttcagaaacttatgctggtatcagctccatctattctttcttctggcaatggaactgcaattaatatgacacctgcgctgacatctacaggtgtttctgcccagaaattagtttttattaatgccccagttcctagtggtacatcaaccccaactcttgttgcagaatcattaaaacaaactcttcctcctccattgcataaagcatatgttaagactccagagcaaccccaaatagtactgattccgtctacagtgggcacaccaataaaaataaattcatcaccagctgtgtctcagataaaggatgtgaaaattggactaaacataggtcaagcaattgtaaatacttcaggcactgtgccagctataccatcaattaacatattacaaaatgtaaccccaaaaggagaagacaaaagtagcaagggctatattttgccattgtcaacaagtggtaattcagttccagtaagctcaaattttgtgagtcagaatattacccctgttaatgaatcagtggtttcttcagcaagagcagtaaatgtgctttcagttaccggagcaaatttatctttgggttcctttccagtgacctcagcctctgcttcagctggggcacaacctcctgttttagtcagtggaaatgatacctcttcaagaattatgcctattttgtcaaatagactttgctcatcaagtctcggaaacactgtggctatatcaactgtgaaaacaggacaccttgcatcatctgttctgatttcaactacacaaccagtagtgtctcctaaatgtttaacatcagctttgcaaattcctgttacggttgccttacctacacctgcgactacatcccctaaaataataaacacagttccacattcggcagcagtaccaggagccacacgttctgtatctatttctaaaagacaatctcggacttcactccagttccattcaccagggatttcaactacagtgccaacaaatgtaaacacaaataaacctcaaactgaattgtcgtccctttcaacaagtccaggtaaaataactaatacgtccaattttgcttctctgccaaatcagcaagctttagtaaaaacccccagttacagttctgctccaggtggcactaccattcacacggcttcggcaccatccaatgtaactagtctagtcgggagtcagttcagtgaaccttgtattcagcaaaaaatagtcatcaataccagtacacctttggcacctggtactcagattatgattaacggaacccggtttattgttccaccacaaggtcttggagctggcagccatgttctccttatatctactaatccaaaatatggagcccccttagttcttaacagtggccaaggcattcaatctacaccaatagataactctgcccagaagatcacactagcatcaaataattccttaagtggccaacctctacaacatcctctaagaagccctacaaaatttataaactcttttgggaatgcaagttctatacccacagtacatacatcaccacaactcataaacacaactgctaaggttcctgttccacctcctgtaccaacagtatcactgacttcagtaattaagtctccagctactcttttggctaagacatctttggtttctgccatttgccccagtaatcctccactgccaagtagcacttcagtgtttcatttggacccacctgtcaaaaaattgttggttagcccagaaggagccattttgaataccataaatactccagcatctaaggtttcttcactctctccatctctctctcagattgttgtatctgccagtcgaagtcctgcgtctgtcttccctgcttttcagtcgtcgggcttagagaagcctgacagagctgcatcttgaatttagactaaaagagccagtttttaaataatggggcattgttttgactcccataaaaattttcaatgtttattatactgttgaaagcatactatacattgtgtgtgtgtgtgtgtgtgtgtgtgtgtgtgtgtgtgtgttttaatgtatcttttcattagcttgcaacaaggctttgttttcttggggagggaaagatctgttccatttcacttactgttctgaggagggtttcaaggttctgtgtttaaagtcaggatttacctgtctgtagaacataaagtgaacaaagtttgaatagtttagagtaagctagccttttgcacatttacattgacatgtttcttcttgaatttggactgttgcagcatatctatgatatggtattcagtgtcattagtgaaatcttatttttgtttctgtaaaaaaaaaaatacatatatatatttatgcattgtgaaaaatgcagtccatgatgtaaaattgtacatattccagaatccctaacaacctgtactaaatatatgtacaaagaactatgctgtcttatttatgttttgtttacataatgtatagttttttaagtattttagtaattttggaccagtgaactgttagcaacaatgcagaagaatctgcatgtaataaactgagttgctgtatttctttgtttga

SEQ ID NO: 7676 - protein, 2153 aa, Homo sapiens
MEPAGEEERPPPAAEGEDDEEEVAAAAQTSGPAHGRSASSLEDADDQEEEMEAMVIGGGCCKEQELTYELQQGYRILGEFLQEKHRGLTAPFLQPLGGVATAEEEVAEGPRSGGRGGRAFPQQPGQGMCLLQMEEKFASGQYGGITEFVADFRLMLETCYRLHGVDHWISKQGQKLEMMLEQKLALLSRHLREKTTIAVTSRGYYGLEDEKGTACTSTRRRSTPRSLAGLTSGVFESIMVQVLRQEEQLRAKEEKRASQNYSYYRKGGLMERGASQLVLTLAYQANCVSVSYTDLLGKPGGSYFTFLYVLNIRSRLREQERKEAEEASQKEIEEWERKLLAQAAPTCMETMWEIPAIGHFLCLAQQILNLPEIVFYELERCLLMPQCNAFLSKIMTSLLSPPHRRPTLHRRPTLPYRTWEAALRQKVQQWYTAVGQTENPDNCAEKLGLCPQFFKVLGEVNPLEEKPFHELPFYQKVWLLKGLCDFVYETQKEVQDAVLGQPIHECREVILGYDYLENAYVHFPQFCGADVRIYKQRPFQAPEFPIPPIKIQRVPRIKLEKLKCDYVSTSNGEHRCSRDSLPSSFKKEQENNFDPACCPAKMILDNHDISVEMGVKSNYEIRIRRPCEIKKTDCCKENLEKPRSPGEVTGFGEPLSPGEIRFIENQEKYGEASRIKIEPSPLKENTLKSCQIHVNGSHSDHPEINCHKVVRDILLEQSLQSHKKLKLTKMRAKKKKKKKKKLKDVLNENLQRKREGLHSLAFKSYKPEIQNKLLIIKKKAKHKKHKSGKKSVSKKAITKKRKTVIKSPTVPEFQLICTNLDELRELITKIENELKDLENSRKKSGKWYHRRQAVKELHSTLIRLLNELLPWEPKLMKAFQRNRSRLKKDYDDFRRQPDHDTFNRELWTTDEGEGDLGKDSPKGEISKSIDSTEPLDILEKDHFDSDDMKLSEIDFPMARSKLLKKELPSKDLPKTLLKTLKRQSKQTDYVDDSTKELSPRKKAKLSTNETTVENLESDVQIDCFSESKHTEPSFPESFASLDSVPVSTLQKGTKPIQALLAKNIGNKVTLTNQLPPSTGRNALAVEKPVLSPPEASPIKPALTCHTNTKGPLQMVYKMPCGQWLPIDLQNSSVKIQVQPMVDPKTGEKIMQQVLILPKNFVIQHKEGKAVAKEVPPLQQKGTEQHCSSFPQTTNINSSLASVFVNSPGTVSTQLPNTAFNKTITPLSNISSARPQPLSPVTSVSNLLTPSVKTSQSEAGKAKNAVSAATFSLPSASPTISSTGQPLSSTTTLNGSTNPGSSFNCFAQQTADSSEAKQELKTVCIRDSQSILVRTRGGNTGVVKVQTNPDQNSPNTVSSSSVFTFAPQLQAFLVPKSTTSSSAFSPVAGTTTTSSLSPFSQTPTSVSIPASFAPSMGKNLKLTLGHTTGSGDLGHVIDKTSHMPSSPLKSSICSSTLLPSTTSSSVSVISISAANFGQNNANIIHTPTKQQQVDYITKSYPVTRSEATAATNGDVISGTPVQKLMLVSAPSILSSGNGTAINMTPALTSTGVSAQKLVFINAPVPSGTSTPTLVAESLKQTLPPPLHKAYVKTPEQPQIVLIPSTVGTPIKINSSPAVSQIKDVKIGLNIGQAIVNTSGTVPAIPSINILQNVTPKGEDKSSKGYILPLSTSGNSVPVSSNFVSQNITPVNESVVSSARAVNVLSVTGANLSLGSFPVTSASASAGAQPPVLVSGNDTSSRIMPILSNRLCSSSLGNTVAISTVKTGHLASSVLISTTQPVVSPKCLTSALQIPVTVALPTPATTSPKIINTVPHSAAVPGATRSVSISKRQSRTSLQFHSPGISTTVPTNVNTNKPQTELSSLSTSPGKITNTSNFASLPNQQALVKTPSYSSAPGGTTIHTASAPSNVTSLVGSQFSEPCIQQKIVINTSTPLAPGTQIMINGTRFIVPPQGLGAGSHVLLISTNPKYGAPLVLNSGQGIQSTPIDNSAQKITLASNNSLSGQPLQHPLRSPTKFINSFGNASSIPTVHTSPQLINTTAKVPVPPPVPTVSLTSVIKSPATLLAKTSLVSAICPSNPPLPSSTSVFHLDPPVKKLLVSPEGAILNTINTPASKVSSLSPSLSQIVVSASRSPASVFPAFQSSGLEKPDRAAS

SEQ ID NO: 7677 - DNA, 473 bp, Homo sapiens
ctcttacttaaaaactgccgttttctctgaaataagttatgggcagtcacctgcgagaaagtgatggaatgaagcttttgaatagtggtagcatttgggcctcatttgatccacccgccttggcctcccaaagtgctgggattacaggcatgagccactgcgcctggcttcatttagaatatttttaaacagattagataaccatgagttttgagtgtgctgatagaatttttataggtgacacatgtacattgtttttgatagcaaaagaaaaatcacataatgcaaaagtgttcaaacatctatttttagtaggggagtaggtgtcagtttgtatgttaactataagtaaagcttaatatcaattcactttcttgttaagacttattgtaataattttaaacagaatcaagcctctgaattctgaaatttggaatgtattaacacagaaaagactttacatgctttgtgtt

SEQ ID NO: 7678 - protein, 49 aa, Homo sapiens
MGSHLRESDGMKLLNSGSIWASFDPPALASQSAGITGMSHCAWLHLEYF

SEQ ID NO: 7679 - DNA, 545 bp, Homo sapiens
ctacgcatgcgcaccggggatggcgacagggcctctttctttgcttctctccacagctcttcccagccggggggctgagtgccctcccccttctctccctgcccctcccctttctcccccctcctcgcgcgccatgtaaccccgccccgccggcggtgagctcaagacccccgcgcgcaccgagccgagccggcggctgaggagagccaggcccgatgtggcgggggctacgcgccgcggccgagccgtgaggaagcggctcgcgctcacgcgtcccccagcacctcgagcggctgttccacaccgcccagcctaggcctgccggggcatgagtgtgcccgggacgccgggagcgatggagccggctggggaggaagagcggccgccaccggcggccgaaggagaggacgacgaggaggaggtggcagcggcggcccagacctcagggccggcccacggaaggagtgcctcctcgctggaggacgcggacgatcaggaggaagagatggaggcgatggtgatcggaggcggttgctgcaaggagc

SEQ ID NO: 7680 - protein, 39 aa, Homo sapiens
MATGPLSLLLSTALPSRGAECPPPSLPAPPLSPPSSRAM

SEQ ID NO: 7681 - DNA, 3479 bp, Homo sapiens
gcgcaatggcggcaaccgcgtctgcaggggtgccggcgaccgtgtcagaaaagcaagagttttaccagcttctgaagaacctgatcaatccaagctgtatggtgcggaggcaagcagaggaaatctatgaaaatatcccaggatcctcatccaagggtgagggctgcagcctgtactacacttggacagatggctacagattttgcacctaatttccaaaagaaatttcatgaaacagtgattgcagctctgttacgtaccatggaaaatcaaggtaatcagcgtgtgcaatcacatgcagcttctgctcttattatttttattgaagactgccctaaatcattgctagttctatatgtggatagtatggtgaaaaatctacattccgtcttggtgattaaacttcaagagttgattcggaatggaactaagttggctttggaacaacttgtgacaaccattgcatcagttgcagatacaatagaagaaaaatttgtcccatattatgatatattcatgccctcactaaagcacattgttgagcttgctgttcagaaggaactcaagcttctgagaggaaaaactatcgagtgcattagccatattggtcttgctgttgggaaggaaaaatttatgcaagatgcatcaaatgtgatgcagctgttgttgaagacacaatcagacttaaataatatggaagatgatgaccctcagacctcttacatggtttcagcatgggctagaatgtgtaaaattcttggaaaagattttcaacagtaccttccactggttatcgagcctcttattaagactgcttcagctaaacctgatgttgctctcttagacacacaggatgtggaaaatatgagtgacgatgatggctggcaatttgtaaatcttggagaccagcagagttttggaattaaaacttcaggacttgaagcaaaagcaactgcttgccaaatgttggtttactatgctaaggagttaagggaagggtttgtggaatatacagaacaagttgtgaagctgatggttcctttactgaaattttatttccatgacaatgttcgagtggcagcagcagagtccatgccttttctcctggaatgtgcaagaattcgtggcccagagtatcttgcacagatgtggcaattcatatgtgaccccttaatcaaggctattggtactgaaccagatacagatgtgctctcagaaataatgaattcttttgcaaagtccattgaagttatgggagatggttgccttaatgatgaacacttggaagaactgggaggaatactgaaagcaaaacttgaagggcactttaaaaaccaagaattgagacaggtgaaaagacaggaagaaaactatgatcaacaggttgagatgtctctgcaagatgaggatgaatgtgatgtttatattctgaccaaagtatcagatattttgcactcattatttagtacttataaggaaaagattttaccatggtttgaacaactacttccattaattgtaaatctaatttgttcaagtaggccatggccagacagacagtggggattgtgcatatttgatgacatcatagagcactgcagtccaacttcatttaaatatgtagaatattttcggtggccaatgctactaaatatgcgagataacaaccctgaagtcaggcaagctgctgcttatggcctgggtgtcatggcacagtttggtggagatgattatcgttctttatgttcagaagctgttccacttctggtaaaagttattaagtgtgcaaattccaaaaccaaaaaaaatgtcattgctacagagaactgtatctcagcaatagggaagattttgaagtttaagcctaactgtgtaaatgtagatgaagttcttccacactggttatcatggcttccactgcatgaagataaagaggaagctattcagactttgagttttctctgtgacctaattgaaagtaaccacccagttgtaattggtccaaataattccaatcttcccaaaataatcagtataattgcagaaggaaaaattaatgagactattaactatgaggatccttgtgccaaacgcctagctaatgtcgtgcgtcaggtacagacttctgaagatttatggttggaatgtgtatcacaacttgatgatgaacagcaggaagccttacaggagttgctaaattttgcttgaagcactttaatataacttgaatattatctattataaaagtaactacaaataagtgttgtgaatagattttattataaatcagagaactgttttctccctgctaagcagtttatagttcttctccatgtttctccagaattaatcagtgttagtcctctgtttatctcgcatgttttatcttccaaacacagaccttggtgataacctgtgcttcaaactgtcttaaacaatgtttgtcacctttcccctagttgatgtaaagtatataaattgttgctatttgtttgaactattattgatgctagccaagcagtatacttgatgtgaagatgtcatgctatcacaatatgctaagagctcacaaaaataagatagaatttccaggacaaacatctttggaattgtgagtgaaggatatagtggcaggcttgtccctctttaattaatactcttggtatttgtggtgatgggaggatgctgttactaggagagttttgagatactgcagtggatgtgggatgtatatgaacttcttcataatgtactcctgggaactgggtaggacatatccatattgtagttcccaaggtgtctggttgagagttagagaacttttaaatttctttagccagacaggtctctatttttttaagttatccaggactccaagaaccatagttactgaaaagggagtcctgatacatctaatattggtagcatgtaacagtgtttgacaaagagtaagtaagcagtattcttgggagtcagtgttatgtgtttcagcagagtattattttgtatatgtatgccattttctccctgcaaagcagctcaacaagagaaaaagctctagttatagggcttaaattgatttctatttcaaataatttcctaagagattctagagtagaactgaagagtattctattggaaaagtgaaaggaaagaaatgtaattttctttgaacatgaaaaagaaaacaactttgagagtagtcatttagcagtagatgtgcattattatgagaaaacagttctataagtccagggttaattatattaattggaatgtcagtctttaatgtcgagcttattgtagggtagaaaagagctttctactcagctaacgattactcattgatccaaaacttaaatacatctataatttcctggggctattgtgagtactgtgtatgtatttagcaaatatttaagacctagtaagtgctcaataaattgtagctgttattgctgttgttgtttgtacctcta

SEQ ID NO: 7682 - protein, 693 aa, Homo sapiens
MKISQDPHPRVRAAACTTLGQMATDFAPNFQKKFHETVIAALLRTMENQGNQRVQSHAASALIIFIEDCPKSLLVLYVDSMVKNLHSVLVIKLQELIRNGTKLALEQLVTTIASVADTIEEKFVPYYDIFMPSLKHIVELAVQKELKLLRGKTIECISHIGLAVGKEKFMQDASNVMQLLLKTQSDLNNMEDDDPQTSYMVSAWARMCKILGKDFQQYLPLVIEPLIKTASAKPDVALLDTQDVENMSDDDGWQFVNLGDQQSFGIKTSGLEAKATACQMLVYYAKELREGFVEYTEQVVKLMVPLLKFYFHDNVRVAAAESMPFLLECARIRGPEYLAQMWQFICDPLIKAIGTEPDTDVLSEIMNSFAKSIEVMGDGCLNDEHLEELGGILKAKLEGHFKNQELRQVKRQEENYDQQVEMSLQDEDECDVYILTKVSDILHSLFSTYKEKILPWFEQLLPLIVNLICSSRPWPDRQWGLCIFDDIIEHCSPTSFKYVEYFRWPMLLNMRDNNPEVRQAAAYGLGVMAQFGGDDYRSLCSEAVPLLVKVIKCANSKTKKNVIATENCISAIGKILKFKPNCVNVDEVLPHWLSWLPLHEDKEEAIQTLSFLCDLIESNHPVVIGPNNSNLPKIISIIAEGKINETINYEDPCAKRLANVVRQVQTSEDLWLECVSQLDDEQQEALQELLNFA

SEQ ID NO: 7683 - DNA, 4599 bp, Homo sapiens
gctttgacagagcgcaatggcggcaaccgcgtctgcaggggtgccggcgaccgtgtcagaaaagcaagagttttaccagcttctgaagaacctgatcaatccaagctgtatggtgcggaggcaagcagaggaaatctatgaaaatatcccaggtctgtgtaagactaccttcctcttagatgccgtcagaaatagaagagcaggttatgaggtgagacaaatggctgccgcactgctacgacggcttttgtcctctgggtttgaggaggtttatccaaatctgcctgctgatgttcagagagatgtcaagattgaactgattctggctgttaagttagaaacacatgctagcatgaggaaaaaactttgtgatatttttgcagtgctggccaggaatttgatagatgaggatggcactaaccactggccggaaggtctgaagtttcttattgattcaatctactccaaaaatgtggttctatgggaagttgcacttcacgttttctggcactttcctgggatttttgggacccaagagcggcatgatttggatatcatcaaacggttgttggaccagtgtattcaagatcaagaacatccagcaatcaggacattatccgctagagctgcagctgcatttgtacttgctaatgagaataatattgctcttttcaaagactttgcagacttgcttcctggaatcttacaggctgtgaatgactcatgctaccaggatgatgattcagtgctagaatcccttgttgagattgcagataccgtacctaagtacttgggtccttatttagaagatactctacagttgagtttgaagttatgtggagactctaggcttagtaatctgcagcgccagctggccctcgaagttatagtgaccttgtctgaaactgccactccgatgttgaaaaaacatacaaatattattgcacaggcagttcctcatatattagcaatgatggttgatctacaagatgatgaggactgggtaaatgctgatgaaatggaagaagatgattttgacagcaatgcagttgctgcggagagtgcactagacagactggcttgtgggcttggtggaaaagttgttttaccaatgaccaaggagcatatcatgcagatgcttcagagccctgactggaagtatcgacatgctggattaatggccttatctgccattggagaaggatgccatcaacaaatggaatcaattctagatgaaacagttaactccgttttgctttttcttcaggatcctcatccaagggtgagggctgcagcctgtactacacttggacagatggctacagattttgcacctaatttccaaaagaaatttcatgaaacagtgattgcagctctgttacgtaccatggaaaatcaaggtaatcagcgtgtgcaatcacatgcagcttctgctcttattatttttattgaagactgccctaaatcattgctagttctatatgtggatagtatggtgaaaaatctacattccgtcttggtgattaaacttcaagagttgattcggaatggaactaagttggctttggaacaacttgtgacaaccattgcatcagttgcagatacaatagaagaaaaatttgtcccatattatgatatattcatgccctcactaaagcacattgttgagcttgctgttcagaaggaactcaagcttctgagaggaaaaactatcgagtgcattagccatattggtcttgctgttgggaaggaaaaatttatgcaagatgcatcaaatgtgatgcagctgttgttgaagacacaatcagacttaaataatatggaagatgatgaccctcagacctcttacatggtttcagcatgggctagaatgtgtaaaattcttggaaaagattttcaacagtaccttccactggttatcgagcctcttattaagactgcttcagctaaacctgatgttgctctcttagacacacaggatgtggaaaatatgagtgacgatgatggctggcaatttgtaaatcttggagaccagcagagttttggaattaaaacttcaggacttgaagcaaaagcaactgcttgccaaatgttggtttactatgctaaggagttaagggaagggtttgtggaatatacagaacaagttgtgaagctgatggttcctttactgaaattttatttccatgacaatgttcgagtggcagcagcagagtccatgccttttctcctggaatgtgcaagaattcgtggcccagagtatcttgcacagatgtggcaattcatatgtgaccccttaatcaaggctattggtactgaaccagatacagatgtgctctcagaaataatgaattcttttgcaaagtccattgaagttatgggagatggttgccttaatgatgaacacttggaagaactgggaggaatactgaaagcaaaacttgaagggcactttaaaaaccaagaattgagacaggtgaaaagacaggaagaaaactatgatcaacaggttgagatgtctctgcaagatgaggatgaatgtgatgtttatattctgaccaaagtatcagatattttgcactcattatttagtacttataaggaaaagattttaccatggtttgaacaactacttccattaattgtaaatctaatttgttcaagtaggccatggccagacagacagtggggattgtgcatatttgatgacatcatagagcactgcagtccaacttcatttaaatatgtagaatattttcggtggccaatgctactaaatatgcgagataacaaccctgaagtcaggcaagctgctgcttatggcctgggtgtcatggcacagtttggtggagatgattatcgttctttatgttcagaagctgttccacttctggtaaaagttattaagtgtgcaaattccaaaaccaaaaaaaatgtcattgctacagagaactgtatctcagcaatagggaagattttgaagtttaagcctaactgtgtaaatgtagatgaagttcttccacactggttatcatggcttccactgcatgaagataaagaggaagctattcagactttgagttttctctgtgacctaattgaaagtaaccacccagttgtaattggtccaaataattccaatcttcccaaaataatcagtataattgcagaaggaaaaattaatgagactattaactatgaggatccttgtgccaaacgcctagctaatgtcgtgcgtcaggtacagacttctgaagatttatggttggaatgtgtatcacaacttgatgatgaacagcaggaagccttacaggagttgctaaattttgcttgaagcactttaatataacttgaatattatctattataaaagtaactacaaataagtgttgtgaatagattttattataaatcagagaactgttttctccctgctaagcagtttatagttcttctccatgtttctccagaattaatcagtgttagtcctctgtttatctcgcatgttttatcttccaaacacagaccttggtgataacctgtgcttcaaactgtcttaaacaatgtttgtcacctttcccctagttgatgtaaagtatataaattgttgctatttgtttgaactattattgatgctagccaagcagtatacttgatgtgaagatgtcatgctatcacaatatgctaagagctcacaaaaataagatagaatttccaggacaaacatctttggaattgtgagtgaaggatatagtggcaggcttgtccctctttaattaatactcttggtatttgtggtgatgggaggatgctgttactaggagagttttgagatactgcagtggatgtgggatgtatatgaacttcttcataatgtactcctgggaactgggtaggacatatccatattgtagttcccaaggtgtctggttgagagttagagaacttttaaatttctttagccagacaggtctctatttttttaagttatccaggactccaagaaccatagttactgaaaagggagtcctgatacatctaatattggtagcatgtaacagtgtttgacaaagagtaagtaagcagtattcttgggagtcagtgttatgtgtttcagcagagtattattttgtatatgtatgccattttctccctgcaaagcagctcaacaagagaaaaagctctagttatagggcttaaattgatttctatttcaaataatttcctaagagattctagagtagaactgaagagtattctattggaaaagtgaaaggaaagaaatgtaattttctttgaacatgaaaaagaaaacaactttgagagtagtcatttagcagtagatgtgcattattatgagaaaacagttctataagtccagggttaattatattaattggaatgtcagtctttaatgtcgagcttattgtagggtagaaaagagctttctactcagctaacgattactcattgatccaaaacttaaatacatctataatttcctggggctattgtgagtactgtgtatgtatttagcaaatatttaagacctagtaagtgctcaataaattgtagctgttattgctgttgttgtttgta

SEQ ID NO: 7684 - protein, 1105 aa, Homo sapiens; identical to SEQ ID NO: 1075

SEQ ID NO: 7685 - DNA, 9312 bp, Homo sapiens
gcggccgctgctccgcgggattaaattggccgcccggaggcggcggcgcggccgtggcggggcgcgaaggcgctggaggaaagtgttggcggcggcgcgggaggcggtggcggcggctgcccggggccaacatgaccaggctctgaaagtgttccagctgaaatttcagatcggacagactcgctgcggctccggaggcagtgattccaagctgctcgcgcacgctgctgccaagctgcaggatggtgcacgtagccaggctgctgctgctgctcctcactttcttcctccgcacggatgctgagacacctccaaggtttacacgaacacccgttgatcagacaggggtctctggcggagttgcctctttcatctgccaagctacgggagacccaagacctaaaattgtctggaacaaaaaaggaaagaaagtcagcaatcagagatttgaggtaatagagtttgacgatgggtctggatcagttctcagaatacaacccttacggactccgagggatgaggccatttatgaatgtgtggcctcaaataatgtgggagaaataagtgtatccaccagactcacagttttgcgggaagatcaaattcccaggggcttccctaccattgacatgggcccacagttgaaggtggttgagcgtactcgcacggccaccatgctttgtgcagccagtggtaatccggatccagaaatcacttggtttaaagatttcttacctgtggacacaagcaacaacaatggtcgtattaagcagttacgatcaggagcccttcagattgagcagagtgaagagtctgaccaaggaaaatatgagtgtgttgccaccaacagcgcgggcactcgctattccgctcctgccaatttatatgtcagagttcgccgtgtcccaccaagattctctatcccacccactaatcatgaaatcatgccaggcggaagcgttaatatcacctgtgtggccgtggggtcaccaatgccttatgtaaagtggatgttgggggcagaagatctgacacctgaagatgatatgccaataggaagaaatgtgctagaactgaatgatgtaagacagtcagcaaattacacctgtgttgctatgtcaacactgggtgtcattgaagcaatagcacagatcactgtcaaagccttacccaaacctccaggaactcctgtagtgaccgagagcacagctacaagcatcacactgacgtgggactctgggaaccctgagcctgtttcttattacataattcagcataaacctaaaaactctgaggaactttacaaagaaattgatggggtggcgaccacacgctacagtgtcgctggactaagtccctactcggattatgaattcagggttgttgctgtcaataacattgggcgggggcctcccagcgaacctgtgctaacacaaacctcagagcaagcaccatccagtgccccgagggatgtccaggcacgaatgttgagttcgaccaccattttggtacagtggaaggaacctgaagagccaaatggacagatccaaggatatagagtttattatacaatggatcccactcaacatgtcaacaactggatgaaacacaatgtagctgacagccaaatcactactattggcaacttagtgccccagaaaacatattctgtcaaagtcctggcttttacctcaattggagatggtcccctttcaagtgacatacaagtcatcactcagacaggagtaccagggcagccactaaacttcaaagcagaacctgagtctgaaacaagtattttgctctcttggacacctccacgttcagataccattgccaactatgaactggtctacaaagatggggagcatggagaggagcaacgaattaccattgagccagggacatcatataggctgcaaggactgaaaccaaacagcttatactatttccgtctggctgcacgctcccctcaaggcctgggtgcttctactgcagaaatatcagctagaaccatgcagtcaaagccgtcagctcctcctcaagacattagttgcaccagcccaagttccactagtattttggtaagttggcaacctccaccagtggaaaaacagaatggcattatcactgaatactccatcaagtacactgcagtggatggggaagatgacaagcctcacgagattttgggaattccttcggacactaccaaataccttttggaacagctggaaaaatggactgaataccggatcactgtgacagcccatacagatgtcggccctggccctgagagcttgtccgtgttgattcgaaccaatgaagatgttcctagtggtcctcctcgcaaagtcgaggtagaggctgtcaactcaacatctgttaaagtctcatggcgctcacccgtgcccaataaacagcatggccagataagaggatatcaggtgcattatgtgaggatggaaaatggtgagcccaagggccagcccatgctgaaagatgtcatgctggctgatgcacaggacatgatcatttctgggctccagcctgaaacttcctactccctcaccgtcacagcctacacaaccaaaggagatggtgctcgcagcaagcccaaactggtgtccaccactggggcagttccagggaaacctcggcttgtgattaaccacactcagatgaatactgctcttattcagtggcaccctccggtggacacatttggacctcttcagggctaccgtctaaaatttggccgcaaggatatggagccacttactactcttgagttctctgaaaaagaagatcactttacagctacagacatccacaagggagcatcatacgtcttcaggctctcagccagaaacaaagtgggctttggggaggagatggtgaaggagatttccattccagaagaagtaccaactggattccctcaaaaccttcactcagaaggcaccacttcaacctccgtccagttatcttggcaaccacctgtcctggcagagagaaatggcattatcaccaagtatacccttctttatagggatatcaacatcccccttctcccgatggagcagcttattgttccagctgacaccactatgacactcactggcttaaaaccagataccacatacgatgtaaaagtacgtgctcatacgagcaaagggcccgggccatatagtcccagtgtccagttcaggacactgcctgtggatcaagtgtttgcaaaaaattttcatgtcaaagcagtaatgaagacttccgtgttgctgtcttgggagattccagagaattataactccgccatgcctttcaaaattctttatgatgatgggaaaatggtagaagaagtggatggccgagccacacagaagttaattgtcaacctgaagcctgagaaatcatattcatttgtgctgacaaatcgtggaaacagtgctggtgggctgcagcacagggtcacggcaaagactgcaccagatgtattacgtaccaagcctgccttcattgggaagaccaacttggatggcatgattactgtgcaactgcctgaagtacctgcaaatgagaatataaaaggttactacataataattgtgcctttgaagaaatctcgcgggaaatttatcaagccatgggagagtccagatgaaatggaattagatgagctgcttaaggagatatctaggaagcgcagaagcatccgttatgggagagaagttgaattaaagccatatattgccgctcactttgatgtccttcccactgagttcaccctgggggatgacaagcattatggtggatttacaaacaagcaactccaaagtggtcaagaatatgtcttctttgtgttagcagtaatggaacatgcagagtctaagatgtatgcaaccagcccttactccgaccccgtggtgtcaatggatctggatccgcagccaatcacggatgaagaagaaggcttgatctgggttgtaggtcctgtccttgcagtggtctttatcatctgcattgtcattgctattcttctttataaaaggaagagggcagagtccgactctagaaaaagcagcataccgaacaataaggagatcccttcacaccacccaacagaccctgtagaactgaggcgccttaactttcaaacaccgggtatggctagccatcctccaatacccatcttggaacttgcagaccacattgaaagattgaaagcaaatgacaacttgaagttttcccaggaatatgagtcaattgaccctggccagcagttcacttgggaacattcaaacttggaagtaaacaaaccaaagaatagatacgcgaatgtaatcgcatatgatcattcccgggttctcctatcagctatagaagggatcccaggaagtgactatgtgaatgccaactacatagatgggtataggaagcaaaatgcctatattgcaacacagggatctctccccgaaacatttggggacttttggagaatgatatgggaacaacggagtgccacagttgtcatgatgacaaaactagaagaaagatcaagggtgaagtgtgaccagtattggcctagcagaggcacagaaacccacggactcgttcaagtaacgctgcttgatactgtggagctggccacatattgtgttcgaacatttgcactttacaagaatggttcaagtgagaagagagaagtgagacaattccagttcaccgcctggcctgatcatggtgttccagaacaccctacaccttttctagctttcttacgtagagtcaaaacctgtaaccctcccgatgctggtccgatggttgtgcactgcagtgcgggagttggccggactggttgcttcatcgtcatagatgccatgttagaaagaataaagcatgaaaaaactgtagatatttatggccatgtaactttaatgagagcccagaggaactatatggttcaaacagaagaccaatacatctttatccatgatgcactgttagaagcagtgacttgtggaaataccgaagtgccagctagaaacttgtatgcctacattcagaagctgacacaaatagaaacgggagagaatgtcacaggaatggagctcgaatttaagcgtctagccagctcaaaagctcacacctcaaggtttatcagtgccaatcttccatgtaataaattcaaaaatcgccttgttaatattatgccatatgaatccacaagggtatgcctgcagcctatccgtggagtagaaggatctgattacatcaatgccagttttattgatggatacagacaacagaaagcctacatcgctacccaggggcccttggcagagaccactgaagacttctggcggatgctctgggaacacaattccaccatagttgtgatgctcaccaagctgcgtgaaatgggcagagagaaatgtcaccaatactggccagcagaacggtctgcaagataccagtactttgttgtagatcccatggctgagtacaacatgccacagtatatcctaagggaattcaaggtcacagatgccagggacggccagtcccgaacagtaaggcagttccagttcactgactggccagagcaaggagtgccaaagtccggagaaggatttattgacttcatcggccaagtccataaaacaaaagaacagtttggccaagatggacccatttcagtccattgcagcgcgggcgttggaagaactggagtcttcataacgctaagcattgttttggaaagaatgagatatgaaggagttgtagatatcttccagactgtcaaaatgttaagaacacaacgaccagctatggtacagacagaggatcaatatcagttttcctatcgtgccgcactagagtacctgggcagctttgaccactatgcaacgtagaaacccctgacccattctggatttttactacaggcccttcaatatccatggagtctcttctgagccatacagggcacttgagaagtccttcttaacttctagctaacaactacttagtgggactattacacacaaaacaaattaaaaacaaattattccaggtggaccaagaattcacactttgacatcgccccttcccaccatactgctcataataacattttagggggaaaggggagggaatgtttaaaaagaaagtccttgatttagttttttagtattgtaaagatactgctgacctgtgcttcatttctaactgtgtaaacttttttttaacaaaatgtatcattcgataaagtgaattttaaaaaagttacataactcttcatttttttatttccaaatcgtaggtttttttaagctgtagaactgttatctgtaatatcttgctgtagaaatatcaaatcatttgaaaatttgcacatttttgtgcaaaactcaatctacagtatcagtctcgtcagatatattaattttacacttcagttttgattggtgagaaagtacccattctcttcaaataatcaaagataattattattttgttttgtttttggaatcaacagggaggcgcaaagtataaagttgctgctaacatatatacatatatatccatattttataagggtgtctatgtatatatagacagtgtgtccacacaaaaaatagatacagttatcagtcagtcagttcttccatgatttagtttttttaaacgtagaaaagctattgtaaacatctctttccatttattcttaattttttgacatattggtatttctttaaagggaaatgaggaatgcacatcagtgattgattgtcaaacctcaccccctgatttcctacctaatctacccccacctaaccaatcaatcacatccacaaattgttttgtttgtttgttagtcaggcttccaacaaagttcaatatttctaacactctagtgcaataaaaattattattaaatagctaagaggtgtgcatgtgggaaaggtcagtgcatatccctttaggaggggagaatgttgtaatatatcagctatcgagttgtttaaaaaaagtgtattcaatcgtatattgtctatagtatgtgctatgaaatttgcatttatgatatgtaacaggggcaaagccaaattcatgttactctgttcagtcagaaacattttgtggcatacagcattcctgggaagtgctgtactttgtttcgttttggttttagttttgcatttagagtgccttataattgatgcctattttaatagcatttctttttagcttttggttcgtatttccattcactgttcgtatctgttactttctattaaagcattatctgtttaccacatgtacaaaaactctttgaataatatgcattcctagttttcagccaagtcggggatgttagtgattgtaccagcccaaagcacttggataatcagggcccttcttccttttataatcaatcatcaacatcagaaaaagctacttgttttatttatattcccttccaaatccgctctggaacatgcagtaactgcaccaaacttattttagtaacaaatatcattggcaactttggaatatatttgatattccattaggatttttctaaaaggggaaataaactatatatatatatgtatcttacccccaattcttccaacagaatttctataggaagccatggatgatggcataagtttgccacatattacatgattttaaataatcctcaaaatacccaaggaactcttaaagagttttggtatgagtatactactttggtttaattttagcttcatggatgttctgcatggaaggatttttgttttccacattttcccattgctagcagagtgaaatccaagagaccaaacatttgcaagcattgtatttgagcacttttgtaaaaaacaaagaaaaagaaaaaaaagaaaatatatataatactaaaaaaaagtatctagaaggctacctcagaatgagactctctaacctacatcagaaccagagaagaatgtgcactatgtgggtctgttatcattattttcttttagtttgtatctttttggagatttatccaagtgccagattactcagtgctataattttcttttagttaaacaaagggggtcagacagacattgcatcatccagacatgccttgttggacatgtagaatccgatggagcactgcacaccagaatgattggccaatgagcagcttctctccctgaaacaataactgcccatttggcaaagggaaagatgacaataatcagaagaagaaaatgaatgggatgcataccatagacgaacgaggcggagactattgcgggaatcttactgttcaggagctgttcctagaactaactcccttactgtcattgatgtgcattccactctgtgcttttctgtacaaccattcaagttttaatttcccaggtgaaccatctttatctgccattaccacaagctttcaagtttccagttattttcatcatcataaccagtacggtgctattatttacctatgtacgtgtagttatgtataattttgtaattagttacaatggtaaaaaaaatcaaaatatataaaaagtgatttgtacagaactttattttagctcttttttaaaaatgatttgcatggttagaaaacggcgaggacagccaggggagggaagggcctctagggaactttgcactttctatacctttgtactatgcactgccctattgattctacacccaataatgatattacttgaacccatctgtaagaaactgcttcggaaattcatttgtgtgtatgtaaataacacaacatagaaacaggaagggaaaaaagtctgcagtaatgcacgtattttttttctttcctgtttattttcggttttgctttaagtccttttatttttaattccctttttgtttttctttttgggttttggttccttttgggtttatgggtgccctgatactccagcagagatcagaaggctacagatccattctatccatccgttatgtggctttgccatcccagcttggagtgtctttacaaagataataacagttgtgttctttgctctcgttttggatgcatagactgaaaaattaaaacaaataacttgtaaaatggcttgttaaaaaatacaattacctctaattagtagtacgcgtaaatgttttacagaatgaaaggcgtgctttttattttcttacttcgttacattggtggcgaaagaagtctgtatgaaaatcagttctttgctgacacaagttccatttgttacaaatgaattctaataaaaatgtcagtgttatgca

SEQ ID NO: 7686 - protein, 1890 aa, Homo sapiens
MVHVARLLLLLLTFFLRTDAETPPRFTRTPVDQTGVSGGVASFICQATGDPRPKIVWNKKGKKVSNQRFEVIEFDDGSGSVLRIQPLRTPRDEAIYECVASNNVGEISVSTRLTVLREDQIPRGFPTIDMGPQLKVVERTRTATMLCAASGNPDPEITWFKDFLPVDTSNNNGRIKQLRSGALQIEQSEESDQGKYECVATNSAGTRYSAPANLYVRVRRVPPRFSIPPTNHEIMPGGSVNITCVAVGSPMPYVKWMLGAEDLTPEDDMPIGRNVLELNDVRQSANYTCVAMSTLGVIEAIAQITVKALPKPPGTPVVTESTATSITLTWDSGNPEPVSYYIIQHKPKNSEELYKEIDGVATTRYSVAGLSPYSDYEFRVVAVNNIGRGPPSEPVLTQTSEQAPSSAPRDVQARMLSSTTILVQWKEPEEPNGQIQGYRVYYTMDPTQHVNNWMKHNVADSQITTIGNLVPQKTYSVKVLAFTSIGDGPLSSDIQVITQTGVPGQPLNFKAEPESETSILLSWTPPRSDTIANYELVYKDGEHGEEQRITIEPGTSYRLQGLKPNSLYYFRLAARSPQGLGASTAEISARTMQSKPSAPPQDISCTSPSSTSILVSWQPPPVEKQNGIITEYSIKYTAVDGEDDKPHEILGIPSDTTKYLLEQLEKWTEYRITVTAHTDVGPGPESLSVLIRTNEDVPSGPPRKVEVEAVNSTSVKVSWRSPVPNKQHGQIRGYQVHYVRMENGEPKGQPMLKDVMLADAQDMIISGLQPETSYSLTVTAYTTKGDGARSKPKLVSTTGAVPGKPRLVINHTQMNTALIQWHPPVDTFGPLQGYRLKFGRKDMEPLTTLEFSEKEDHFTATDIHKGASYVFRLSARNKVGFGEEMVKEISIPEEVPTGFPQNLHSEGTTSTSVQLSWQPPVLAERNGIITKYTLLYRDINIPLLPMEQLIVPADTTMTLTGLKPDTTYDVKVRAHTSKGPGPYSPSVQFRTLPVDQVFAKNFHVKAVMKTSVLLSWEIPENYNSAMPFKILYDDGKMVEEVDGRATQKLIVNLKPEKSYSFVLTNRGNSAGGLQHRVTAKTAPDVLRTKPAFIGKTNLDGMITVQLPEVPANENIKGYYIIIVPLKKSRGKFIKPWESPDEMELDELLKEISRKRRSIRYGREVELKPYIAAHFDVLPTEFTLGDDKHYGGFTNKQLQSGQEYVFFVLAVMEHAESKMYATSPYSDPVVSMDLDPQPITDEEEGLIWVVGPVLAVVFIICIVIAILLYKRKRAESDSRKSSIPNNKEIPSHHPTDPVELRRLNFQTPGMASHPPIPILELADHIERLKANDNLKFSQEYESIDPGQQFTWEHSNLEVNKPKNRYANVIAYDHSRVLLSAIEGIPGSDYVNANYIDGYRKQNAYIATQGSLPETFGDFWRMIWEQRSATVVMMTKLEERSRVKCDQYWPSRGTETHGLVQVTLLDTVELATYCVRTFALYKNGSSEKREVRQFQFTAWPDHGVPEHPTPFLAFLRRVKTCNPPDAGPMVVHCSAGVGRTGCFIVIDAMLERIKHEKTVDIYGHVTLMRAQRNYMVQTEDQYIFIHDALLEAVTCGNTEVPARNLYAYIQKLTQIETGENVTGMELEFKRLASSKAHTSRFISANLPCNKFKNRLVNIMPYESTRVCLQPIRGVEGSDYINASFIDGYRQQKAYIATQGPLAETTEDFWRMLWEHNSTIVVMLTKLREMGREKCHQYWPAERSARYQYFVVDPMAEYNMPQYILREFKVTDARDGQSRTVRQFQFTDWPEQGVPKSGEGFIDFIGQVHKTKEQFGQDGPISVHCSAGVGRTGVFITLSIVLERMRYEGVVDIFQTVKMLRTQRPAMVQTEDQYQFSYRAALEYLGSFDHYAT

SEQ ID NO: 7687 - DNA, 9339 bp, Homo sapiens
gcggccgctgctccgcgggattaaattggccgcccggaggcggcggcgcggccgtggcggggcgcgaaggcgctggaggaaagtgttggcggcggcgcgggaggcggtggcggcggctgcccggggccaacatgaccaggctctgaaagtgttccagctgaaatttcagatcggacagactcgctgcggctccggaggcagtgattccaagctgctcgcgcacgctgctgccaagctgcaggatggtgcacgtagccaggctgctgctgctgctcctcactttcttcctccgcacggatgctgagacacctccaaggtttacacgaacacccgttgatcagacaggggtctctggcggagttgcctctttcatctgccaagctacgggagacccaagacctaaaattgtctggaacaaaaaaggaaagaaagtcagcaatcagagatttgaggtaatagagtttgacgatgggtctggatcagttctcagaatacaacccttacggactccgagggatgaggccatttatgaatgtgtggcctcaaataatgtgggagaaataagtgtatccaccagactcacagttttgcgggaagatcaaattcccaggggcttccctaccattgacatgggcccacagttgaaggtggttgagcgtactcgcacggccaccatgctttgtgcagccagtggtaatccggatccagaaatcacttggtttaaagatttcttacctgtggacacaagcaacaacaatggtcgtattaagcagttacgatcaggagcccttcagattgagcagagtgaagagtctgaccaaggaaaatatgagtgtgttgccaccaacagcgcgggcactcgctattccgctcctgccaatttatatgtcagagttcgccgtgtcccaccaagattctctatcccacccactaatcatgaaatcatgccaggcggaagcgttaatatcacctgtgtggccgtggggtcaccaatgccttatgtaaagtggatgttgggggcagaagatctgacacctgaagatgatatgccaataggaagaaatgtgctagaactgaatgatgtaagacagtcagcaaattacacctgtgttgctatgtcaacactgggtgtcattgaagcaatagcacagatcactgtcaaagccttacccaaacctccaggaactcctgtagtgaccgagagcacagctacaagcatcacactgacgtgggactctgggaaccctgagcctgtttcttattacataattcagcataaacctaaaaactctgaggaactttacaaagaaattgatggggtggcgaccacacgctacagtgtcgctggactaagtccctactcggattatgaattcagggttgttgctgtcaataacattgggcgggggcctcccagcgaacctgtgctaacacaaacctcagagcaagcaccatccagtgccccgagggatgtccaggcacgaatgttgagttcgaccaccattttggtacagtggaaggaacctgaagagccaaatggacagatccaaggatatagagtttattatacaatggatcccactcaacatgtcaacaactggatgaaacacaatgtagctgacagccaaatcactactattggcaacttagtgccccagaaaacatattctgtcaaagtcctggcttttacctcaattggagatggtcccctttcaagtgacatacaagtcatcactcagacaggagtaccagggcagccactaaacttcaaagcagaacctgagtctgaaacaagtattttgctctcttggacacctccacgttcagataccattgccaactatgaactggtctacaaagatggggagcatggagaggagcaacgaattaccattgagccagggacatcatataggctgcaaggactgaaaccaaacagcttatactatttccgtctggctgcacgctcccctcaaggcctgggtgcttctactgcagaaatatcagctagaaccatgcagtcaaagccgtcagctcctcctcaagacattagttgcaccagcccaagttccactagtattttggtaagttggcaacctccaccagtggaaaaacagaatggcattatcactgaatactccatcaagtacactgcagtggatggggaagatgacaagcctcacgagattttgggaattccttcggacactaccaaataccttttggaacagctggaaaaatggactgaataccggatcactgtgacagcccatacagatgtcggccctggccctgagagcttgtccgtgttgattcgaaccaatgaagatgttcctagtggtcctcctcgcaaagtcgaggtagaggctgtcaactcaacatctgttaaagtctcatggcgctcacccgtgcccaataaacagcatggccagataagaggatatcaggtgcattatgtgaggatggaaaatggtgagcccaagggccagcccatgctgaaagatgtcatgctggctgatgcacagtgggaatttgatgatactactgaacatgacatgatcatttctgggctccagcctgaaacttcctactccctcaccgtcacagcctacacaaccaaaggagatggtgctcgcagcaagcccaaactggtgtccaccactggggcagttccagggaaacctcggcttgtgattaaccacactcagatgaatactgctcttattcagtggcaccctccggtggacacatttggacctcttcagggctaccgtctaaaatttggccgcaaggatatggagccacttactactcttgagttctctgaaaaagaagatcactttacagctacagacatccacaagggagcatcatacgtcttcaggctctcagccagaaacaaagtgggctttggggaggagatggtgaaggagatttccattccagaagaagtaccaactggattccctcaaaaccttcactcagaaggcaccacttcaacctccgtccagttatcttggcaaccacctgtcctggcagagagaaatggcattatcaccaagtatacccttctttatagggatatcaacatcccccttctcccgatggagcagcttattgttccagctgacaccactatgacactcactggcttaaaaccagataccacatacgatgtaaaagtacgtgctcatacgagcaaagggcccgggccatatagtcccagtgtccagttcaggacactgcctgtggatcaagtgtttgcaaaaaattttcatgtcaaagcagtaatgaagacttccgtgttgctgtcttgggagattccagagaattataactccgccatgcctttcaaaattctttatgatgatgggaaaatggtagaagaagtggatggccgagccacacagaagttaattgtcaacctgaagcctgagaaatcatattcatttgtgctgacaaatcgtggaaacagtgctggtgggctgcagcacagggtcacggcaaagactgcaccagatgtattacgtaccaagcctgccttcattgggaagaccaacttggatggcatgattactgtgcaactgcctgaagtacctgcaaatgagaatataaaaggttactacataataattgtgcctttgaagaaatctcgcgggaaatttatcaagccatgggagagtccagatgaaatggaattagatgagctgcttaaggagatatctaggaagcgcagaagcatccgttatgggagagaagttgaattaaagccatatattgccgctcactttgatgtccttcccactgagttcaccctgggggatgacaagcattatggtggatttacaaacaagcaactccaaagtggtcaagaatatgtcttctttgtgttagcagtaatggaacatgcagagtctaagatgtatgcaaccagcccttactccgaccccgtggtgtcaatggatctggatccgcagccaatcacggatgaagaagaaggcttgatctgggttgtaggtcctgtccttgcagtggtctttatcatctgcattgtcattgctattcttctttataaaaggaagagggcagagtccgactctagaaaaagcagcataccgaacaataaggagatcccttcacaccacccaacagaccctgtagaactgaggcgccttaactttcaaacaccgggtatggctagccatcctccaatacccatcttggaacttgcagaccacattgaaagattgaaagcaaatgacaacttgaagttttcccaggaatatgagtcaattgaccctggccagcagttcacttgggaacattcaaacttggaagtaaacaaaccaaagaatagatacgcgaatgtaatcgcatatgatcattcccgggttctcctatcagctatagaagggatcccaggaagtgactatgtgaatgccaactacatagatgggtataggaagcaaaatgcctatattgcaacacagggatctctccccgaaacatttggggacttttggagaatgatatgggaacaacggagtgccacagttgtcatgatgacaaaactagaagaaagatcaagggtgaagtgtgaccagtattggcctagcagaggcacagaaacccacggactcgttcaagtaacgctgcttgatactgtggagctggccacatattgtgttcgaacatttgcactttacaagaatggttcaagtgagaagagagaagtgagacaattccagttcaccgcctggcctgatcatggtgttccagaacaccctacaccttttctagctttcttacgtagagtcaaaacctgtaaccctcccgatgctggtccgatggttgtgcactgcagtgcgggagttggccggactggttgcttcatcgtcatagatgccatgttagaaagaataaagcatgaaaaaactgtagatatttatggccatgtaactttaatgagagcccagaggaactatatggttcaaacagaagaccaatacatctttatccatgatgcactgttagaagcagtgacttgtggaaataccgaagtgccagctagaaacttgtatgcctacattcagaagctgacacaaatagaaacgggagagaatgtcacaggaatggagctcgaatttaagcgtctagccagctcaaaagctcacacctcaaggtttatcagtgccaatcttccatgtaataaattcaaaaatcgccttgttaatattatgccatatgaatccacaagggtatgcctgcagcctatccgtggagtagaaggatctgattacatcaatgccagttttattgatggatacagacaacagaaagcctacatcgctacccaggggcccttggcagagaccactgaagacttctggcggatgctctgggaacacaattccaccatagttgtgatgctcaccaagctgcgtgaaatgggcagagagaaatgtcaccaatactggccagcagaacggtctgcaagataccagtactttgttgtagatcccatggctgagtacaacatgccacagtatatcctaagggaattcaaggtcacagatgccagggacggccagtcccgaacagtaaggcagttccagttcactgactggccagagcaaggagtgccaaagtccggagaaggatttattgacttcatcggccaagtccataaaacaaaagaacagtttggccaagatggacccatttcagtccattgcagcgcgggcgttggaagaactggagtcttcataacgctaagcattgttttggaaagaatgagatatgaaggagttgtagatatcttccagactgtcaaaatgttaagaacacaacgaccagctatggtacagacagaggatcaatatcagttttcctatcgtgccgcactagagtacctgggcagctttgaccactatgcaacgtagaaacccctgacccattctggatttttactacaggcccttcaatatccatggagtctcttctgagccatacagggcacttgagaagtccttcttaacttctagctaacaactacttagtgggactattacacacaaaacaaattaaaaacaaattattccaggtggaccaagaattcacactttgacatcgccccttcccaccatactgctcataataacattttagggggaaaggggagggaatgtttaaaaagaaagtccttgatttagttttttagtattgtaaagatactgctgacctgtgcttcatttctaactgtgtaaacttttttttaacaaaatgtatcattcgataaagtgaattttaaaaaagttacataactcttcatttttttatttccaaatcgtaggtttttttaagctgtagaactgttatctgtaatatcttgctgtagaaatatcaaatcatttgaaaatttgcacatttttgtgcaaaactcaatctacagtatcagtctcgtcagatatattaattttacacttcagttttgattggtgagaaagtacccattctcttcaaataatcaaagataattattattttgttttgtttttggaatcaacagggaggcgcaaagtataaagttgctgctaacatatatacatatatatccatattttataagggtgtctatgtatatatagacagtgtgtccacacaaaaaatagatacagttatcagtcagtcagttcttccatgatttagtttttttaaacgtagaaaagctattgtaaacatctctttccatttattcttaattttttgacatattggtatttctttaaagggaaatgaggaatgcacatcagtgattgattgtcaaacctcaccccctgatttcctacctaatctacccccacctaaccaatcaatcacatccacaaattgttttgtttgtttgttagtcaggcttccaacaaagttcaatatttctaacactctagtgcaataaaaattattattaaatagctaagaggtgtgcatgtgggaaaggtcagtgcatatccctttaggaggggagaatgttgtaatatatcagctatcgagttgtttaaaaaaagtgtattcaatcgtatattgtctatagtatgtgctatgaaatttgcatttatgatatgtaacaggggcaaagccaaattcatgttactctgttcagtcagaaacattttgtggcatacagcattcctgggaagtgctgtactttgtttcgttttggttttagttttgcatttagagtgccttataattgatgcctattttaatagcatttctttttagcttttggttcgtatttccattcactgttcgtatctgttactttctattaaagcattatctgtttaccacatgtacaaaaactctttgaataatatgcattcctagttttcagccaagtcggggatgttagtgattgtaccagcccaaagcacttggataatcagggcccttcttccttttataatcaatcatcaacatcagaaaaagctacttgttttatttatattcccttccaaatccgctctggaacatgcagtaactgcaccaaacttattttagtaacaaatatcattggcaactttggaatatatttgatattccattaggatttttctaaaaggggaaataaactatatatatatatgtatcttacccccaattcttccaacagaatttctataggaagccatggatgatggcataagtttgccacatattacatgattttaaataatcctcaaaatacccaaggaactcttaaagagttttggtatgagtatactactttggtttaattttagcttcatggatgttctgcatggaaggatttttgttttccacattttcccattgctagcagagtgaaatccaagagaccaaacatttgcaagcattgtatttgagcacttttgtaaaaaacaaagaaaaagaaaaaaaagaaaatatatataatactaaaaaaaagtatctagaaggctacctcagaatgagactctctaacctacatcagaaccagagaagaatgtgcactatgtgggtctgttatcattattttcttttagtttgtatctttttggagatttatccaagtgccagattactcagtgctataattttcttttagttaaacaaagggggtcagacagacattgcatcatccagacatgccttgttggacatgtagaatccgatggagcactgcacaccagaatgattggccaatgagcagcttctctccctgaaacaataactgcccatttggcaaagggaaagatgacaataatcagaagaagaaaatgaatgggatgcataccatagacgaacgaggcggagactattgcgggaatcttactgttcaggagctgttcctagaactaactcccttactgtcattgatgtgcattccactctgtgcttttctgtacaaccattcaagttttaatttcccaggtgaaccatctttatctgccattaccacaagctttcaagtttccagttattttcatcatcataaccagtacggtgctattatttacctatgtacgtgtagttatgtataattttgtaattagttacaatggtaaaaaaaatcaaaatatataaaaagtgatttgtacagaactttattttagctcttttttaaaaatgatttgcatggttagaaaacggcgaggacagccaggggagggaagggcctctagggaactttgcactttctatacctttgtactatgcactgccctattgattctacacccaataatgatattacttgaacccatctgtaagaaactgcttcggaaattcatttgtgtgtatgtaaataacacaacatagaaacaggaagggaaaaaagtctgcagtaatgcacgtattttttttctttcctgtttattttcggttttgctttaagtccttttatttttaattccctttttgtttttctttttgggttttggttccttttgggtttatgggtgccctgatactccagcagagatcagaaggctacagatccattctatccatccgttatgtggctttgccatcccagcttggagtgtctttacaaagataataacagttgtgttctttgctctcgttttggatgcatagactgaaaaattaaaacaaataacttgtaaaatggcttgttaaaaaatacaattacctctaattagtagtacgcgtaaatgttttacagaatgaaaggcgtgctttttattttcttacttcgttacattggtggcgaaagaagtctgtatgaaaatcagttctttgctgacacaagttccatttgttacaaatgaattctaataaaaatgtcagtgttatgca

SEQ ID NO: 7688 - protein, 1899 aa, Homo sapiens
MVHVARLLLLLLTFFLRTDAETPPRFTRTPVDQTGVSGGVASFICQATGDPRPKIVWNKKGKKVSNQRFEVIEFDDGSGSVLRIQPLRTPRDEAIYECVASNNVGEISVSTRLTVLREDQIPRGFPTIDMGPQLKVVERTRTATMLCAASGNPDPEITWFKDFLPVDTSNNNGRIKQLRSGALQIEQSEESDQGKYECVATNSAGTRYSAPANLYVRVRRVPPRFSIPPTNHEIMPGGSVNITCVAVGSPMPYVKWMLGAEDLTPEDDMPIGRNVLELNDVRQSANYTCVAMSTLGVIEAIAQITVKALPKPPGTPVVTESTATSITLTWDSGNPEPVSYYIIQHKPKNSEELYKEIDGVATTRYSVAGLSPYSDYEFRVVAVNNIGRGPPSEPVLTQTSEQAPSSAPRDVQARMLSSTTILVQWKEPEEPNGQIQGYRVYYTMDPTQHVNNWMKHNVADSQITTIGNLVPQKTYSVKVLAFTSIGDGPLSSDIQVITQTGVPGQPLNFKAEPESETSILLSWTPPRSDTIANYELVYKDGEHGEEQRITIEPGTSYRLQGLKPNSLYYFRLAARSPQGLGASTAEISARTMQSKPSAPPQDISCTSPSSTSILVSWQPPPVEKQNGIITEYSIKYTAVDGEDDKPHEILGIPSDTTKYLLEQLEKWTEYRITVTAHTDVGPGPESLSVLIRTNEDVPSGPPRKVEVEAVNSTSVKVSWRSPVPNKQHGQIRGYQVHYVRMENGEPKGQPMLKDVMLADAQWEFDDTTEHDMIISGLQPETSYSLTVTAYTTKGDGARSKPKLVSTTGAVPGKPRLVINHTQMNTALIQWHPPVDTFGPLQGYRLKFGRKDMEPLTTLEFSEKEDHFTATDIHKGASYVFRLSARNKVGFGEEMVKEISIPEEVPTGFPQNLHSEGTTSTSVQLSWQPPVLAERNGIITKYTLLYRDINIPLLPMEQLIVPADTTMTLTGLKPDTTYDVKVRAHTSKGPGPYSPSVQFRTLPVDQVFAKNFHVKAVMKTSVLLSWEIPENYNSAMPFKILYDDGKMVEEVDGRATQKLIVNLKPEKSYSFVLTNRGNSAGGLQHRVTAKTAPDVLRTKPAFIGKTNLDGMITVQLPEVPANENIKGYYIIIVPLKKSRGKFIKPWESPDEMELDELLKEISRKRRSIRYGREVELKPYIAAHFDVLPTEFTLGDDKHYGGFTNKQLQSGQEYVFFVLAVMEHAESKMYATSPYSDPVVSMDLDPQPITDEEEGLIWVVGPVLAVVFIICIVIAILLYKRKRAESDSRKSSIPNNKEIPSHHPTDPVELRRLNFQTPGMASHPPIPILELADHIERLKANDNLKFSQEYESIDPGQQFTWEHSNLEVNKPKNRYANVIAYDHSRVLLSAIEGIPGSDYVNANYIDGYRKQNAYIATQGSLPETFGDFWRMIWEQRSATVVMMTKLEERSRVKCDQYWPSRGTETHGLVQVTLLDTVELATYCVRTFALYKNGSSEKREVRQFQFTAWPDHGVPEHPTPFLAFLRRVKTCNPPDAGPMVVHCSAGVGRTGCFIVIDAMLERIKHEKTVDIYGHVTLMRAQRNYMVQTEDQYIFIHDALLEAVTCGNTEVPARNLYAYIQKLTQIETGENVTGMELEFKRLASSKAHTSRFISANLPCNKFKNRLVNIMPYESTRVCLQPIRGVEGSDYINASFIDGYRQQKAYIATQGPLAETTEDFWRMLWEHNSTIVVMLTKLREMGREKCHQYWPAERSARYQYFVVDPMAEYNMPQYILREFKVTDARDGQSRTVRQFQFTDWPEQGVPKSGEGFIDFIGQVHKTKEQFGQDGPISVHCSAGVGRTGVFITLSIVLERMRYEGVVDIFQTVKMLRTQRPAMVQTEDQYQFSYRAALEYLGSFDHYAT

SEQ ID NO: 7689 - DNA, 8106 bp, Homo sapiens
gcggccgctgctccgcgggattaaattggccgcccggaggcggcggcgcggccgtggcggggcgcgaaggcgctggaggaaagtgttggcggcggcgcgggaggcggtggcggcggctgcccggggccaacatgaccaggctctgaaagtgttccagctgaaatttcagatcggacagactcgctgcggctccggaggcagtgattccaagctgctcgcgcacgctgctgccaagctgcaggatggtgcacgtagccaggctgctgctgctgctcctcactttcttcctccgcacggatgctgagacacctccaaggtttacacgaacacccgttgatcagacaggggtctctggcggagttgcctctttcatctgccaagctacgggagacccaagacctaaaattgtctggaacaaaaaaggaaagaaagtcagcaatcagagatttgaggtaatagagtttgacgatgggtctggatcagttctcagaatacaacccttacggactccgagggatgaggccatttatgaatgtgtggcctcaaataatgtgggagaaataagtgtatccaccagactcacagttttgcgggaagatcaaattcccaggggcttccctaccattgacatgggcccacagttgaaggtggttgagcgtactcgcacggccaccatgctttgtgcagccagtggtaatccggatccagaaatcacttggtttaaagatttcttacctgtggacacaagcaacaacaatggtcgtattaagcagttacgatcaggagcccttcagattgagcagagtgaagagtctgaccaaggaaaatatgagtgtgttgccaccaacagcgcgggcactcgctattccgctcctgccaatttatatgtcagagttcgccgtgtcccaccaagattctctatcccacccactaatcatgaaatcatgccaggcggaagcgttaatatcacctgtgtggccgtggggtcaccaatgccttatgtaaagtggatgttgggggcagaagatctgacacctgaagatgatatgccaataggaagaaatgtgctagaactgaatgatgtaagacagtcagcaaattacacctgtgttgctatgtcaacactgggtgtcattgaagcaatagcacagatcactgtcaaagccttacccaaacctccaggaactcctgtagtgaccgagagcacagctacaagcatcacactgacgtgggactctgggaaccctgagcctgtttcttattacataattcagcataaacctaaaaactctgaggaactttacaaagaaattgatggggtggcgaccacacgctacagtgtcgctggactaagtccctactcggattatgaattcagggttgttgctgtcaataacattgggcgggggcctcccagcgaacctgtgctaacacaaacctcagagcaagcaccatccagtgccccgagggatgtccaggcacgaatgttgagttcgaccaccattttggtacagtggaaggaacctgaagagccaaatggacagatccaaggatatagagtttattatacaatggatcccactcaacatgtcaacaactggatgaaacacaatgtagctgacagccaaatcactactattggcaacttagtgccccagaaaacatattctgtcaaagtcctggcttttacctcaattggagatggtcccctttcaagtgacatacaagtcatcactcagacaggagtaccagggcagccactaaacttcaaagcagaacctgagtctgaaacaagtattttgctctcttggacacctccacgttcagataccattgccaactatgaactggtctacaaagatggggagcatggagaggagcaacgaattaccattgagccagggacatcatataggctgcaaggactgaaaccaaacagcttatactatttccgtctggctgcacgctcccctcaaggcctgggtgcttctactgcagaaatatcagctagaaccatgcagtcaatgtttgcaaaaaattttcatgtcaaagcagtaatgaagacttccgtgttgctgtcttgggagattccagagaattataactccgccatgcctttcaaaattctttatgatgatgggaaaatggtagaagaagtggatggccgagccacacagaagttaattgtcaacctgaagcctgagaaatcatattcatttgtgctgacaaatcgtggaaacagtgctggtgggctgcagcacagggtcacggcaaagactgcaccagatgtattacgtaccaagcctgccttcattgggaagaccaacttggatggcatgattactgtgcaactgcctgaagtacctgcaaatgagaatataaaaggttactacataataattgtgcctttgaagaaatctcgcgggaaatttatcaagccatgggagagtccagatgaaatggaattagatgagctgcttaaggagatatctaggaagcgcagaagcatccgttatgggagagaagttgaattaaagccatatattgccgctcactttgatgtccttcccactgagttcaccctgggggatgacaagcattatggtggatttacaaacaagcaactccaaagtggtcaagaatatgtcttctttgtgttagcagtaatggaacatgcagagtctaagatgtatgcaaccagcccttactccgaccccgtggtgtcaatggatctggatccgcagccaatcacggatgaagaagaaggcttgatctgggttgtaggtcctgtccttgcagtggtctttatcatctgcattgtcattgctattcttctttataaaaggaagagggcagagtccgactctagaaaaagcagcataccgaacaataaggagatcccttcacaccacccaacagaccctgtagaactgaggcgccttaactttcaaacaccgggtatggctagccatcctccaatacccatcttggaacttgcagaccacattgaaagattgaaagcaaatgacaacttgaagttttcccaggaatatgagtcaattgaccctggccagcagttcacttgggaacattcaaacttggaagtaaacaaaccaaagaatagatacgcgaatgtaatcgcatatgatcattcccgggttctcctatcagctatagaagggatcccaggaagtgactatgtgaatgccaactacatagatgggtataggaagcaaaatgcctatattgcaacacagggatctctccccgaaacatttggggacttttggagaatgatatgggaacaacggagtgccacagttgtcatgatgacaaaactagaagaaagatcaagggtgaagtgtgaccagtattggcctagcagaggcacagaaacccacggactcgttcaagtaacgctgcttgatactgtggagctggccacatattgtgttcgaacatttgcactttacaagaatggttcaagtgagaagagagaagtgagacaattccagttcaccgcctggcctgatcatggtgttccagaacaccctacaccttttctagctttcttacgtagagtcaaaacctgtaaccctcccgatgctggtccgatggttgtgcactgcagtgcgggagttggccggactggttgcttcatcgtcatagatgccatgttagaaagaataaagcatgaaaaaactgtagatatttatggccatgtaactttaatgagagcccagaggaactatatggttcaaacagaagaccaatacatctttatccatgatgcactgttagaagcagtgacttgtggaaataccgaagtgccagctagaaacttgtatgcctacattcagaagctgacacaaatagaaacgggagagaatgtcacaggaatggagctcgaatttaagcgtctagccagctcaaaagctcacacctcaaggtttatcagtgccaatcttccatgtaataaattcaaaaatcgccttgttaatattatgccatatgaatccacaagggtatgcctgcagcctatccgtggagtagaaggatctgattacatcaatgccagttttattgatggatacagacaacagaaagcctacatcgctacccaggggcccttggcagagaccactgaagacttctggcggatgctctgggaacacaattccaccatagttgtgatgctcaccaagctgcgtgaaatgggcagagagaaatgtcaccaatactggccagcagaacggtctgcaagataccagtactttgttgtagatcccatggctgagtacaacatgccacagtatatcctaagggaattcaaggtcacagatgccagggacggccagtcccgaacagtaaggcagttccagttcactgactggccagagcaaggagtgccaaagtccggagaaggatttattgacttcatcggccaagtccataaaacaaaagaacagtttggccaagatggacccatttcagtccattgcagcgcgggcgttggaagaactggagtcttcataacgctaagcattgttttggaaagaatgagatatgaaggagttgtagatatcttccagactgtcaaaatgttaagaacacaacgaccagctatggtacagacagaggatcaatatcagttttcctatcgtgccgcactagagtacctgggcagctttgaccactatgcaacgtagaaacccctgacccattctggatttttactacaggcccttcaatatccatggagtctcttctgagccatacagggcacttgagaagtccttcttaacttctagctaacaactacttagtgggactattacacacaaaacaaattaaaaacaaattattccaggtggaccaagaattcacactttgacatcgccccttcccaccatactgctcataataacattttagggggaaaggggagggaatgtttaaaaagaaagtccttgatttagttttttagtattgtaaagatactgctgacctgtgcttcatttctaactgtgtaaacttttttttaacaaaatgtatcattcgataaagtgaattttaaaaaagttacataactcttcatttttttatttccaaatcgtaggtttttttaagctgtagaactgttatctgtaatatcttgctgtagaaatatcaaatcatttgaaaatttgcacatttttgtgcaaaactcaatctacagtatcagtctcgtcagatatattaattttacacttcagttttgattggtgagaaagtacccattctcttcaaataatcaaagataattattattttgttttgtttttggaatcaacagggaggcgcaaagtataaagttgctgctaacatatatacatatatatccatattttataagggtgtctatgtatatatagacagtgtgtccacacaaaaaatagatacagttatcagtcagtcagttcttccatgatttagtttttttaaacgtagaaaagctattgtaaacatctctttccatttattcttaattttttgacatattggtatttctttaaagggaaatgaggaatgcacatcagtgattgattgtcaaacctcaccccctgatttcctacctaatctacccccacctaaccaatcaatcacatccacaaattgttttgtttgtttgttagtcaggcttccaacaaagttcaatatttctaacactctagtgcaataaaaattattattaaatagctaagaggtgtgcatgtgggaaaggtcagtgcatatccctttaggaggggagaatgttgtaatatatcagctatcgagttgtttaaaaaaagtgtattcaatcgtatattgtctatagtatgtgctatgaaatttgcatttatgatatgtaacaggggcaaagccaaattcatgttactctgttcagtcagaaacattttgtggcatacagcattcctgggaagtgctgtactttgtttcgttttggttttagttttgcatttagagtgccttataattgatgcctattttaatagcatttctttttagcttttggttcgtatttccattcactgttcgtatctgttactttctattaaagcattatctgtttaccacatgtacaaaaactctttgaataatatgcattcctagttttcagccaagtcggggatgttagtgattgtaccagcccaaagcacttggataatcagggcccttcttccttttataatcaatcatcaacatcagaaaaagctacttgttttatttatattcccttccaaatccgctctggaacatgcagtaactgcaccaaacttattttagtaacaaatatcattggcaactttggaatatatttgatattccattaggatttttctaaaaggggaaataaactatatatatatatgtatcttacccccaattcttccaacagaatttctataggaagccatggatgatggcataagtttgccacatattacatgattttaaataatcctcaaaatacccaaggaactcttaaagagttttggtatgagtatactactttggtttaattttagcttcatggatgttctgcatggaaggatttttgttttccacattttcccattgctagcagagtgaaatccaagagaccaaacatttgcaagcattgtatttgagcacttttgtaaaaaacaaagaaaaagaaaaaaaagaaaatatatataatactaaaaaaaagtatctagaaggctacctcagaatgagactctctaacctacatcagaaccagagaagaatgtgcactatgtgggtctgttatcattattttcttttagtttgtatctttttggagatttatccaagtgccagattactcagtgctataattttcttttagttaaacaaagggggtcagacagacattgcatcatccagacatgccttgttggacatgtagaatccgatggagcactgcacaccagaatgattggccaatgagcagcttctctccctgaaacaataactgcccatttggcaaagggaaagatgacaataatcagaagaagaaaatgaatgggatgcataccatagacgaacgaggcggagactattgcgggaatcttactgttcaggagctgttcctagaactaactcccttactgtcattgatgtgcattccactctgtgcttttctgtacaaccattcaagttttaatttcccaggtgaaccatctttatctgccattaccacaagctttcaagtttccagttattttcatcatcataaccagtacggtgctattatttacctatgtacgtgtagttatgtataattttgtaattagttacaatggtaaaaaaaatcaaaatatataaaaagtgatttgtacagaactttattttagctcttttttaaaaatgatttgcatggttagaaaacggcgaggacagccaggggagggaagggcctctagggaactttgcactttctatacctttgtactatgcactgccctattgattctacacccaataatgatattacttgaacccatctgtaagaaactgcttcggaaattcatttgtgtgtatgtaaataacacaacatagaaacaggaagggaaaaaagtctgcagtaatgcacgtattttttttctttcctgtttattttcggttttgctttaagtccttttatttttaattccctttttgtttttctttttgggttttggttccttttgggtttatgggtgccctgatactccagcagagatcagaaggctacagatccattctatccatccgttatgtggctttgccatcccagcttggagtgtctttacaaagataataacagttgtgttctttgctctcgttttggatgcatagactgaaaaattaaaacaaataacttgtaaaatggcttgttaaaaaatacaattacctctaattagtagtacgcgtaaatgttttacagaatgaaaggcgtgctttttattttcttacttcgttacattggtggcgaaagaagtctgtatgaaaatcagttctttgctgacacaagttccatttgttacaaatgaattctaataaaaatgtcagtgttatgca

SEQ ID NO: 7690 - protein, 1488 aa, Homo sapiens [sequence omitted]

SEQ ID NO: 7691 - DNA, 7350 bp, Homo sapiens
gcggccgctgctccgcgggattaaattggccgcccggaggcggcggcgcggccgtggcggggcgcgaaggcgctggaggaaagtgttggcggcggcgcgggaggcggtggcggcggctgcccggggccaacatgaccaggctctgaaagtgttccagctgaaatttcagatcggacagactcgctgcggctccggaggcagtgattccaagctgctcgcgcacgctgctgccaagctgcaggatggtgcacgtagccaggctgctgctgctgctcctcactttcttcctccgcacggatgctgagacacctccaaggtttacacgaacacccgttgatcagacaggggtctctggcggagttgcctctttcatctgccaagctacgggagacccaagacctaaaattgtctggaacaaaaaaggaaagaaagtcagcaatcagagatttgaggtaatagagtttgacgatgggtctggatcagttctcagaatacaacccttacggactccgagggatgaggccatttatgaatgtgtggcctcaaataatgtgggagaaataagtgtatccaccagactcacagttttgcgggaagatcaaattcccaggggcttccctaccattgacatgggcccacagttgaaggtggttgagcgtactcgcacggccaccatgctttgtgcagccagtggtaatccggatccagaaatcacttggtttaaagatttcttacctgtggacacaagcaacaacaatggtcgtattaagcagttacgatcaggagcccttcagattgagcagagtgaagagtctgaccaaggaaaatatgagtgtgttgccaccaacagcgcgggcactcgctattccgctcctgccaatttatatgtcagagttcgccgtgtcccaccaagattctctatcccacccactaatcatgaaatcatgccaggcggaagcgttaatatcacctgtgtggccgtggggtcaccaatgccttatgtaaagtggatgttgggggcagaagatctgacacctgaagatgatatgccaataggaagaaatgtgctagaactgaatgatgtaagacagtcagcaaattacacctgtgttgctatgtcaacactgggtgtcattgaagcaatagcacagatcactgtcaaagccttacccaaacctccaggaactcctgtagtgaccgagagcacagctacaagcatcacactgacgtgggactctgggaaccctgagcctgtttcttattacataattcagcataaacctaaaaactctgaggaactttacaaagaaattgatggggtggcgaccacacgctacagtgtcgctggactaagtccctactcggattatgaattcagggttgttgctgtcaataacattgggcgggggcctcccagcgaacctgtgctaacacaaacctcagagcaagcaccatccagtgccccgagggatgtccaggcacgaatgttgagttcgaccaccattttggtacagtggaaggaacctgaagagccaaatggacagatccaaggatatagagtttattatacaatggatcccactcaacatgtcaacaactggatgaaacacaatgtagctgacagccaaatcactactattggcaacttagtgccccagaaaacatattctgtcaaagtcctggcttttacctcaattggagatggtcccctttcaagtgacatacaagtcatcactcagacaggagtaccagggcagccactaaacttcaaagcagaacctgagtctgaaacaagtattttgctctcttggacacctccacgttcagataccattgccaactatgaactggtctacaaagatggggagcatggagaggagcaacgaattaccattgagccagggacatcatataggctgcaaggactgaaaccaaacagcttatactatttccgtctggctgcacgctcccctcaaggcctgggtgcttctactgcagaaatatcagctagaaccatgcagtcaaagccgtcagctcctcctcaagacattagttgcaccagcccaagttccactagtattttggtaagttggcaacctccaccagtggaaaaacagaatggcattatcactgaatactccatcaagtacactgcagtggatggggaagatgacaagcctcacgagattttgggaattccttcggacactaccaaataccttttggaacagctggaaaaatggactgaataccggatcactgtgacagcccatacagatgtcggccctggccctgagagcttgtccgtgttgattcgaaccaatgaagatgttcctagtggtcctcctcgcaaagtcgaggtagaggctgtcaactcaacatctgttaaagtctcatggcgctcacccgtgcccaataaacagcatggccagataagaggatatcaggtgcattatgtgaggatggaaaatggtgagcccaagggccagcccatgctgaaagatgtcatgctggctgatgcacagtgggaatttgatgatactactgaacatgacatgatcatttctgggctccagcctgaaacttcctactccctcaccgtcacagcctacacaaccaaaggagatggtgctcgcagcaagcccaaactggtgtccaccactggggcagttccagggaaacctcggcttgtgattaaccacactcagatgaatactgctcttattcagtggcaccctccggtggacacatttggacctcttcagggctaccgtctaaaatttggccgcaaggatatggagccacttactactcttgagttctctgaaaaagaagatcactttacagctacagacatccacaagggagcatcatacgtcttcaggctctcagccagaaacaaagtgggctttggggaggagatggtgaaggagatttccattccagaagaagtaccaactggattccctcaaaaccttcactcagaaggcaccacttcaacctccgtccagttatcttggcaaccacctgtcctggcagagagaaatggcattatcaccaagtatacccttctttatagggatatcaacatcccccttctcccgatggagcagcttattgttccagctgacaccactatgacactcactggcttaaaaccagataccacatacgatgtaaaagtacgtgctcatacgagcaaagggcccgggccatatagtcccagtgtccagttcaggacactgcctgtggatcaagtgtttgcaaaaaattttcatgtcaaagcagtaatgaagacttccgtgttgctgtcttgggagattccagagaattataactccgccatgcctttcaaaattctttatgatgatgggaaaatggtagaagaagtggatggccgagccacacagaagttaattgtcaacctgaagcctgagaaatcatattcatttgtgctgacaaatcgtggaaacagtgctggtgggctgcagcacagggtcacggcaaagactgcaccagatgtattacgtaccaagcctgccttcattgggaagaccaacttggatggcatgattactgtgcaactgcctgaagtacctgcaaatgagaatataaaaggttactacataataattgtgcctttgaagaaatctcgcgggaaatttatcaagccatgggagagtccagatgaaatggaattagatgagctgcttaaggagatatctaggaagcgcagaagcatccgttatgggagagaagttgaattaaagccatatattgccgctcactttgatgtccttcccactgagttcaccctgggggatgacaagcattatggtggatttacaaacaagcaactccaaagtggtcaagaatatgtcttctttgtgttagcagtaatggaacatgcagagtctaagatgtatgcaaccagcccttactccgaccccgtggtgtcaatggatctggatccgcagccaatcacggatgaagaagaaggcttgatctgggttgtaggtcctgtccttgcagtggtctttatcatctgcattgtcattgctattcttctttataaaaggaagagggcagagtccgactctagaaaaagcagcataccgaacaataaggagatcccttcacaccacccaacagaccctgtagaactgaggcgccttaactttcaaacaccgggtatggctagccatcctccaatacccatcttggaacttgcagaccacattgaaagattgaaagcaaatgacaacttgaagttttcccaggaatatgagtcaattgaccctggccagcagttcacttgggaacattcaaacttggaagtaaacaaaccaaagaatagatacgcgaatgtaatcgcatatgatcattcccgggttctcctatcagctatagaagggatcccaggaagtgactatgtgaatgccaactacatagatgggtataggaagcaaaatgcctatattgcaacacagggatctctccccgaaacatttggggacttttggagaatgatatgggaacaacggagtgccacagttgtcatgatgacaaaactagaagaaagatcaagggtgaagtgtgaccagtattggcctagcagaggcacagaaacccacggactcgttcaagtaacgctgcttgatactgtggagctggccacatattgtgttcgaacatttgcactttacaagaatggttcaagtgagaagagagaagtgagacaattccagttcaccgcctggcctgatcatggtgttccagaacaccctacaccttttctagctttcttacgtagagtcaaaacctgtaaccctcccgatgctggtccgatggttgtgcactgcagtgcgggagttggccggactggttgcttcatcgtcatagatgccatgttagaaagaataaagcatgaaaaaactgtagatatttatggccatgtaactttaatgagagcccagaggaactatatggttcaaacagaagaccaatacatctttatccatgatgcactgttagaagcagtgacttgtggaaataccgaagtgccagctagaaacttgtatgcctacattcagaagctgacacaaatagaaacgggagagaatgtcacaggaatggagctcgaatttaagcgtctagccagctcaaaagctcacacctcaaggtttatcagtgccaatcttccatgtaataaattcaaaaatcgccttgttaatattatgccatatgaatccacaagggtatgcctgcagcctatccgtggagtagaaggatctgattacatcaatgccagttttattgatggatacagacaacagaaagcctacatcgctacccaggggcccttggcagagaccactgaagacttctggcggatgctctgggaacacaattccaccatagttgtgatgctcaccaagctgcgtgaaatgggcagagagaaatgtcaccaatactggccagcagaacggtctgcaagataccagtactttgttgtagatcccatggctgagtacaacatgccacagtatatcctaagggaattcaaggtcacagatgccagggacggccagtcccgaacagtaaggcagttccagttcactgactggccagagcaaggagtgccaaagtccggagaaggatttattgacttcatcggccaagtccataaaacaaaagaacagtttggccaagatggacccatttcagtccattgcagcgcgggcgttggaagaactggagtcttcataacgctaagcattgttttggaaagaatgagatatgaaggagttgtagatatcttccagactgtcaaaatgttaagaacacaacgaccagctatggtacagacagaggatcaatatcagttttcctatcgtgccgcactagagtacctgggcagctttgaccactatgcaacgtagaaacccctgacccattctggatttttactacaggcccttcaatatccatggagtctcttctgagccatacagggcacttgagaagtccttcttaacttctagctaacaactacttagtgggactattacacacaaaacaaattaaaaacaaattattccaggtggaccaagaattcacactttgacatcgccccttcccaccatactgctcataataacattttagggggaaaggggagggaatgtttaaaaagaaagtccttgatttagttttttagtattgtaaagatactgctgacctgtgcttcatttctaactgtgtaaacttttttttaacaaaatgtatcattcgataaagtgaattttaaaaaagttacataactcttcatttttttatttccaaatcgtaggtttttttaagctgtagaactgttatctgtaatatcttgctgtagaaatatcaaatcatttgaaaatttgcacatttttgtgcaaaactcaatctacagtatcagtctcgtcagatatattaattttacacttcagttttgattggtgagaaagtacccattctcttcaaataatcaaagataattattattttgttttgtttttggaatcaacagggaggcgcaaagtataaagttgctgctaacatatatacatatatatccatattttataagggtgtctatgtatatatagacagtgtgtccacacaaaaaatagatacagttatcagtcagtcagttcttccatgatttagtttttttaaacgtagaaaagctattgtaaacatctctttccatttattcttaattttttgacatattggtatttctttaaagggaaatgaggaatgcacatcagtgattgattgtcaaacctcaccccctgatttcctacctaatctacccccacctaaccaatcaatcacatccacaaattgttttgtttgtttgttagtcaggcttccaacaaagttcaatatttctaacactctagtgcaataaaaattattattaaatagctaagaggtgtgcatgtgggaaaggtcagtgcatatccctttaggaggggagaatgttgtaatatatcagctatcgagttgtttaaaaaaagtgtattcaatcgtatattgtctatagtatgtgctatgaaatttgcatttatgatatgtaacaggggcaaagccaaattcatgttactctgttcagtcagaaacattttgtggcatacagcattcctgggaagtgctgtactttgtttcgttttggttttagttttgcatttagagtgccttataattgatgcctattttaatagcatttctttttagcttttggttcgtatttccattcactgttcgtatctgttactttctattaaagcattatctgtttaccac

SEQ ID NO: 7692 - protein, 1899 aa, Homo sapiens; identical to SEQ ID NO: 7688

SEQ ID NO: 7693 - DNA, 7323 bp, Homo sapiens
gcggccgctgctccgcgggattaaattggccgcccggaggcggcggcgcggccgtggcggggcgcgaaggcgctggaggaaagtgttggcggcggcgcgggaggcggtggcggcggctgcccggggccaacatgaccaggctctgaaagtgttccagctgaaatttcagatcggacagactcgctgcggctccggaggcagtgattccaagctgctcgcgcacgctgctgccaagctgcaggatggtgcacgtagccaggctgctgctgctgctcctcactttcttcctccgcacggatgctgagacacctccaaggtttacacgaacacccgttgatcagacaggggtctctggcggagttgcctctttcatctgccaagctacgggagacccaagacctaaaattgtctggaacaaaaaaggaaagaaagtcagcaatcagagatttgaggtaatagagtttgacgatgggtctggatcagttctcagaatacaacccttacggactccgagggatgaggccatttatgaatgtgtggcctcaaataatgtgggagaaataagtgtatccaccagactcacagttttgcgggaagatcaaattcccaggggcttccctaccattgacatgggcccacagttgaaggtggttgagcgtactcgcacggccaccatgctttgtgcagccagtggtaatccggatccagaaatcacttggtttaaagatttcttacctgtggacacaagcaacaacaatggtcgtattaagcagttacgatcaggagcccttcagattgagcagagtgaagagtctgaccaaggaaaatatgagtgtgttgccaccaacagcgcgggcactcgctattccgctcctgccaatttatatgtcagagttcgccgtgtcccaccaagattctctatcccacccactaatcatgaaatcatgccaggcggaagcgttaatatcacctgtgtggccgtggggtcaccaatgccttatgtaaagtggatgttgggggcagaagatctgacacctgaagatgatatgccaataggaagaaatgtgctagaactgaatgatgtaagacagtcagcaaattacacctgtgttgctatgtcaacactgggtgtcattgaagcaatagcacagatcactgtcaaagccttacccaaacctccaggaactcctgtagtgaccgagagcacagctacaagcatcacactgacgtgggactctgggaaccctgagcctgtttcttattacataattcagcataaacctaaaaactctgaggaactttacaaagaaattgatggggtggcgaccacacgctacagtgtcgctggactaagtccctactcggattatgaattcagggttgttgctgtcaataacattgggcgggggcctcccagcgaacctgtgctaacacaaacctcagagcaagcaccatccagtgccccgagggatgtccaggcacgaatgttgagttcgaccaccattttggtacagtggaaggaacctgaagagccaaatggacagatccaaggatatagagtttattatacaatggatcccactcaacatgtcaacaactggatgaaacacaatgtagctgacagccaaatcactactattggcaacttagtgccccagaaaacatattctgtcaaagtcctggcttttacctcaattggagatggtcccctttcaagtgacatacaagtcatcactcagacaggagtaccagggcagccactaaacttcaaagcagaacctgagtctgaaacaagtattttgctctcttggacacctccacgttcagataccattgccaactatgaactggtctacaaagatggggagcatggagaggagcaacgaattaccattgagccagggacatcatataggctgcaaggactgaaaccaaacagcttatactatttccgtctggctgcacgctcccctcaaggcctgggtgcttctactgcagaaatatcagctagaaccatgcagtcaaagccgtcagctcctcctcaagacattagttgcaccagcccaagttccactagtattttggtaagttggcaacctccaccagtggaaaaacagaatggcattatcactgaatactccatcaagtacactgcagtggatggggaagatgacaagcctcacgagattttgggaattccttcggacactaccaaataccttttggaacagctggaaaaatggactgaataccggatcactgtgacagcccatacagatgtcggccctggccctgagagcttgtccgtgttgattcgaaccaatgaagatgttcctagtggtcctcctcgcaaagtcgaggtagaggctgtcaactcaacatctgttaaagtctcatggcgctcacccgtgcccaataaacagcatggccagataagaggatatcaggtgcattatgtgaggatggaaaatggtgagcccaagggccagcccatgctgaaagatgtcatgctggctgatgcacaggacatgatcatttctgggctccagcctgaaacttcctactccctcaccgtcacagcctacacaaccaaaggagatggtgctcgcagcaagcccaaactggtgtccaccactggggcagttccagggaaacctcggcttgtgattaaccacactcagatgaatactgctcttattcagtggcaccctccggtggacacatttggacctcttcagggctaccgtctaaaatttggccgcaaggatatggagccacttactactcttgagttctctgaaaaagaagatcactttacagctacagacatccacaagggagcatcatacgtcttcaggctctcagccagaaacaaagtgggctttggggaggagatggtgaaggagatttccattccagaagaagtaccaactggattccctcaaaaccttcactcagaaggcaccacttcaacctccgtccagttatcttggcaaccacctgtcctggcagagagaaatggcattatcaccaagtatacccttctttatagggatatcaacatcccccttctcccgatggagcagcttattgttccagctgacaccactatgacactcactggcttaaaaccagataccacatacgatgtaaaagtacgtgctcatacgagcaaagggcccgggccatatagtcccagtgtccagttcaggacactgcctgtggatcaagtgtttgcaaaaaattttcatgtcaaagcagtaatgaagacttccgtgttgctgtcttgggagattccagagaattataactccgccatgcctttcaaaattctttatgatgatgggaaaatggtagaagaagtggatggccgagccacacagaagttaattgtcaacctgaagcctgagaaatcatattcatttgtgctgacaaatcgtggaaacagtgctggtgggctgcagcacagggtcacggcaaagactgcaccagatgtattacgtaccaagcctgccttcattgggaagaccaacttggatggcatgattactgtgcaactgcctgaagtacctgcaaatgagaatataaaaggttactacataataattgtgcctttgaagaaatctcgcgggaaatttatcaagccatgggagagtccagatgaaatggaattagatgagctgcttaaggagatatctaggaagcgcagaagcatccgttatgggagagaagttgaattaaagccatatattgccgctcactttgatgtccttcccactgagttcaccctgggggatgacaagcattatggtggatttacaaacaagcaactccaaagtggtcaagaatatgtcttctttgtgttagcagtaatggaacatgcagagtctaagatgtatgcaaccagcccttactccgaccccgtggtgtcaatggatctggatccgcagccaatcacggatgaagaagaaggcttgatctgggttgtaggtcctgtccttgcagtggtctttatcatctgcattgtcattgctattcttctttataaaaggaagagggcagagtccgactctagaaaaagcagcataccgaacaataaggagatcccttcacaccacccaacagaccctgtagaactgaggcgccttaactttcaaacaccgggtatggctagccatcctccaatacccatcttggaacttgcagaccacattgaaagattgaaagcaaatgacaacttgaagttttcccaggaatatgagtcaattgaccctggccagcagttcacttgggaacattcaaacttggaagtaaacaaaccaaagaatagatacgcgaatgtaatcgcatatgatcattcccgggttctcctatcagctatagaagggatcccaggaagtgactatgtgaatgccaactacatagatgggtataggaagcaaaatgcctatattgcaacacagggatctctccccgaaacatttggggacttttggagaatgatatgggaacaacggagtgccacagttgtcatgatgacaaaactagaagaaagatcaagggtgaagtgtgaccagtattggcctagcagaggcacagaaacccacggactcgttcaagtaacgctgcttgatactgtggagctggccacatattgtgttcgaacatttgcactttacaagaatggttcaagtgagaagagagaagtgagacaattccagttcaccgcctggcctgatcatggtgttccagaacaccctacaccttttctagctttcttacgtagagtcaaaacctgtaaccctcccgatgctggtccgatggttgtgcactgcagtgcgggagttggccggactggttgcttcatcgtcatagatgccatgttagaaagaataaagcatgaaaaaactgtagatatttatggccatgtaactttaatgagagcccagaggaactatatggttcaaacagaagaccaatacatctttatccatgatgcactgttagaagcagtgacttgtggaaataccgaagtgccagctagaaacttgtatgcctacattcagaagctgacacaaatagaaacgggagagaatgtcacaggaatggagctcgaatttaagcgtctagccagctcaaaagctcacacctcaaggtttatcagtgccaatcttccatgtaataaattcaaaaatcgccttgttaatattatgccatatgaatccacaagggtatgcctgcagcctatccgtggagtagaaggatctgattacatcaatgccagttttattgatggatacagacaacagaaagcctacatcgctacccaggggcccttggcagagaccactgaagacttctggcggatgctctgggaacacaattccaccatagttgtgatgctcaccaagctgcgtgaaatgggcagagagaaatgtcaccaatactggccagcagaacggtctgcaagataccagtactttgttgtagatcccatggctgagtacaacatgccacagtatatcctaagggaattcaaggtcacagatgccagggacggccagtcccgaacagtaaggcagttccagttcactgactggccagagcaaggagtgccaaagtccggagaaggatttattgacttcatcggccaagtccataaaacaaaagaacagtttggccaagatggacccatttcagtccattgcagcgcgggcgttggaagaactggagtcttcataacgctaagcattgttttggaaagaatgagatatgaaggagttgtagatatcttccagactgtcaaaatgttaagaacacaacgaccagctatggtacagacagaggatcaatatcagttttcctatcgtgccgcactagagtacctgggcagctttgaccactatgcaacgtagaaacccctgacccattctggatttttactacaggcccttcaatatccatggagtctcttctgagccatacagggcacttgagaagtccttcttaacttctagctaacaactacttagtgggactattacacacaaaacaaattaaaaacaaattattccaggtggaccaagaattcacactttgacatcgccccttcccaccatactgctcataataacattttagggggaaaggggagggaatgtttaaaaagaaagtccttgatttagttttttagtattgtaaagatactgctgacctgtgcttcatttctaactgtgtaaacttttttttaacaaaatgtatcattcgataaagtgaattttaaaaaagttacataactcttcatttttttatttccaaatcgtaggtttttttaagctgtagaactgttatctgtaatatcttgctgtagaaatatcaaatcatttgaaaatttgcacatttttgtgcaaaactcaatctacagtatcagtctcgtcagatatattaattttacacttcagttttgattggtgagaaagtacccattctcttcaaataatcaaagataattattattttgttttgtttttggaatcaacagggaggcgcaaagtataaagttgctgctaacatatatacatatatatccatattttataagggtgtctatgtatatatagacagtgtgtccacacaaaaaatagatacagttatcagtcagtcagttcttccatgatttagtttttttaaacgtagaaaagctattgtaaacatctctttccatttattcttaattttttgacatattggtatttctttaaagggaaatgaggaatgcacatcagtgattgattgtcaaacctcaccccctgatttcctacctaatctacccccacctaaccaatcaatcacatccacaaattgttttgtttgtttgttagtcaggcttccaacaaagttcaatatttctaacactctagtgcaataaaaattattattaaatagctaagaggtgtgcatgtgggaaaggtcagtgcatatccctttaggaggggagaatgttgtaatatatcagctatcgagttgtttaaaaaaagtgtattcaatcgtatattgtctatagtatgtgctatgaaatttgcatttatgatatgtaacaggggcaaagccaaattcatgttactctgttcagtcagaaacattttgtggcatacagcattcctgggaagtgctgtactttgtttcgttttggttttagttttgcatttagagtgccttataattgatgcctattttaatagcatttctttttagcttttggttcgtatttccattcactgttcgtatctgttactttctattaaagcattatctgtttaccac

SEQ ID NO: 7694 - protein, 1890 aa, Homo sapiens; identical to SEQ ID NO: 7686

SEQ ID NO: 7695 - DNA, 6117 bp, Homo sapiens
gcggccgctgctccgcgggattaaattggccgcccggaggcggcggcgcggccgtggcggggcgcgaaggcgctggaggaaagtgttggcggcggcgcgggaggcggtggcggcggctgcccggggccaacatgaccaggctctgaaagtgttccagctgaaatttcagatcggacagactcgctgcggctccggaggcagtgattccaagctgctcgcgcacgctgctgccaagctgcaggatggtgcacgtagccaggctgctgctgctgctcctcactttcttcctccgcacggatgctgagacacctccaaggtttacacgaacacccgttgatcagacaggggtctctggcggagttgcctctttcatctgccaagctacgggagacccaagacctaaaattgtctggaacaaaaaaggaaagaaagtcagcaatcagagatttgaggtaatagagtttgacgatgggtctggatcagttctcagaatacaacccttacggactccgagggatgaggccatttatgaatgtgtggcctcaaataatgtgggagaaataagtgtatccaccagactcacagttttgcgggaagatcaaattcccaggggcttccctaccattgacatgggcccacagttgaaggtggttgagcgtactcgcacggccaccatgctttgtgcagccagtggtaatccggatccagaaatcacttggtttaaagatttcttacctgtggacacaagcaacaacaatggtcgtattaagcagttacgatcaggagcccttcagattgagcagagtgaagagtctgaccaaggaaaatatgagtgtgttgccaccaacagcgcgggcactcgctattccgctcctgccaatttatatgtcagagttcgccgtgtcccaccaagattctctatcccacccactaatcatgaaatcatgccaggcggaagcgttaatatcacctgtgtggccgtggggtcaccaatgccttatgtaaagtggatgttgggggcagaagatctgacacctgaagatgatatgccaataggaagaaatgtgctagaactgaatgatgtaagacagtcagcaaattacacctgtgttgctatgtcaacactgggtgtcattgaagcaatagcacagatcactgtcaaagccttacccaaacctccaggaactcctgtagtgaccgagagcacagctacaagcatcacactgacgtgggactctgggaaccctgagcctgtttcttattacataattcagcataaacctaaaaactctgaggaactttacaaagaaattgatggggtggcgaccacacgctacagtgtcgctggactaagtccctactcggattatgaattcagggttgttgctgtcaataacattgggcgggggcctcccagcgaacctgtgctaacacaaacctcagagcaagcaccatccagtgccccgagggatgtccaggcacgaatgttgagttcgaccaccattttggtacagtggaaggaacctgaagagccaaatggacagatccaaggatatagagtttattatacaatggatcccactcaacatgtcaacaactggatgaaacacaatgtagctgacagccaaatcactactattggcaacttagtgccccagaaaacatattctgtcaaagtcctggcttttacctcaattggagatggtcccctttcaagtgacatacaagtcatcactcagacaggagtaccagggcagccactaaacttcaaagcagaacctgagtctgaaacaagtattttgctctcttggacacctccacgttcagataccattgccaactatgaactggtctacaaagatggggagcatggagaggagcaacgaattaccattgagccagggacatcatataggctgcaaggactgaaaccaaacagcttatactatttccgtctggctgcacgctcccctcaaggcctgggtgcttctactgcagaaatatcagctagaaccatgcagtcaatgtttgcaaaaaattttcatgtcaaagcagtaatgaagacttccgtgttgctgtcttgggagattccagagaattataactccgccatgcctttcaaaattctttatgatgatgggaaaatggtagaagaagtggatggccgagccacacagaagttaattgtcaacctgaagcctgagaaatcatattcatttgtgctgacaaatcgtggaaacagtgctggtgggctgcagcacagggtcacggcaaagactgcaccagatgtattacgtaccaagcctgccttcattgggaagaccaacttggatggcatgattactgtgcaactgcctgaagtacctgcaaatgagaatataaaaggttactacataataattgtgcctttgaagaaatctcgcgggaaatttatcaagccatgggagagtccagatgaaatggaattagatgagctgcttaaggagatatctaggaagcgcagaagcatccgttatgggagagaagttgaattaaagccatatattgccgctcactttgatgtccttcccactgagttcaccctgggggatgacaagcattatggtggatttacaaacaagcaactccaaagtggtcaagaatatgtcttctttgtgttagcagtaatggaacatgcagagtctaagatgtatgcaaccagcccttactccgaccccgtggtgtcaatggatctggatccgcagccaatcacggatgaagaagaaggcttgatctgggttgtaggtcctgtccttgcagtggtctttatcatctgcattgtcattgctattcttctttataaaaggaagagggcagagtccgactctagaaaaagcagcataccgaacaataaggagatcccttcacaccacccaacagaccctgtagaactgaggcgccttaactttcaaacaccgggtatggctagccatcctccaatacccatcttggaacttgcagaccacattgaaagattgaaagcaaatgacaacttgaagttttcccaggaatatgagtcaattgaccctggccagcagttcacttgggaacattcaaacttggaagtaaacaaaccaaagaatagatacgcgaatgtaatcgcatatgatcattcccgggttctcctatcagctatagaagggatcccaggaagtgactatgtgaatgccaactacatagatgggtataggaagcaaaatgcctatattgcaacacagggatctctccccgaaacatttggggacttttggagaatgatatgggaacaacggagtgccacagttgtcatgatgacaaaactagaagaaagatcaagggtgaagtgtgaccagtattggcctagcagaggcacagaaacccacggactcgttcaagtaacgctgcttgatactgtggagctggccacatattgtgttcgaacatttgcactttacaagaatggttcaagtgagaagagagaagtgagacaattccagttcaccgcctggcctgatcatggtgttccagaacaccctacaccttttctagctttcttacgtagagtcaaaacctgtaaccctcccgatgctggtccgatggttgtgcactgcagtgcgggagttggccggactggttgcttcatcgtcatagatgccatgttagaaagaataaagcatgaaaaaactgtagatatttatggccatgtaactttaatgagagcccagaggaactatatggttcaaacagaagaccaatacatctttatccatgatgcactgttagaagcagtgacttgtggaaataccgaagtgccagctagaaacttgtatgcctacattcagaagctgacacaaatagaaacgggagagaatgtcacaggaatggagctcgaatttaagcgtctagccagctcaaaagctcacacctcaaggtttatcagtgccaatcttccatgtaataaattcaaaaatcgccttgttaatattatgccatatgaatccacaagggtatgcctgcagcctatccgtggagtagaaggatctgattacatcaatgccagttttattgatggatacagacaacagaaagcctacatcgctacccaggggcccttggcagagaccactgaagacttctggcggatgctctgggaacacaattccaccatagttgtgatgctcaccaagctgcgtgaaatgggcagagagaaatgtcaccaatactggccagcagaacggtctgcaagataccagtactttgttgtagatcccatggctgagtacaacatgccacagtatatcctaagggaattcaaggtcacagatgccagggacggccagtcccgaacagtaaggcagttccagttcactgactggccagagcaaggagtgccaaagtccggagaaggatttattgacttcatcggccaagtccataaaacaaaagaacagtttggccaagatggacccatttcagtccattgcagcgcgggcgttggaagaactggagtcttcataacgctaagcattgttttggaaagaatgagatatgaaggagttgtagatatcttccagactgtcaaaatgttaagaacacaacgaccagctatggtacagacagaggatcaatatcagttttcctatcgtgccgcactagagtacctgggcagctttgaccactatgcaacgtagaaacccctgacccattctggatttttactacaggcccttcaatatccatggagtctcttctgagccatacagggcacttgagaagtccttcttaacttctagctaacaactacttagtgggactattacacacaaaacaaattaaaaacaaattattccaggtggaccaagaattcacactttgacatcgccccttcccaccatactgctcataataacattttagggggaaaggggagggaatgtttaaaaagaaagtccttgatttagttttttagtattgtaaagatactgctgacctgtgcttcatttctaactgtgtaaacttttttttaacaaaatgtatcattcgataaagtgaattttaaaaaagttacataactcttcatttttttatttccaaatcgtaggtttttttaagctgtagaactgttatctgtaatatcttgctgtagaaatatcaaatcatttgaaaatttgcacatttttgtgcaaaactcaatctacagtatcagtctcgtcagatatattaattttacacttcagttttgattggtgagaaagtacccattctcttcaaataatcaaagataattattattttgttttgtttttggaatcaacagggaggcgcaaagtataaagttgctgctaacatatatacatatatatccatattttataagggtgtctatgtatatatagacagtgtgtccacacaaaaaatagatacagttatcagtcagtcagttcttccatgatttagtttttttaaacgtagaaaagctattgtaaacatctctttccatttattcttaattttttgacatattggtatttctttaaagggaaatgaggaatgcacatcagtgattgattgtcaaacctcaccccctgatttcctacctaatctacccccacctaaccaatcaatcacatccacaaattgttttgtttgtttgttagtcaggcttccaacaaagttcaatatttctaacactctagtgcaataaaaattattattaaatagctaagaggtgtgcatgtgggaaaggtcagtgcatatccctttaggaggggagaatgttgtaatatatcagctatcgagttgtttaaaaaaagtgtattcaatcgtatattgtctatagtatgtgctatgaaatttgcatttatgatatgtaacaggggcaaagccaaattcatgttactctgttcagtcagaaacattttgtggcatacagcattcctgggaagtgctgtactttgtttcgttttggttttagttttgcatttagagtgccttataattgatgcctattttaatagcatttctttttagcttttggttcgtatttccattcactgttcgtatctgttactttctattaaagcattatctgtttaccac

SEQ ID NO: 7696 - protein, 1488 aa, Homo sapiens [sequence omitted]

SEQ ID NO: 7697 - DNA, 1614 bp, Homo sapiens
cctcgatgctccgccgctcgcggctggggggtccggggccgcgtctcctctcctccctccgcctctcctctttcctccttcctgctgcctcttcttttaaagcggattctttggccacaaatagcaactcggctgcccccctcggtgcctccctccccttctcttcttccccccaaaagtgaagcgcacgcgaggtaaagaaacgaagaccctgagaatttaaaatcatccaactatttggtgccagaagcaggacaagaactcagacatcatgatccagtgccctccatcccaccagctattcatcatcacctccacattctggatcaaagaagccagttttccaacttatcaatgagcaatacatatagaatatttttaaaactccaaatacttttatgaaggaaaaatgaagcaataggacaagacattttcttcgtttccttccagctctaacattctgtgataaatagcacacaggagctttgctatagcactaccccctctagtgcataattcagcatacgatgagtatgagtctgttttggaccccatccaaaggagttagttcctagaagtacttggaagatttattctcatttatcatgaggcatcctaacaggagactaaaaataatcacgatgacaataatagtaatcagttgttacacttgtattatgtactaagcatcgtgctaagcatgttaaagttcacctgtttttgaaaaggcacttcatgaccttatgtgggttgcgaatctagtgggtcataaacaatttctgaaatgaaagaaaagtaggaaaaaacacagagtgcattatacatactaagttgttttattttttatttttttattttttttgcaaaacttcctttttgatcatgtggctagtgattaaaagtttggaagcactgcctcgtttccaatcttaactgccttgctagttaagtattattagccccattatataagtgaggaaacaggacgagagaggataagtaatttggccaagctgacacagtgagtggccaagctagaattttgaacctagatctgtttgacttcaaatccaatattttcacttctatagtgatgataaattattgaccaaggtatggaataaattgttgctaatcatgttttctttgtgaggactactggggtttttattaaatccagctaaatggagaaacacagcatagattcaagtgacatgttcggaagagagtgaggaatttcataaaacactaaatctaatatctaagaccttttcctgtaggtgttagcttatgtctaatacactttattgacttactgctaaatacataaatgaaacaataatagtttcagtcctcaaataacaatattcacttctacgtgtgtttctatttttatttcagagagtatttttcaaatttaagttatacagcatttctcagtagcttgctttggccaaacacagaactagcacataagaaagctaaaaggccaggcactgtggctcacacctgtaatcccagcacttttggaggccaaggcaggcagatcacttgaggtcaggagtttgaaatcagcctggccaacatggtgaaacccgtctctactaaaaatac

SEQ ID NO: 7698 - protein, 58 aa, Homo sapiens
MLRRSRLGGPGPRLLSSLRLSSFLLPAASSFKADSLATNSNSAAPLGASLPFSSSPQK

SEQ ID NO: 7699 - DNA, 2436 bp, Homo sapiens
gatgctccgccgctcgcggctggggggtccggggccgcgtctcctctcctccctccgcctctcctctttcctccttcctgctgcctcttcttttaaagcggattctttggccacaaatagcaactcggctgcccccctcggtgcctccctccccttctcttcttccccccaaaagtgaagcgcacgcgaggagctgaaaagctgtgcagggatgatggacccttgccccctgtgacctaaggatggatccagaaatctcagcctccccataggtgattccacccaagatgtaaactcctacttggctttgtcattgccacatgtgcccccataaactggcaatcccactttcctcatccaaagttgcatgttagagaaacagaaagttttaaaacccctaatattcctttgctgttacttttgtgggaaatgtatcactctgcctgcagatctgacctcatttaagaagaacccagctggtaaatctgactgctatctgggaacatagttgaggatatatcatcttacaccactggtagtgatttaaactagcaagtagaaaagggacccagaaatcaggggatacagaggacagtacaagtaaatggcataagcccaacttttctgacactgtgaagtcctagatgttcttgtctctactacaaccaaacatcaaacatcttagagaaagaagtagggatgggtcaaggtgactggagagtctgagttattattataccaatgagactgagaattattcagggtgatgctgctgaaaaacgggagatacagcaaatagagaagccaaagtttctctgcacatctgagtagtaatggaagtgagactgcagcctgctacactcatgttaatatattcagagcagattggcaacaaaagagtgtcctaatgctgcagcatctagtaaacttctggactggtttaccatttggaaattttaagtcaaagaacatcagaagcaggctaatcttttgttgaaattacctcgtttttacaggtaaagaaacgaagaccctgagaatttaaaatcatccaactatttggtgccagaagcaggacaagaactcagacatcatgatccagtgccctccatcccaccagctattcatcatcacctccacattctggatcaaagaagccagttttccaacttatcaatgagcaatacatatagaatatttttaaaactccaaatacttttatgaaggaaaaatgaagcaataggacaagacattttcttcgtttccttccagctctaacattctgtgataaatagcacacaggagctttgctatagcactaccccctctagtgcataattcagcatacgatgagtatgagtctgttttggaccccatccaaaggagttagttcctagaagtacttggaagatttattctcatttatcatgaggcatcctaacaggagactaaaaataatcacgatgacaataatagtaatcagttgttacacttgtattatgtactaagcatcgtgctaagcatgttaaagttcacctgtttttgaaaaggcacttcatgaccttatgtgggttgcgaatctagtgggtcataaacaatttctgaaatgaaagaaaagtaggaaaaaacacagagtgcattatacatactaagttgttttattttttatttttttattttttttgcaaaacttcctttttgatcatgtggctagtgattaaaagtttggaagcactgcctcgtttccaatcttaactgccttgctagttaagtattattagccccattatataagtgaggaaacaggacgagagaggataagtaatttggccaagctgacacagtgagtggccaagctagaattttgaacctagatctgtttgacttcaaatccaatattttcacttctatagtgatgataaattattgaccaaggtatggaataaattgttgctaatcatgttttctttgtgaggactactggggtttttattaaatccagctaaatggagaaacacagcatagattcaagtgacatgttcggaagagagtgaggaatttcataaaacactaaatctaatatctaagaccttttcctgtaggtgttagcttatgtctaatacactttattgacttactgctaaatacataaatgaaacaataatagtttcagtcctcaaataacaatattcacttctacgtgtgtttctatttttatttcagagagtatttttcaaatttaagttatacagcatttctcagtagcttgctttggccaaacacagaactagcacataagaaagctaaaaggccaggcactgtggctcacacctgtaatcccagcacttttggaggccaaggcaggcagatcacttgaggtcaggagtttgaaatcagcctggccaacatggtgaaacccgtctctactaaaaatac

SEQ ID NO: 7700 - protein, 58 aa, Homo sapiens; identical to SEQ ID NO: 7698

SEQ ID NO: 7701 - DNA, 2194 bp, Homo sapiens
ctctcttgcctgctgccacgtaagaggtgactttgctgctcctccgccttccaccatgattgtgaggcctccccagccatgtggaactatctttgcatgttctgtccagcaagttctctctccatgaagaccataccacctaaagtgaccccatctcagtctgtctgttggtagacctcctgcaatcaactgaaggcctgaataaaacaaaagactggcctcctcccaagcaagaggtgagtatgtttttgatgattttaaatctcaagttgtggctcagcatcacaaatggaagaaaaagtaaaaggaaaaatgaatgacaatcaaagctttttctttgcttttgtggaggttgtggaggggcgaaatttctaagatcctcatgctgccatttctgctgatgccaatcatttccgttaaggtttggataagcctcgaaccacaagtgcactgcagtctgaataggcatcataatcctccaggaaactctgaacggccttgacacagactctaaaacccagctgggcaccgtggctcacacctgtaatcccagcactttgggaggccgaggcacgcagattgtttgagcttgggatatcgagatcagcctgcgcaacatggggaccctgctcagccaaactctgatccaaaggaagccaccgccgtcatatccacatctagccatacttcgtttgaaagcttcccgggctctgtgagtgctggcttttgggacctatttttgaggggaaagaatatggtcattgcttccttctggatacactgaaccctcgataaaggacttggaggtggcttgtgtgacttttactgctgaagtaaataggctttgttttaagcctggtacctaatcaatccagaacttagctgtgtttatatgccacagggaagtcaaagccaatgcatcttggaactgactgaaagtaaatgaccactgtgtagctccctgtattaatgcataaggccctctagactgaaatataccatgcaaaacatggcatacagaaagacatcttgaatatttcctgtgactagtcaagaccctatcaaggaggtgatcagtatcatctgcactctaactgaatcttgcatttataccctaactgaaacttgcatccttttgtacactgtttctcctctatctttctagttggaacatatcccttaatacacagatttagggtttatcctcaacagtgtcattagctgactgtctaatggaatcaacctctttctctatctttatatgaaattatttatttatttggatttcctcattatcagaaacatacccatgcaattatttaaagacttgattttgtcctaaattaggtaaaataggataatgaaatgtgtatccatatgtaataatcaaatagagaacccaaacctatttgtatccataatttaaacagaataagtaaggtaactgcattagtttccaaatgctgctataacaaatttctaaaaacttaatggcttaaaacagcacaaatttattatgttacagttctgaaagtaaggagtctaaaatgagtttgcaaggctgcattctttctggaggctctaaggaataacctgtgttcctgccttttccggcttttagaggctactcacatttcttagcttatggatctttcctcatatcactcagatctctgcttctatcatcacctctcttactcaaacaccgaccctccttcctctctcttataaggatgcttgtgattatgttgggcttacctaaacaatacagataatctccacatctcaaaatacttaacattatcacacctaaaaagtcccttctactgaggttatatattcacaggtttctgggactgggatatgaacaccttcagagctatattctgcctactacaataagcaatacccaagctagtattttattttgtgcccgaggaactgtattttcacatctcatttcagctatgcttggtcattctacatctttatcatccaaggtgcagatgaaataagagtgttttgctctgtggaatagtagaaagtgcattggctttggagtcagaaagccctattttcacactctggcttttccattgagccaactgtatggccatgaacaagacatttaacttctctgatccctgaccctttgaatgtagtgtggtcctcaataaatggtagttgctttaac

SEQ ID NO: 7702 - protein, 61 aa, Homo sapiens [sequence omitted]

SEQ ID NO: 7703 - DNA, 781 bp, Homo sapiens
cacatcctgattttattccctcctttttccaacatacgtagaagagtacttgtgtttaactttgaatgtttcaagaaacccaaaacttaacaccatgtcttatgacagaggcatttactgctaagtacccatgcactatcccaaatcatgtcactgcactccagtctgggcaacagagtgagactccgtctcaaaaaaaaaaataatttgatcctcataaaattcagcattccaaagaattgggggtaggaaacttgagccccactttgagatggggtggattcctcttgagatactctacagcacacatactcttgaccttttcatgtatctctgtctcctaatttggcaggaaatataggaaaaggaacaagggaaaaacatagtgacagccaggaatattgaatgtcaccttataatctgaaaatatgtggtagaattagtttggatgttttcccactatatagaagaagtgacttgttcaggaagaagaaatccacatccccttcaaatgtctagttcttggtctacacatgggaacaatacatggtgactggttaataaccaatggtccacacctaggagtctgccaggacccactagtctggctaaataaggtggttattgtatatcttctggtgaagagttctccagttgggtgtggtggctcacacctgtaatctcagcactttgagaggctgagtctggctgatggcttgagctcaggagtttgagaccaggctggtcaacatggcgaaacctcatctctacaaaaaatacc

SEQ ID NO: 7704 - protein, 46 aa, Homo sapiens [sequence omitted]

SEQ ID NO: 7705 - DNA, 4564 bp, Homo sapiens
cggaacccggtcgaaagggtcctctctggcgtccttctgcttccgtgggtttctggataggctgcgttttgttctcaggggatgcaagttcttcctttcagggttgaagcgtgagagaggttggtttttgaaacgggagtgtttcaggttattgaggtccaaaaagaaataaagtttttgtttacgtctgtatggcttgtaagatatctcccggggccaattcagcatctctacctggccatcctaacaaggtgatttgtgaaagggtgagacttcagagcctgttccctctcctcccaagtgatcagaacactaccgttcaagaggatgctcacttcaaagctttcttccagagtgaagatagtccaagtcctaagagacagcgcctctctcattcagtctttgattatacatcagcatcaccagctccctcaccaccaatgcgaccatgggagatgacatcaaataggcagcccccttcagttcgaccaagccaacatcacttctcaggggaacgatgcaacacacctgcacgcaacagaagaagtcctcctgtcaggcgccagagaggaagaagggatcgtctgtctcgacataattccattagtcaagatgaaaactatcaccatctcccttacgcacagcagcaagcaatagaggagcctcgagccttccaccctccgaatgtatctccccgtctgctacatcctgctgctcatccaccccagcagaatgcagtcatggttgacatacatgatcagctccatcaaggaacagtccctgtttcttacacagtaacaacagtggcaccacatgggattccactctgcacaggccagcacatccctgcttgtagtacacagcaggtcccaggatgctctgtggttttcagtggacagcacctccctgtctgtagtgtgcctcctccaatgcttcaggcatgttcagttcagcacttaccagtaccatatgctgcattcccaccccttatttctagtgatccatttcttatacatcctcctcacctttctccccatcatcctcctcatttgccaccaccaggccagtttgtccctttccaaacacagcaatcacgatcgcctctgcaaaggatagaaaatgaagtggaactcttaggagaacatcttccagtaggaggttttacttaccctccatcagcccaccccccaacattacctccatcagctcccttgcagttcttaacacatgatcctttgcatcaggaggtgtcctttggagtaccttatcctccatttatgcctcggaggcttacaggacgtagtagataccgatcccagcagccaataccacctcccccttatcatcccagcttactgccatatgtgttatcaatgcttccagtgccacctgcagtgggcccaactttcagctttgaattagatgtagaagatggagaagtagaaaattacgaggccctgttaaacctggcagagcgactgggagaggcaaagcctcgtggactgactaaagcagatattgaacaacttccttcttatcggttcaatcctaacaaccaccagtcagaacagactttgtgtgtagtatgcatgtgtgattttgagtcaaggcagctacttagagtcttaccctgtaaccacgagttccatgccaagtgtgttgacaaatggcttaaggcaaatcgtacttgcccaatttgccgagctgatgcttcagaagtgcatcgggattcagaatgaccaacctaagaagcacaaatttagtttgggtgttcctcatcacatgtatatacggactatccattgaacttaatctgtgtggcttccagccctccctttaccaaaagggtcaatggacctttctttgcactgtgtgacttaatcaactataaaagcttacaattagtcttcacagttatgggattgttatactaaccgtgtgattggaactccaaagactttttctttagcttaattttgtgtgtgcactaacattccctggtttttgtgtgatcattccgagtgttgctgcaagattacagtggacgtgatcttttagcatgtgcttttataaaaagtggtagctacagatgatatagcaatctaccttatatagagccttcagaaactgtgagtggaaatgaatgcgcagcgtatgactgttggtgataagtgtatctgtgtgagtgtgtgcaactacttgtgtgagggcatggtagctaacgtgtgtatgagatcctatataccagcatgtaccaagaatgtgtgtgtagttttaattatgctgcaatgtataatctggtgtgttatttaaacagcactagtactgtacactggtttttttcccttgtgtttgctgttgcacactgattgctgagggtgcatcaattacaagcattgaatactccatccccttccctcccagtgaatggaatgagaaaagccttcttcctttgcttcaggcagctgtcaccttctctttattggtggtcctaagtgggtcacttaagaaaaaaaagtgtaacaaattctcgctccatgaacctggtttttttttattctgttgtggaaatttttaaatctccaacttgctgtttccaaaaagaaggtgcaatatcatatatcatcagttagcaatattagcatttcaatcagtgatttgaatgttgatacttttttttcctttacatttccagtaagtttcttacagaaagtacctgtgattttttttaatgtttagatttgtagtctagtctattctgaagatatttgattaatatatttctaagaagaccactagtcccatgaagtctcaccttgttgacttccaccagaacaaaacctgttaattcagcttgacttctcatatgtgttctgtgttcaagctcctgtgggcaactcaattgttttaagaaaactctatttctgttcatattaattcacttgccagactccaattctgaaagttgtctagttcttccttcatcacacgtgcttctcatcgaaaccctggtttcaggatggatcaagtgctgttacagctcatgttccttagacctgatttgttttgatattttactgcctttccttttaatttttgtttgaatgagaaaagtttaatacaacaggtgtccagaatacttgcagtataaatgaagatttggtttttgtataaaaaaataatgctgttaaacaggagttgaccttcatttagttgatgtaatacatagctgtatggggttttttttagtaagttctttgagcataattcactttaaagtcatttttccagcaatgtttaaattactttctcattcttttagtgtattcaacattgtctgcctcttcctgcagttgatgtaattgctttgtttgcaatagcacaagctgcattattccagtcaggactgtgataacttgctgccagccccactcaactttcagttggctctgtgtcagttttccattcagtgttaactacttgttactgccatgctgcttgccctcccttgaagtgtctataagctcatcacagcctagagttaagtaaagtcaattcacagaagcacaattttgccctttgcgagacattgttgcctctatctagtcctacaagtagggttttgcatactgtgtttgcccctagggttgtcagtgcatcagaaatacttctaaatagtggtaaaaatgcacatggttaatgcacatgttacttttaaatcattaggatatccctcacctgttcctgatgaataaaaagtgtgttaaagaccaaaattcttggcataataatcagctacatacaaatcacatatagtttaatcttttttaatgaaaaaaaatcatgtttaaaatggcaaaagcccatcttatacacttttatatagctgcaaaaaatttcttaactcagctgtgggttttttgtgggttcttgtttgttttttggcatgaattgtcatctttggtgtttttttaacccccagcccctcaaaaaaataaggcctccaggtatcaagatctcatattaggattttctgtccttaattttttgagcaaaatctggaaaatgtgaaagcatatttagattttatatactatctgaaatgtgatttgttaagattcttaaatttgggcctcttagaataattttgaatgagatctaccgactcacttgtgagaatatttttcacagattatctttgggccttttcattagaaagctgtttgtttgtccccctgttggtacatttggttacctcattttgccgtttcagattgtgaaagctcacaggggtgttttttggaatcatttgctgagtcattttctcaaatcatattccattgtatcagttaacatatagttttaaatgtatgtattataaatatctgtaaccaaatcatttgaaggcttgataaatttttaacaaagtttgtacattttttatgaaagttactagtaatgctttactaagtagtgcaatgaatttttatttttaatccctgtgcccaattttggagttgagagggttgttggtaataaatgtatgatgtacacttaaaacatc

SEQ ID NO: 7706 - protein, 515 aa, Homo sapiens; identical to SEQ ID NO: 1077

SEQ ID NO: 7707 - DNA, 4414 bp, Homo sapiens
cggaacccggtcgaaagggtcctctctggcgtccttctgcttccgtgggtttctggataggctgcgttttgttctcaggggatgcaagttcttcctttcagggttgaagcgtgagagaggttggtttttgaaacgggagtgtttcaggttattgaggtccaaaaagaaataaagtttttgtttacgtctgtatggcttgtaagagtgaagatagtccaagtcctaagagacagcgcctctctcattcagtctttgattatacatcagcatcaccagctccctcaccaccaatgcgaccatgggagatgacatcaaataggcagcccccttcagttcgaccaagccaacatcacttctcaggggaacgatgcaacacacctgcacgcaacagaagaagtcctcctgtcaggcgccagagaggaagaagggatcgtctgtctcgacataattccattagtcaagatgaaaactatcaccatctcccttacgcacagcagcaagcaatagaggagcctcgagccttccaccctccgaatgtatctccccgtctgctacatcctgctgctcatccaccccagcagaatgcagtcatggttgacatacatgatcagctccatcaaggaacagtccctgtttcttacacagtaacaacagtggcaccacatgggattccactctgcacaggccagcacatccctgcttgtagtacacagcaggtcccaggatgctctgtggttttcagtggacagcacctccctgtctgtagtgtgcctcctccaatgcttcaggcatgttcagttcagcacttaccagtaccatatgctgcattcccaccccttatttctagtgatccatttcttatacatcctcctcacctttctccccatcatcctcctcatttgccaccaccaggccagtttgtccctttccaaacacagcaatcacgatcgcctctgcaaaggatagaaaatgaagtggaactcttaggagaacatcttccagtaggaggttttacttaccctccatcagcccaccccccaacattacctccatcagctcccttgcagttcttaacacatgatcctttgcatcaggaggtgtcctttggagtaccttatcctccatttatgcctcggaggcttacaggacgtagtagataccgatcccagcagccaataccacctcccccttatcatcccagcttactgccatatgtgttatcaatgcttccagtgccacctgcagtgggcccaactttcagctttgaattagatgtagaagatggagaagtagaaaattacgaggccctgttaaacctggcagagcgactgggagaggcaaagcctcgtggactgactaaagcagatattgaacaacttccttcttatcggttcaatcctaacaaccaccagtcagaacagactttgtgtgtagtatgcatgtgtgattttgagtcaaggcagctacttagagtcttaccctgtaaccacgagttccatgccaagtgtgttgacaaatggcttaaggcaaatcgtacttgcccaatttgccgagctgatgcttcagaagtgcatcgggattcagaatgaccaacctaagaagcacaaatttagtttgggtgttcctcatcacatgtatatacggactatccattgaacttaatctgtgtggcttccagccctccctttaccaaaagggtcaatggacctttctttgcactgtgtgacttaatcaactataaaagcttacaattagtcttcacagttatgggattgttatactaaccgtgtgattggaactccaaagactttttctttagcttaattttgtgtgtgcactaacattccctggtttttgtgtgatcattccgagtgttgctgcaagattacagtggacgtgatcttttagcatgtgcttttataaaaagtggtagctacagatgatatagcaatctaccttatatagagccttcagaaactgtgagtggaaatgaatgcgcagcgtatgactgttggtgataagtgtatctgtgtgagtgtgtgcaactacttgtgtgagggcatggtagctaacgtgtgtatgagatcctatataccagcatgtaccaagaatgtgtgtgtagttttaattatgctgcaatgtataatctggtgtgttatttaaacagcactagtactgtacactggtttttttcccttgtgtttgctgttgcacactgattgctgagggtgcatcaattacaagcattgaatactccatccccttccctcccagtgaatggaatgagaaaagccttcttcctttgcttcaggcagctgtcaccttctctttattggtggtcctaagtgggtcacttaagaaaaaaaagtgtaacaaattctcgctccatgaacctggtttttttttattctgttgtggaaatttttaaatctccaacttgctgtttccaaaaagaaggtgcaatatcatatatcatcagttagcaatattagcatttcaatcagtgatttgaatgttgatacttttttttcctttacatttccagtaagtttcttacagaaagtacctgtgattttttttaatgtttagatttgtagtctagtctattctgaagatatttgattaatatatttctaagaagaccactagtcccatgaagtctcaccttgttgacttccaccagaacaaaacctgttaattcagcttgacttctcatatgtgttctgtgttcaagctcctgtgggcaactcaattgttttaagaaaactctatttctgttcatattaattcacttgccagactccaattctgaaagttgtctagttcttccttcatcacacgtgcttctcatcgaaaccctggtttcaggatggatcaagtgctgttacagctcatgttccttagacctgatttgttttgatattttactgcctttccttttaatttttgtttgaatgagaaaagtttaatacaacaggtgtccagaatacttgcagtataaatgaagatttggtttttgtataaaaaaataatgctgttaaacaggagttgaccttcatttagttgatgtaatacatagctgtatggggttttttttagtaagttctttgagcataattcactttaaagtcatttttccagcaatgtttaaattactttctcattcttttagtgtattcaacattgtctgcctcttcctgcagttgatgtaattgctttgtttgcaatagcacaagctgcattattccagtcaggactgtgataacttgctgccagccccactcaactttcagttggctctgtgtcagttttccattcagtgttaactacttgttactgccatgctgcttgccctcccttgaagtgtctataagctcatcacagcctagagttaagtaaagtcaattcacagaagcacaattttgccctttgcgagacattgttgcctctatctagtcctacaagtagggttttgcatactgtgtttgcccctagggttgtcagtgcatcagaaatacttctaaatagtggtaaaaatgcacatggttaatgcacatgttacttttaaatcattaggatatccctcacctgttcctgatgaataaaaagtgtgttaaagaccaaaattcttggcataataatcagctacatacaaatcacatatagtttaatcttttttaatgaaaaaaaatcatgtttaaaatggcaaaagcccatcttatacacttttatatagctgcaaaaaatttcttaactcagctgtgggttttttgtgggttcttgtttgttttttggcatgaattgtcatctttggtgtttttttaacccccagcccctcaaaaaaataaggcctccaggtatcaagatctcatattaggattttctgtccttaattttttgagcaaaatctggaaaatgtgaaagcatatttagattttatatactatctgaaatgtgatttgttaagattcttaaatttgggcctcttagaataattttgaatgagatctaccgactcacttgtgagaatatttttcacagattatctttgggccttttcattagaaagctgtttgtttgtccccctgttggtacatttggttacctcattttgccgtttcagattgtgaaagctcacaggggtgttttttggaatcatttgctgagtcattttctcaaatcatattccattgtatcagttaacatatagttttaaatgtatgtattataaatatctgtaaccaaatcatttgaaggcttgataaatttttaacaaagtttgtacattttttatgaaagttactagtaatgctttactaagtagtgcaatgaatttttatttttaatccctgtgcccaattttggagttgagagggttgttggtaataaatgtatgatgtacacttaaaacatc

SEQ ID NO: 7708 - protein, 465 aa, Homo sapiens; identical to SEQ ID NO: 1081

SEQ ID NO: 7709 - DNA, 5176 bp, Homo sapiens
ccgggccgggcccctagtgcggtgttgcgggacggggccgaggcccggtcggttggggcgtgggggcggagaggatggagcctccgaggcgttaggcgactctgtcatctctgggcgtgcagccgtcgtttcctggcgcggcccgtgtgatggtgccgggaggaaggaagcgcagtgacagtgcctaagttggagccggggttccgggggtgaggaggcccgcggacggcggatctggcgagctggccgcgggctgggcgagcagtcacaataggaggcggcggcccagcgaggatccgcgggagctgcccggcagggcggagcctcccctcgcagagtgaagatagtccaagtcctaagagacagcgcctctctcattcagtctttgattatacatcagcatcaccagctccctcaccaccaatgcgaccatgggagatgacatcaaataggcagcccccttcagttcgaccaagccaacatcacttctcaggggaacgatgcaacacacctgcacgcaacagaagaaggttacctataagcatattgccagattttctcccagaaacaggctgtgccaagcagatgcagtttttaacaataatctagcaggatttcagttacagagtcctcctgtcaggcgccagagaggaagaagggatcgtctgtctcgacataattccattagtcaagatgaaaactatcaccatctcccttacgcacagcagcaagcaatagaggagcctcgagccttccaccctccgaatgtatctccccgtctgctacatcctgctgctcatccaccccagcagaatgcagtcatggttgacatacatgatcagctccatcaaggaacagtccctgtttcttacacagtaacaacagtggcaccacatgggattccactctgcacaggccagcacatccctgcttgtagtacacagcaggtcccaggatgctctgtggttttcagtggacagcacctccctgtctgtagtgtgcctcctccaatgcttcaggcatgttcagttcagcacttaccagtaccatatgctgcattcccaccccttatttctagtgatccatttcttatacatcctcctcacctttctccccatcatcctcctcatttgccaccaccaggccagtttgtccctttccaaacacagcaatcacgatcgcctctgcaaaggatagaaaatgaagtggaactcttaggagaacatcttccagtaggaggttttacttaccctccatcagcccaccccccaacattacctccatcagctcccttgcagttcttaacacatgatcctttgcatcaggaggtgtcctttggagtaccttatcctccatttatgcctcggaggcttacaggacgtagtagataccgatcccagcagccaataccacctcccccttatcatcccagcttactgccatatgtgttatcaatgcttccagtgccacctgcagtgggcccaactttcagctttgaattagatgtagaagatggagaagtagaaaattacgaggccctgttaaacctggcagagcgactgggagaggcaaagcctcgtggactgactaaagcagatattgaacaacttccttcttatcggttcaatcctaacaaccaccagtcagaacagactttgtgtgtagtatgcatgtgtgattttgagtcaaggcagctacttagagtcttaccctgtaaccacgagttccatgccaagtgtgttgacaaatggcttaaggcaaatcgtacttgcccaatttgccgagctgatgcttcagaagtgcatcgggattcagaatgaccaacctaagaagcacaaatttagtttgggtgttcctcatcacatgtatatacggactatccattgaacttaatctgtgtggcttccagccctccctttaccaaaagggtcaatggacctttctttgcactgtgtgacttaatcaactataaaagcttacaattagtcttcacagttatgggattgttatactaaccgtgtgattggaactccaaagactttttctttagcttaattttgtgtgtgcactaacattccctggtttttgtgtgatcattccgagtgttgctgcaagattacagtggacgtgatcttttagcatgtgcttttataaaaagtggtagctacagatgatatagcaatctaccttatatagagccttcagaaactgtgagtggaaatgaatgcgcagcgtatgactgttggtgataagtgtatctgtgtgagtgtgtgcaactacttgtgtgagggcatggtagctaacgtgtgtatgagatcctatataccagcatgtaccaagaatgtgtgtgtagttttaattatgctgcaatgtataatctggtgtgttatttaaacagcactagtactgtacactggtttttttcccttgtgtttgctgttgcacactgattgctgagggtgcatcaattacaagcattgaatactccatccccttccctcccagtgaatggaatgagaaaagccttcttcctttgcttcaggcagctgtcaccttctctttattggtggtcctaagtgggtcacttaagaaaaaaaagtgtaacaaattctcgctccatgaacctggtttttttttattctgttgtggaaatttttaaatctccaacttgctgtttccaaaaagaaggtgcaatatcatatatcatcagttagcaatattagcatttcaatcagtgatttgaatgttgatacttttttttcctttacatttccagtaagtttcttacagaaagtacctgtgattttttttaatgtttagatttgtagtctagtctattctgaagatatttgattaatatatttctaagaagaccactagtcccatgaagtctcaccttgttgacttccaccagaacaaaacctgttaattcagcttgacttctcatatgtgttctgtgttcaagctcctgtgggcaactcaattgttttaagaaaactctatttctgttcatattaattcacttgccagactccaattctgaaagttgtctagttcttccttcatcacacgtgcttctcatcgaaaccctggtttcaggatggatcaagtgctgttacagctcatgttccttagacctgatttgttttgatattttactgcctttccttttaatttttgtttgaatgagaaaagtttaatacaacaggtgtccagaatacttgcagtataaatgaagatttggtttttgtataaaaaaataatgctgttaaacaggagttgaccttcatttagttgatgtaatacatagctgtatggggttttttttagtaagttctttgagcataattcactttaaagtcatttttccagcaatgtttaaattactttctcattcttttagtgtattcaacattgtctgcctcttcctgcagttgatgtaattgctttgtttgcaatagcacaagctgcattattccagtcaggactgtgataacttgctgccagccccactcaactttcagttggctctgtgtcagttttccattcagtgttaactacttgttactgccatgctgcttgccctcccttgaagtgtctataagctcatcacagcctagagttaagtaaagtcaattcacagaagcacaattttgccctttgcgagacattgttgcctctatctagtcctacaagtagggttttgcatactgtgtttgcccctagggttgtcagtgcatcagaaatacttctaaatagtggtaaaaatgcacatggttaatgcacatgttacttttaaatcattaggatatccctcacctgttcctgatgaataaaaagtgtgttaaagaccaaaattcttggcataataatcagctacatacaaatcacatatagtttaatcttttttaatgaaaaaaaatcatgtttaaaatggcaaaagcccatcttatacacttttatatagctgcaaaaaatttatatctgtacagatctaacactacgacactcagtattcattttattgaagcatgcaagtaaagcactttttctaatttatatagaggtatctaattaacacagcacattgtactaatgactaggagtagcagctttttcttctctccctctatgaattcttataatgtccctttttctgtaagtttttgagaggcaattggcaatttaggaggcagcagggtctgttttggtcaaatcttgaatttcgttgttgcactctagtgactgatctttgggaatgtcttgtctttgcatggggctcatagagatgtgtgcagacttgcttattgtggttagtgtgtatcaggaacacacacacaggtgttctgaccagctcaggcttgccacagtgagcaactctgtggctagcaaaagagaagtttatttgtgcccagccattggtcaccttgggtgatgcaccagatagcaggcagatgttggttcattggccttcgtcctctttcctcctaaaataatattggctttaccatcttaactcagctgtgggttttttgtgggttcttgtttgttttttggcatgaattgtcatctttggtgtttttttaacccccagcccctcaaaaaaataaggcctccaggtatcaagatctcatattaggattttctgtccttaattttttgagcaaaatctggaaaatgtgaaagcatatttagattttatatactatctgaaatgtgatttgttaagattcttaaatttgggcctcttagaataattttgaatgagatctaccgactcacttgtgagaatatttttcacagattatctttgggccttttcattagaaagctgtttgtttgtccccctgttggtacatttggttacctcattttgccgtttcagattgtgaaagctcacaggggtgttttttggaatcatttgctgagtcattttctcaaatcatattccattgtatcagttaacatatagttttaaatgtatgtattataaatatctgtaaccaaatcatttgaaggcttgataaatttttaacaaagtttgtacattttttatgaaagttactagtaatgctttactaagtagtgcaatgaatttttatttttaatccctgtgcccaattttggagttgagagggttgttggtaataaatgtatgatgtacacttaaaacatc

SEQ ID NO: 7710 - protein, 439 aa, Homo sapiens
MQHTCTQQKKVTYKHIARFSPRNRLCQADAVFNNNLAGFQLQSPPVRRQRGRRDRLSRHNSISQDENYHHLPYAQQQAIEEPRAFHPPNVSPRLLHPAAHPPQQNAVMVDIHDQLHQGTVPVSYTVTTVAPHGIPLCTGQHIPACSTQQVPGCSVVFSGQHLPVCSVPPPMLQACSVQHLPVPYAAFPPLISSDPFLIHPPHLSPHHPPHLPPPGQFVPFQTQQSRSPLQRIENEVELLGEHLPVGGFTYPPSAHPPTLPPSAPLQFLTHDPLHQEVSFGVPYPPFMPRRLTGRSRYRSQQPIPPPPYHPSLLPYVLSMLPVPPAVGPTFSFELDVEDGEVENYEALLNLAERLGEAKPRGLTKADIEQLPSYRFNPNNHQSEQTLCVVCMCDFESRQLLRVLPCNHEFHAKCVDKWLKANRTCPICRADASEVHRDSE

SEQ ID NO: 7711 - DNA, 4731 bp, Homo sapiens
gcggcggggcgcggcggggcggggaggggcgtggccgggccgggcccctagtgcggtgttgcgggacggggccgaggcccggtcggttggggcgtgggggcggagaggatggagcctccgaggcgttaggcgactctgtcatctctgggcgtgcagccgtcgtttcctggcgcggcccgtgtgatggtgccgggaggaaggaagcgcagtgacagtgcctaagttggagccggggttccgggggtgaggaggcccgcggacggcggatctggcgagctggccgcgggctgggcgagcagtcacaataggaggcggcggcccagcgaggatccgcgggagctgcccggcagggcggagcctcccctcgcagatatctcccggggccaattcagcatctctacctggccatcctaacaaggtgatttgtgaaagggtgagacttcagagcctgttccctctcctcccaagtgatcagaacactaccgttcaagaggatgctcacttcaaagctttcttccagagtgaagatagtccaagtcctaagagacagcgcctctctcattcagtctttgattatacatcagcatcaccagctccctcaccaccaatgcgaccatgggagatgacatcaaataggcagcccccttcagttcgaccaagccaacatcacttctcaggggaacgatgcaacacacctgcacgcaacagaagaagtcctcctgtcaggcgccagagaggaagaagggatcgtctgtctcgacataattccattagtcaagatgaaaactatcaccatctcccttacgcacagcagcaagcaatagaggagcctcgagccttccaccctccgaatgtatctccccgtctgctacatcctgctgctcatccaccccagcagaatgcagtcatggttgacatacatgatcagctccatcaaggaacagtccctgtttcttacacagtaacaacagtggcaccacatgggattccactctgcacaggccagcacatccctgcttgtagtacacagcaggtcccaggatgctctgtggttttcagtggacagcacctccctgtctgtagtgtgcctcctccaatgcttcaggcatgttcagttcagcacttaccagtaccatatgctgcattcccaccccttatttctagtgatccatttcttatacatcctcctcacctttctccccatcatcctcctcatttgccaccaccaggccagtttgtccctttccaaacacagcaatcacgatcgcctctgcaaaggatagaaaatgaagtggaactcttaggagaacatcttccagtaggaggttttacttaccctccatcagcccaccccccaacattacctccatcagctcccttgcagttcttaacacatgatcctttgcatcaggaggtgtcctttggagtaccttatcctccatttatgcctcggaggcttacaggacgtagtagataccgatcccagcagccaataccacctcccccttatcatcccagcttactgccatatgtgttatcaatgcttccagtgccacctgcagtgggcccaactttcagctttgaattagatgtagaagatggagaagtagaaaattacgaggccctgttaaacctggcagagcgactgggagaggcaaagcctcgtggactgactaaagcagatattgaacaacttccttcttatcggttcaatcctaacaaccaccagtcagaacagactttgtgtgtagtatgcatgtgtgattttgagtcaaggcagctacttagagtcttaccctgtaaccacgagttccatgccaagtgtgttgacaaatggcttaaggcaaatcgtacttgcccaatttgccgagctgatgcttcagaagtgcatcgggattcagaatgaccaacctaagaagcacaaatttagtttgggtgttcctcatcacatgtatatacggactatccattgaacttaatctgtgtggcttccagccctccctttaccaaaagggtcaatggacctttctttgcactgtgtgacttaatcaactataaaagcttacaattagtcttcacagttatgggattgttatactaaccgtgtgattggaactccaaagactttttctttagcttaattttgtgtgtgcactaacattccctggtttttgtgtgatcattccgagtgttgctgcaagattacagtggacgtgatcttttagcatgtgcttttataaaaagtggtagctacagatgatatagcaatctaccttatatagagccttcagaaactgtgagtggaaatgaatgcgcagcgtatgactgttggtgataagtgtatctgtgtgagtgtgtgcaactacttgtgtgagggcatggtagctaacgtgtgtatgagatcctatataccagcatgtaccaagaatgtgtgtgtagttttaattatgctgcaatgtataatctggtgtgttatttaaacagcactagtactgtacactggtttttttcccttgtgtttgctgttgcacactgattgctgagggtgcatcaattacaagcattgaatactccatccccttccctcccagtgaatggaatgagaaaagccttcttcctttgcttcaggcagctgtcaccttctctttattggtggtcctaagtgggtcacttaagaaaaaaaagtgtaacaaattctcgctccatgaacctggtttttttttattctgttgtggaaatttttaaatctccaacttgctgtttccaaaaagaaggtgcaatatcatatatcatcagttagcaatattagcatttcaatcagtgatttgaatgttgatacttttttttcctttacatttccagtaagtttcttacagaaagtacctgtgattttttttaatgtttagatttgtagtctagtctattctgaagatatttgattaatatatttctaagaagaccactagtcccatgaagtctcaccttgttgacttccaccagaacaaaacctgttaattcagcttgacttctcatatgtgttctgtgttcaagctcctgtgggcaactcaattgttttaagaaaactctatttctgttcatattaattcacttgccagactccaattctgaaagttgtctagttcttccttcatcacacgtgcttctcatcgaaaccctggtttcaggatggatcaagtgctgttacagctcatgttccttagacctgatttgttttgatattttactgcctttccttttaatttttgtttgaatgagaaaagtttaatacaacaggtgtccagaatacttgcagtataaatgaagatttggtttttgtataaaaaaataatgctgttaaacaggagttgaccttcatttagttgatgtaatacatagctgtatggggttttttttagtaagttctttgagcataattcactttaaagtcatttttccagcaatgtttaaattactttctcattcttttagtgtattcaacattgtctgcctcttcctgcagttgatgtaattgctttgtttgcaatagcacaagctgcattattccagtcaggactgtgataacttgctgccagccccactcaactttcagttggctctgtgtcagttttccattcagtgttaactacttgttactgccatgctgcttgccctcccttgaagtgtctataagctcatcacagcctagagttaagtaaagtcaattcacagaagcacaattttgccctttgcgagacattgttgcctctatctagtcctacaagtagggttttgcatactgtgtttgcccctagggttgtcagtgcatcagaaatacttctaaatagtggtaaaaatgcacatggttaatgcacatgttacttttaaatcattaggatatccctcacctgttcctgatgaataaaaagtgtgttaaagaccaaaattcttggcataataatcagctacatacaaatcacatatagtttaatcttttttaatgaaaaaaaatcatgtttaaaatggcaaaagcccatcttatacacttttatatagctgcaaaaaatttcttaactcagctgtgggttttttgtgggttcttgtttgttttttggcatgaattgtcatctttggtgtttttttaacccccagcccctcaaaaaaataaggcctccaggtatcaagatctcatattaggattttctgtccttaattttttgagcaaaatctggaaaatgtgaaagcatatttagattttatatactatctgaaatgtgatttgttaagattcttaaatttgggcctcttagaataattttgaatgagatctaccgactcacttgtgagaatatttttcacagattatctttgggccttttcattagaaagctgtttgtttgtccccctgttggtacatttggttacctcattttgccgtttcagattgtgaaagctcacaggggtgttttttggaatcatttgctgagtcattttctcaaatcatattccattgtatcagttaacatatagttttaaatgtatgtattataaatatctgtaaccaaatcatttgaaggcttgataaatttttaacaaagtttgtacattttttatgaaagttactagtaatgctttactaagtagtgcaatgaatttttatttttaatccctgtgcccaattttggagttgagagggttgttggtaataaatgtatgatgtacacttaaaacatc

SEQ ID NO: 7712 - protein, 432 aa, Homo sapiens; identical to SEQ ID NO: 1079

SEQ ID NO: 7713 - DNA, 4601 bp, Homo sapiens
gaggcggggtgaggcggggtgcggcggggcgcggcggggcggggaggggcgtggccgggccgggcccctagtgcggtgttgcgggacggggccgaggcccggtcggttggggcgtgggggcggagaggatggagcctccgaggcgttaggcgactctgtcatctctgggcgtgcagccgtcgtttcctggcgcggcccgtgtgatggtgccgggaggaaggaagcgcagtgacagtgcctaagttggagccggggttccgggggtgaggaggcccgcggacggcggatctggcgagctggccgcgggctgggcgagcagtcacaataggaggcggcggcccagcgaggatccgcgggagctgcccggcagggcggagcctcccctcgcagagtgaagatagtccaagtcctaagagacagcgcctctctcattcagtctttgattatacatcagcatcaccagctccctcaccaccaatgcgaccatgggagatgacatcaaataggcagcccccttcagttcgaccaagccaacatcacttctcaggggaacgatgcaacacacctgcacgcaacagaagaagtcctcctgtcaggcgccagagaggaagaagggatcgtctgtctcgacataattccattagtcaagatgaaaactatcaccatctcccttacgcacagcagcaagcaatagaggagcctcgagccttccaccctccgaatgtatctccccgtctgctacatcctgctgctcatccaccccagcagaatgcagtcatggttgacatacatgatcagctccatcaaggaacagtccctgtttcttacacagtaacaacagtggcaccacatgggattccactctgcacaggccagcacatccctgcttgtagtacacagcaggtcccaggatgctctgtggttttcagtggacagcacctccctgtctgtagtgtgcctcctccaatgcttcaggcatgttcagttcagcacttaccagtaccatatgctgcattcccaccccttatttctagtgatccatttcttatacatcctcctcacctttctccccatcatcctcctcatttgccaccaccaggccagtttgtccctttccaaacacagcaatcacgatcgcctctgcaaaggatagaaaatgaagtggaactcttaggagaacatcttccagtaggaggttttacttaccctccatcagcccaccccccaacattacctccatcagctcccttgcagttcttaacacatgatcctttgcatcaggaggtgtcctttggagtaccttatcctccatttatgcctcggaggcttacaggacgtagtagataccgatcccagcagccaataccacctcccccttatcatcccagcttactgccatatgtgttatcaatgcttccagtgccacctgcagtgggcccaactttcagctttgaattagatgtagaagatggagaagtagaaaattacgaggccctgttaaacctggcagagcgactgggagaggcaaagcctcgtggactgactaaagcagatattgaacaacttccttcttatcggttcaatcctaacaaccaccagtcagaacagactttgtgtgtagtatgcatgtgtgattttgagtcaaggcagctacttagagtcttaccctgtaaccacgagttccatgccaagtgtgttgacaaatggcttaaggcaaatcgtacttgcccaatttgccgagctgatgcttcagaagtgcatcgggattcagaatgaccaacctaagaagcacaaatttagtttgggtgttcctcatcacatgtatatacggactatccattgaacttaatctgtgtggcttccagccctccctttaccaaaagggtcaatggacctttctttgcactgtgtgacttaatcaactataaaagcttacaattagtcttcacagttatgggattgttatactaaccgtgtgattggaactccaaagactttttctttagcttaattttgtgtgtgcactaacattccctggtttttgtgtgatcattccgagtgttgctgcaagattacagtggacgtgatcttttagcatgtgcttttataaaaagtggtagctacagatgatatagcaatctaccttatatagagccttcagaaactgtgagtggaaatgaatgcgcagcgtatgactgttggtgataagtgtatctgtgtgagtgtgtgcaactacttgtgtgagggcatggtagctaacgtgtgtatgagatcctatataccagcatgtaccaagaatgtgtgtgtagttttaattatgctgcaatgtataatctggtgtgttatttaaacagcactagtactgtacactggtttttttcccttgtgtttgctgttgcacactgattgctgagggtgcatcaattacaagcattgaatactccatccccttccctcccagtgaatggaatgagaaaagccttcttcctttgcttcaggcagctgtcaccttctctttattggtggtcctaagtgggtcacttaagaaaaaaaagtgtaacaaattctcgctccatgaacctggtttttttttattctgttgtggaaatttttaaatctccaacttgctgtttccaaaaagaaggtgcaatatcatatatcatcagttagcaatattagcatttcaatcagtgatttgaatgttgatacttttttttcctttacatttccagtaagtttcttacagaaagtacctgtgattttttttaatgtttagatttgtagtctagtctattctgaagatatttgattaatatatttctaagaagaccactagtcccatgaagtctcaccttgttgacttccaccagaacaaaacctgttaattcagcttgacttctcatatgtgttctgtgttcaagctcctgtgggcaactcaattgttttaagaaaactctatttctgttcatattaattcacttgccagactccaattctgaaagttgtctagttcttccttcatcacacgtgcttctcatcgaaaccctggtttcaggatggatcaagtgctgttacagctcatgttccttagacctgatttgttttgatattttactgcctttccttttaatttttgtttgaatgagaaaagtttaatacaacaggtgtccagaatacttgcagtataaatgaagatttggtttttgtataaaaaaataatgctgttaaacaggagttgaccttcatttagttgatgtaatacatagctgtatggggttttttttagtaagttctttgagcataattcactttaaagtcatttttccagcaatgtttaaattactttctcattcttttagtgtattcaacattgtctgcctcttcctgcagttgatgtaattgctttgtttgcaatagcacaagctgcattattccagtcaggactgtgataacttgctgccagccccactcaactttcagttggctctgtgtcagttttccattcagtgttaactacttgttactgccatgctgcttgccctcccttgaagtgtctataagctcatcacagcctagagttaagtaaagtcaattcacagaagcacaattttgccctttgcgagacattgttgcctctatctagtcctacaagtagggttttgcatactgtgtttgcccctagggttgtcagtgcatcagaaatacttctaaatagtggtaaaaatgcacatggttaatgcacatgttacttttaaatcattaggatatccctcacctgttcctgatgaataaaaagtgtgttaaagaccaaaattcttggcataataatcagctacatacaaatcacatatagtttaatcttttttaatgaaaaaaaatcatgtttaaaatggcaaaagcccatcttatacacttttatatagctgcaaaaaatttcttaactcagctgtgggttttttgtgggttcttgtttgttttttggcatgaattgtcatctttggtgtttttttaacccccagcccctcaaaaaaataaggcctccaggtatcaagatctcatattaggattttctgtccttaattttttgagcaaaatctggaaaatgtgaaagcatatttagattttatatactatctgaaatgtgatttgttaagattcttaaatttgggcctcttagaataattttgaatgagatctaccgactcacttgtgagaatatttttcacagattatctttgggccttttcattagaaagctgtttgtttgtccccctgttggtacatttggttacctcattttgccgtttcagattgtgaaagctcacaggggtgttttttggaatcatttgctgagtcattttctcaaatcatattccattgtatcagttaacatatagttttaaatgtatgtattataaatatctgtaaccaaatcatttgaaggcttgataaatttttaacaaagtttgtacattttttatgaaagttactagtaatgctttactaagtagtgcaatgaatttttatttttaatccctgtgcccaattttggagttgagagggttgttggtaataaatgtatgatgtacacttaaaacatc

SEQ ID NO: 7714 - protein, 432 aa, Homo sapiens; identical to SEQ ID NO: 1079

SEQ ID NO: 7715 - DNA, 4462 bp, Homo sapiens
cttccccctcggggtggaaacaaagggggttcggcgcgcggtgcggagcctgggggaaaagggaggagcgctccggtggtctggcgcgctgggctcgctagatatctcccggggccaattcagcatctctacctggccatcctaacaaggtgatttgtgaaagggtgagacttcagagcctgttccctctcctcccaagtgatcagaacactaccgttcaagaggatgctcacttcaaagctttcttccagagtgaagatagtccaagtcctaagagacagcgcctctctcattcagtctttgattatacatcagcatcaccagctccctcaccaccaatgcgaccatgggagatgacatcaaataggcagcccccttcagttcgaccaagccaacatcacttctcaggggaacgatgcaacacacctgcacgcaacagaagaagtcctcctgtcaggcgccagagaggaagaagggatcgtctgtctcgacataattccattagtcaagatgaaaactatcaccatctcccttacgcacagcagcaagcaatagaggagcctcgagccttccaccctccgaatgtatctccccgtctgctacatcctgctgctcatccaccccagcagaatgcagtcatggttgacatacatgatcagctccatcaaggaacagtccctgtttcttacacagtaacaacagtggcaccacatgggattccactctgcacaggccagcacatccctgcttgtagtacacagcaggtcccaggatgctctgtggttttcagtggacagcacctccctgtctgtagtgtgcctcctccaatgcttcaggcatgttcagttcagcacttaccagtaccatatgctgcattcccaccccttatttctagtgatccatttcttatacatcctcctcacctttctccccatcatcctcctcatttgccaccaccaggccagtttgtccctttccaaacacagcaatcacgatcgcctctgcaaaggatagaaaatgaagtggaactcttaggagaacatcttccagtaggaggttttacttaccctccatcagcccaccccccaacattacctccatcagctcccttgcagttcttaacacatgatcctttgcatcaggaggtgtcctttggagtaccttatcctccatttatgcctcggaggcttacaggacgtagtagataccgatcccagcagccaataccacctcccccttatcatcccagcttactgccatatgtgttatcaatgcttccagtgccacctgcagtgggcccaactttcagctttgaattagatgtagaagatggagaagtagaaaattacgaggccctgttaaacctggcagagcgactgggagaggcaaagcctcgtggactgactaaagcagatattgaacaacttccttcttatcggttcaatcctaacaaccaccagtcagaacagactttgtgtgtagtatgcatgtgtgattttgagtcaaggcagctacttagagtcttaccctgtaaccacgagttccatgccaagtgtgttgacaaatggcttaaggcaaatcgtacttgcccaatttgccgagctgatgcttcagaagtgcatcgggattcagaatgaccaacctaagaagcacaaatttagtttgggtgttcctcatcacatgtatatacggactatccattgaacttaatctgtgtggcttccagccctccctttaccaaaagggtcaatggacctttctttgcactgtgtgacttaatcaactataaaagcttacaattagtcttcacagttatgggattgttatactaaccgtgtgattggaactccaaagactttttctttagcttaattttgtgtgtgcactaacattccctggtttttgtgtgatcattccgagtgttgctgcaagattacagtggacgtgatcttttagcatgtgcttttataaaaagtggtagctacagatgatatagcaatctaccttatatagagccttcagaaactgtgagtggaaatgaatgcgcagcgtatgactgttggtgataagtgtatctgtgtgagtgtgtgcaactacttgtgtgagggcatggtagctaacgtgtgtatgagatcctatataccagcatgtaccaagaatgtgtgtgtagttttaattatgctgcaatgtataatctggtgtgttatttaaacagcactagtactgtacactggtttttttcccttgtgtttgctgttgcacactgattgctgagggtgcatcaattacaagcattgaatactccatccccttccctcccagtgaatggaatgagaaaagccttcttcctttgcttcaggcagctgtcaccttctctttattggtggtcctaagtgggtcacttaagaaaaaaaagtgtaacaaattctcgctccatgaacctggtttttttttattctgttgtggaaatttttaaatctccaacttgctgtttccaaaaagaaggtgcaatatcatatatcatcagttagcaatattagcatttcaatcagtgatttgaatgttgatacttttttttcctttacatttccagtaagtttcttacagaaagtacctgtgattttttttaatgtttagatttgtagtctagtctattctgaagatatttgattaatatatttctaagaagaccactagtcccatgaagtctcaccttgttgacttccaccagaacaaaacctgttaattcagcttgacttctcatatgtgttctgtgttcaagctcctgtgggcaactcaattgttttaagaaaactctatttctgttcatattaattcacttgccagactccaattctgaaagttgtctagttcttccttcatcacacgtgcttctcatcgaaaccctggtttcaggatggatcaagtgctgttacagctcatgttccttagacctgatttgttttgatattttactgcctttccttttaatttttgtttgaatgagaaaagtttaatacaacaggtgtccagaatacttgcagtataaatgaagatttggtttttgtataaaaaaataatgctgttaaacaggagttgaccttcatttagttgatgtaatacatagctgtatggggttttttttagtaagttctttgagcataattcactttaaagtcatttttccagcaatgtttaaattactttctcattcttttagtgtattcaacattgtctgcctcttcctgcagttgatgtaattgctttgtttgcaatagcacaagctgcattattccagtcaggactgtgataacttgctgccagccccactcaactttcagttggctctgtgtcagttttccattcagtgttaactacttgttactgccatgctgcttgccctcccttgaagtgtctataagctcatcacagcctagagttaagtaaagtcaattcacagaagcacaattttgccctttgcgagacattgttgcctctatctagtcctacaagtagggttttgcatactgtgtttgcccctagggttgtcagtgcatcagaaatacttctaaatagtggtaaaaatgcacatggttaatgcacatgttacttttaaatcattaggatatccctcacctgttcctgatgaataaaaagtgtgttaaagaccaaaattcttggcataataatcagctacatacaaatcacatatagtttaatcttttttaatgaaaaaaaatcatgtttaaaatggcaaaagcccatcttatacacttttatatagctgcaaaaaatttcttaactcagctgtgggttttttgtgggttcttgtttgttttttggcatgaattgtcatctttggtgtttttttaacccccagcccctcaaaaaaataaggcctccaggtatcaagatctcatattaggattttctgtccttaattttttgagcaaaatctggaaaatgtgaaagcatatttagattttatatactatctgaaatgtgatttgttaagattcttaaatttgggcctcttagaataattttgaatgagatctaccgactcacttgtgagaatatttttcacagattatctttgggccttttcattagaaagctgtttgtttgtccccctgttggtacatttggttacctcattttgccgtttcagattgtgaaagctcacaggggtgttttttggaatcatttgctgagtcattttctcaaatcatattccattgtatcagttaacatatagttttaaatgtatgtattataaatatctgtaaccaaatcatttgaaggcttgataaatttttaacaaagtttgtacattttttatgaaagttactagtaatgctttactaagtagtgcaatgaatttttatttttaatccctgtgcccaattttggagttgagagggttgttggtaataaatgtatgatgtacacttaaaacatc

SEQ ID NO: 7716 - protein, 432 aa, Homo sapiens; identical to SEQ ID NO: 1079

SEQ ID NO: 7717 - DNA, 4312 bp, Homo sapiens
cttccccctcggggtggaaacaaagggggttcggcgcgcggtgcggagcctgggggaaaagggaggagcgctccggtggtctggcgcgctgggctcgctagagtgaagatagtccaagtcctaagagacagcgcctctctcattcagtctttgattatacatcagcatcaccagctccctcaccaccaatgcgaccatgggagatgacatcaaataggcagcccccttcagttcgaccaagccaacatcacttctcaggggaacgatgcaacacacctgcacgcaacagaagaagtcctcctgtcaggcgccagagaggaagaagggatcgtctgtctcgacataattccattagtcaagatgaaaactatcaccatctcccttacgcacagcagcaagcaatagaggagcctcgagccttccaccctccgaatgtatctccccgtctgctacatcctgctgctcatccaccccagcagaatgcagtcatggttgacatacatgatcagctccatcaaggaacagtccctgtttcttacacagtaacaacagtggcaccacatgggattccactctgcacaggccagcacatccctgcttgtagtacacagcaggtcccaggatgctctgtggttttcagtggacagcacctccctgtctgtagtgtgcctcctccaatgcttcaggcatgttcagttcagcacttaccagtaccatatgctgcattcccaccccttatttctagtgatccatttcttatacatcctcctcacctttctccccatcatcctcctcatttgccaccaccaggccagtttgtccctttccaaacacagcaatcacgatcgcctctgcaaaggatagaaaatgaagtggaactcttaggagaacatcttccagtaggaggttttacttaccctccatcagcccaccccccaacattacctccatcagctcccttgcagttcttaacacatgatcctttgcatcaggaggtgtcctttggagtaccttatcctccatttatgcctcggaggcttacaggacgtagtagataccgatcccagcagccaataccacctcccccttatcatcccagcttactgccatatgtgttatcaatgcttccagtgccacctgcagtgggcccaactttcagctttgaattagatgtagaagatggagaagtagaaaattacgaggccctgttaaacctggcagagcgactgggagaggcaaagcctcgtggactgactaaagcagatattgaacaacttccttcttatcggttcaatcctaacaaccaccagtcagaacagactttgtgtgtagtatgcatgtgtgattttgagtcaaggcagctacttagagtcttaccctgtaaccacgagttccatgccaagtgtgttgacaaatggcttaaggcaaatcgtacttgcccaatttgccgagctgatgcttcagaagtgcatcgggattcagaatgaccaacctaagaagcacaaatttagtttgggtgttcctcatcacatgtatatacggactatccattgaacttaatctgtgtggcttccagccctccctttaccaaaagggtcaatggacctttctttgcactgtgtgacttaatcaactataaaagcttacaattagtcttcacagttatgggattgttatactaaccgtgtgattggaactccaaagactttttctttagcttaattttgtgtgtgcactaacattccctggtttttgtgtgatcattccgagtgttgctgcaagattacagtggacgtgatcttttagcatgtgcttttataaaaagtggtagctacagatgatatagcaatctaccttatatagagccttcagaaactgtgagtggaaatgaatgcgcagcgtatgactgttggtgataagtgtatctgtgtgagtgtgtgcaactacttgtgtgagggcatggtagctaacgtgtgtatgagatcctatataccagcatgtaccaagaatgtgtgtgtagttttaattatgctgcaatgtataatctggtgtgttatttaaacagcactagtactgtacactggtttttttcccttgtgtttgctgttgcacactgattgctgagggtgcatcaattacaagcattgaatactccatccccttccctcccagtgaatggaatgagaaaagccttcttcctttgcttcaggcagctgtcaccttctctttattggtggtcctaagtgggtcacttaagaaaaaaaagtgtaacaaattctcgctccatgaacctggtttttttttattctgttgtggaaatttttaaatctccaacttgctgtttccaaaaagaaggtgcaatatcatatatcatcagttagcaatattagcatttcaatcagtgatttgaatgttgatacttttttttcctttacatttccagtaagtttcttacagaaagtacctgtgattttttttaatgtttagatttgtagtctagtctattctgaagatatttgattaatatatttctaagaagaccactagtcccatgaagtctcaccttgttgacttccaccagaacaaaacctgttaattcagcttgacttctcatatgtgttctgtgttcaagctcctgtgggcaactcaattgttttaagaaaactctatttctgttcatattaattcacttgccagactccaattctgaaagttgtctagttcttccttcatcacacgtgcttctcatcgaaaccctggtttcaggatggatcaagtgctgttacagctcatgttccttagacctgatttgttttgatattttactgcctttccttttaatttttgtttgaatgagaaaagtttaatacaacaggtgtccagaatacttgcagtataaatgaagatttggtttttgtataaaaaaataatgctgttaaacaggagttgaccttcatttagttgatgtaatacatagctgtatggggttttttttagtaagttctttgagcataattcactttaaagtcatttttccagcaatgtttaaattactttctcattcttttagtgtattcaacattgtctgcctcttcctgcagttgatgtaattgctttgtttgcaatagcacaagctgcattattccagtcaggactgtgataacttgctgccagccccactcaactttcagttggctctgtgtcagttttccattcagtgttaactacttgttactgccatgctgcttgccctcccttgaagtgtctataagctcatcacagcctagagttaagtaaagtcaattcacagaagcacaattttgccctttgcgagacattgttgcctctatctagtcctacaagtagggttttgcatactgtgtttgcccctagggttgtcagtgcatcagaaatacttctaaatagtggtaaaaatgcacatggttaatgcacatgttacttttaaatcattaggatatccctcacctgttcctgatgaataaaaagtgtgttaaagaccaaaattcttggcataataatcagctacatacaaatcacatatagtttaatcttttttaatgaaaaaaaatcatgtttaaaatggcaaaagcccatcttatacacttttatatagctgcaaaaaatttcttaactcagctgtgggttttttgtgggttcttgtttgttttttggcatgaattgtcatctttggtgtttttttaacccccagcccctcaaaaaaataaggcctccaggtatcaagatctcatattaggattttctgtccttaattttttgagcaaaatctggaaaatgtgaaagcatatttagattttatatactatctgaaatgtgatttgttaagattcttaaatttgggcctcttagaataattttgaatgagatctaccgactcacttgtgagaatatttttcacagattatctttgggccttttcattagaaagctgtttgtttgtccccctgttggtacatttggttacctcattttgccgtttcagattgtgaaagctcacaggggtgttttttggaatcatttgctgagtcattttctcaaatcatattccattgtatcagttaacatatagttttaaatgtatgtattataaatatctgtaaccaaatcatttgaaggcttgataaatttttaacaaagtttgtacattttttatgaaagttactagtaatgctttactaagtagtgcaatgaatttttatttttaatccctgtgcccaattttggagttgagagggttgttggtaataaatgtatgatgtacacttaaaacatc

SEQ ID NO: 7718 - protein, 432 aa, Homo sapiens; identical to SEQ ID NO: 1079

SEQ ID NO: 7719 - DNA, 1878 bp, Homo sapiens
ttctgcttccgtgggtttctggataggctgcgttttgttctcaggggatgcaagttcttcctttcagggttgaagcgtgagagaggttggtttttgaaacgggagtgtttcaggttattgaggtccaaaaagaaataaagtttttgtttacgtctgtatggcttgtaagatatctcccggggccaattcagcatctctacctggccatcctaacaaggtgatttgtgaaagggtgagacttcagagcctgttccctctcctcccaagtgatcagaacactaccgttcaagaggatgctcacttcaaagctttcttccagagtgaagatagtccaagtcctaagagacagcgcctctctcattcagtctttgattatacatcagcatcaccagctccctcaccaccaatgcgaccatgggagatgacatcaaataggcagcccccttcagttcgaccaagccaacatcacttctcaggggaacgatgcaacacacctgcacgcaacagaagaagtcctcctgtcaggcgccagagaggaagaagggatcgtctgtctcgacataattccattagtcaagatgaaaactatcaccatctcccttacgcacagcagcaagcaatagaggagcctcgagccttccaccctccgaatgtatctccccgtctgctacatcctgctgctcatccaccccagcagaatgcagtcatggttgacatacatgatcagctccatcaaggaacagtccctgtttcttacacagtaacaacagtggcaccacatgggattccactctgcacaggccagcacatccctgcttgtagtacacagcaggtcccaggatgctctgtggttttcagtggacagcacctccctgtctgtagtgtgcctcctccaatgcttcaggcatgttcagttcagcacttaccagtaccatatgctgcattcccaccccttatttctagtgatccatttcttatacatcctcctcacctttctccccatcatcctcctcatttgccaccaccaggccagtttgtccctttccaaacacagcaatcacgatcgcctctgcaaaggatagaaaatgaagtggaactcttaggagaacatcttccagtaggaggttttacttaccctccatcagcccaccccccaacattacctccatcagctcccttgcagttcttaacacatgatcctttgcatcaggaggtgtcctttggagtaccttatcctccatttatgcctcggaggcttacaggacgtagtagataccgatcccagcagccaataccacctcccccttatcatcccagcttactgccatatgtgttatcaatgcttccagtgccacctgcagtgggcccaactttcagctttgaattagatgtagaagatggagaagtagaaaattacgaggccctgttaaacctggcagagcgactgggagaggcaaagcctcgtggactgactaaagcagatattgaacaacttccttcttatcggttcaatcctaacaaccaccagtcagaacagactttgtgtgtagtatgcatgtgtgattttgagtcaaggcagctacttagagtcttaccctgtaaccacgagttccatgccaagtgtgttgacaaatggcttaaggcaaatcgtacttgcccaatttgccgagctgatgcttcagaagtgcatcgggattcagaatgaccaacctaagaagcacaaatttagtttgggtgttcctcatcacatgtatatacggactatccattgaacttaatctgtgtggcttccagccctccctttaccaaaagggtcaatggacctttctttgcactgtgtgacttaatcaactataaaagcttacaattagtcttcac

SEQ ID NO: 7720 - protein, 515 aa, Homo sapiens; identical to SEQ ID NO: 1077

SEQ ID NO: 7721 - DNA, 1762 bp, Homo sapiens
cggaacccggtcgaaagggtcctctctggcgtccttctgcttccgtgggtttctggataggctgcgttttgttctcaggggatgcaagttcttcctttcagggttgaagcgtgagagaggttggtttttgaaacgggagtgtttcaggttattgaggtccaaaaagaaataaagtttttgtttacgtctgtatggcttgtaagagtgaagatagtccaagtcctaagagacagcgcctctctcattcagtctttgattatacatcagcatcaccagctccctcaccaccaatgcgaccatgggagatgacatcaaataggcagcccccttcagttcgaccaagccaacatcacttctcaggggaacgatgcaacacacctgcacgcaacagaagaagtcctcctgtcaggcgccagagaggaagaagggatcgtctgtctcgacataattccattagtcaagatgaaaactatcaccatctcccttacgcacagcagcaagcaatagaggagcctcgagccttccaccctccgaatgtatctccccgtctgctacatcctgctgctcatccaccccagcagaatgcagtcatggttgacatacatgatcagctccatcaaggaacagtccctgtttcttacacagtaacaacagtggcaccacatgggattccactctgcacaggccagcacatccctgcttgtagtacacagcaggtcccaggatgctctgtggttttcagtggacagcacctccctgtctgtagtgtgcctcctccaatgcttcaggcatgttcagttcagcacttaccagtaccatatgctgcattcccaccccttatttctagtgatccatttcttatacatcctcctcacctttctccccatcatcctcctcatttgccaccaccaggccagtttgtccctttccaaacacagcaatcacgatcgcctctgcaaaggatagaaaatgaagtggaactcttaggagaacatcttccagtaggaggttttacttaccctccatcagcccaccccccaacattacctccatcagctcccttgcagttcttaacacatgatcctttgcatcaggaggtgtcctttggagtaccttatcctccatttatgcctcggaggcttacaggacgtagtagataccgatcccagcagccaataccacctcccccttatcatcccagcttactgccatatgtgttatcaatgcttccagtgccacctgcagtgggcccaactttcagctttgaattagatgtagaagatggagaagtagaaaattacgaggccctgttaaacctggcagagcgactgggagaggcaaagcctcgtggactgactaaagcagatattgaacaacttccttcttatcggttcaatcctaacaaccaccagtcagaacagactttgtgtgtagtatgcatgtgtgattttgagtcaaggcagctacttagagtcttaccctgtaaccacgagttccatgccaagtgtgttgacaaatggcttaaggcaaatcgtacttgcccaatttgccgagctgatgcttcagaagtgcatcgggattcagaatgaccaacctaagaagcacaaatttagtttgggtgttcctcatcacatgtatatacggactatccattgaacttaatctgtgtggcttccagccctccctttaccaaaagggtcaatggacctttctttgcactgtgtgacttaatcaactataaaagcttacaattagtcttcac

SEQ ID NO: 7722 - protein, 465 aa, Homo sapiens; identical to SEQ ID NO: 1081

SEQ ID NO: 7723 - DNA, 1993 bp, Homo sapiens
ccgggccgggcccctagtgcggtgttgcgggacggggccgaggcccggtcggttggggcgtgggggcggagaggatggagcctccgaggcgttaggcgactctgtcatctctgggcgtgcagccgtcgtttcctggcgcggcccgtgtgatggtgccgggaggaaggaagcgcagtgacagtgcctaagttggagccggggttccgggggtgaggaggcccgcggacggcggatctggcgagctggccgcgggctgggcgagcagtcacaataggaggcggcggcccagcgaggatccgcgggagctgcccggcagggcggagcctcccctcgcagagtgaagatagtccaagtcctaagagacagcgcctctctcattcagtctttgattatacatcagcatcaccagctccctcaccaccaatgcgaccatgggagatgacatcaaataggcagcccccttcagttcgaccaagccaacatcacttctcaggggaacgatgcaacacacctgcacgcaacagaagaaggttacctataagcatattgccagattttctcccagaaacaggctgtgccaagcagatgcagtttttaacaataatctagcaggatttcagttacagagtcctcctgtcaggcgccagagaggaagaagggatcgtctgtctcgacataattccattagtcaagatgaaaactatcaccatctcccttacgcacagcagcaagcaatagaggagcctcgagccttccaccctccgaatgtatctccccgtctgctacatcctgctgctcatccaccccagcagaatgcagtcatggttgacatacatgatcagctccatcaaggaacagtccctgtttcttacacagtaacaacagtggcaccacatgggattccactctgcacaggccagcacatccctgcttgtagtacacagcaggtcccaggatgctctgtggttttcagtggacagcacctccctgtctgtagtgtgcctcctccaatgcttcaggcatgttcagttcagcacttaccagtaccatatgctgcattcccaccccttatttctagtgatccatttcttatacatcctcctcacctttctccccatcatcctcctcatttgccaccaccaggccagtttgtccctttccaaacacagcaatcacgatcgcctctgcaaaggatagaaaatgaagtggaactcttaggagaacatcttccagtaggaggttttacttaccctccatcagcccaccccccaacattacctccatcagctcccttgcagttcttaacacatgatcctttgcatcaggaggtgtcctttggagtaccttatcctccatttatgcctcggaggcttacaggacgtagtagataccgatcccagcagccaataccacctcccccttatcatcccagcttactgccatatgtgttatcaatgcttccagtgccacctgcagtgggcccaactttcagctttgaattagatgtagaagatggagaagtagaaaattacgaggccctgttaaacctggcagagcgactgggagaggcaaagcctcgtggactgactaaagcagatattgaacaacttccttcttatcggttcaatcctaacaaccaccagtcagaacagactttgtgtgtagtatgcatgtgtgattttgagtcaaggcagctacttagagtcttaccctgtaaccacgagttccatgccaagtgtgttgacaaatggcttaaggcaaatcgtacttgcccaatttgccgagctgatgcttcagaagtgcatcgggattcagaatgaccaacctaagaagcacaaatttagtttgggtgttcctcatcacatgtatatacggactatccattgaacttaatctgtgtggcttccagccctccctttaccaaaagggtcaatggacctttctttgcactgtgtgacttaatcaactataaaagcttacaattagtcttcac

SEQ ID NO: 7724 - protein, 439 aa, Homo sapiens; identical to SEQ ID NO: 7710

SEQ ID NO: 7725 - DNA, 2045 bp, Homo sapiens
ccgggccgggcccctagtgcggtgttgcgggacggggccgaggcccggtcggttggggcgtgggggcggagaggatggagcctccgaggcgttaggcgactctgtcatctctgggcgtgcagccgtcgtttcctggcgcggcccgtgtgatggtgccgggaggaaggaagcgcagtgacagtgcctaagttggagccggggttccgggggtgaggaggcccgcggacggcggatctggcgagctggccgcgggctgggcgagcagtcacaataggaggcggcggcccagcgaggatccgcgggagctgcccggcagggcggagcctcccctcgcagatatctcccggggccaattcagcatctctacctggccatcctaacaaggtgatttgtgaaagggtgagacttcagagcctgttccctctcctcccaagtgatcagaacactaccgttcaagaggatgctcacttcaaagctttcttccagagtgaagatagtccaagtcctaagagacagcgcctctctcattcagtctttgattatacatcagcatcaccagctccctcaccaccaatgcgaccatgggagatgacatcaaataggcagcccccttcagttcgaccaagccaacatcacttctcaggggaacgatgcaacacacctgcacgcaacagaagaagtcctcctgtcaggcgccagagaggaagaagggatcgtctgtctcgacataattccattagtcaagatgaaaactatcaccatctcccttacgcacagcagcaagcaatagaggagcctcgagccttccaccctccgaatgtatctccccgtctgctacatcctgctgctcatccaccccagcagaatgcagtcatggttgacatacatgatcagctccatcaaggaacagtccctgtttcttacacagtaacaacagtggcaccacatgggattccactctgcacaggccagcacatccctgcttgtagtacacagcaggtcccaggatgctctgtggttttcagtggacagcacctccctgtctgtagtgtgcctcctccaatgcttcaggcatgttcagttcagcacttaccagtaccatatgctgcattcccaccccttatttctagtgatccatttcttatacatcctcctcacctttctccccatcatcctcctcatttgccaccaccaggccagtttgtccctttccaaacacagcaatcacgatcgcctctgcaaaggatagaaaatgaagtggaactcttaggagaacatcttccagtaggaggttttacttaccctccatcagcccaccccccaacattacctccatcagctcccttgcagttcttaacacatgatcctttgcatcaggaggtgtcctttggagtaccttatcctccatttatgcctcggaggcttacaggacgtagtagataccgatcccagcagccaataccacctcccccttatcatcccagcttactgccatatgtgttatcaatgcttccagtgccacctgcagtgggcccaactttcagctttgaattagatgtagaagatggagaagtagaaaattacgaggccctgttaaacctggcagagcgactgggagaggcaaagcctcgtggactgactaaagcagatattgaacaacttccttcttatcggttcaatcctaacaaccaccagtcagaacagactttgtgtgtagtatgcatgtgtgattttgagtcaaggcagctacttagagtcttaccctgtaaccacgagttccatgccaagtgtgttgacaaatggcttaaggcaaatcgtacttgcccaatttgccgagctgatgcttcagaagtgcatcgggattcagaatgaccaacctaagaagcacaaatttagtttgggtgttcctcatcacatgtatatacggactatccattgaacttaatctgtgtggcttccagccctccctttaccaaaagggtcaatggacctttctttgcactgtgtgacttaatcaactataaaagcttacaattagtcttcac

SEQ ID NO: 7726 - protein, 432 aa, Homo sapiens; identical to SEQ ID NO: 1079

SEQ ID NO: 7727 - DNA, 2484 bp, Homo sapiens
agatttgattcccttggcgggcggaagcggccacaacccggcgatcgaaaagattcttaggaacgccgtaccagccgcgtctctcaggacagcaggcccctgtccttctgtcgggcgccgctcagccgtgccctccgcccctcaggttctttttctaattccaaataaacttgcaagaggactatgaaagattatgatgaacttctcaaatattatgaattacatgaaactattgggacaggtggctttgcaaaggtcaaacttgcctgccatatccttactggagagatggtagctataaaaatcatggataaaaacacactagggagtgatttgccccggatcaaaacggagattgaggccttgaagaacctgagacatcagcatatatgtcaactctaccatgtgctagagacagccaacaaaatattcatggttcttgagtactgccctggaggagagctgtttgactatataatttcccaggatcgcctgtcagaagaggagacccgggttgtcttccgtcagatagtatctgctgttgcttatgtgcacagccagggctatgctcacagggacctcaagccagaaaatttgctgtttgatgaatatcataaattaaagctgattgactttggtctctgtgcaaaacccaagggtaacaaggattaccatctacagacatgctgtgggagtctggcttatgcagcacctgagttaatacaaggcaaatcatatcttggatcagaggcagatgtttggagcatgggcatactgttatatgttcttatgtgtggatttctaccatttgatgatgataatgtaatggctttatacaagaagattatgagaggaaaatatgatgttcccaagtggctctctcccagtagcattctgcttcttcaacaaatgctgcaggtggacccaaagaaacggatttctatgaaaaatctattgaaccatccctggatcatgcaagattacaactatcctgttgagtggcaaagcaagaatccttttattcacctcgatgatgattgcgtaacagaactttctgtacatcacagaaacaacaggcaaacaatggaggatttaatttcactgtggcagtatgatcacctcacggctacctatcttctgcttctagccaagaaggctcggggaaaaccagttcgtttaaggctttcttctttctcctgtggacaagccagtgctaccccattcacagacatcaagtcaaataattggagtctggaagatgtgaccgcaagtgataaaaattatgtggcgggattaatagactatgattggtgtgaagatgatttatcaacaggtgctgctactccccgaacatcacagtttaccaagtactggacagaatcaaatggggtggaatctaaatcattaactccagccttatgcagaacacctgcaaataaattaaagaacaaagaaaatgtatatactcctaagtctgctgtaaagaatgaagagtactttatgtttcctgagccaaagactccagttaataagaaccagcataagagagaaatactcactacgccaaatcgttacactacaccctcaaaagctagaaaccagtgcctgaaagaaactccaattaaaataccagtaaattcaacaggaacagacaagttaatgacaggtgtcattagccctgagaggcggtgccgctcagtggaattggatctcaaccaagcacatatggaggagactccaaaaagaaagggagccaaagtgtttgggagccttgaaagggggttggataaggttatcactgtgctcaccaggagcaaaaggaagggttctgccagagacgggcccagaagactaaagcttcactataacgtgactacaactagattagtgaatccagatcaactgttgaatgaaataatgtctattcttccaaagaagcatgttgactttgtacaaaagggttatacactgaagtgtcaaacacagtcagattttgggaaagtgacaatgcaatttgaattagaagtgtgccagcttcaaaaacccgatgtggtgggtatcaggaggcagcggcttaagggcgatgcctgggtttacaaaagattagtggaagacatcctatctagctgcaaggtataattgatggattcttccatcctgccggatgagtgtgggtgtgatacagcctacataaagactgttatgatcgctttgattttaaagttcattggaactaccaacttgtttctaaagagctatcttaagaccaatatctctttgtttttaaacaaaagatattattttgtgtatgaatctaaatcaagcccatctgtcattatgttactgtcttttttaatcatgtggttttgtatattaataattgttgactttcttagattcacttccatatgtgaatgtaagctcttaactatgtctctttgtaatgtgtaatttctttctgaaataaaaccatttgtgaatata

SEQ ID NO: 7728 - protein, 651 aa, Homo sapiens; identical to SEQ ID NO: 1087

SEQ ID NO: 7729 - DNA, 8917 bp, Homo sapiens
agcactgctgctctcccggcttcccgctctactccggccgggccgggtccgccacgtctggcgcgctgagcaggcccggccgcgcagcgcctaccctttcctcgctccgggccggcagtgtggggcggcgcgctgggggcgcggcgtgtctggggacatcttgtgatgttggcgagaacaggacatgatctcacatggcgagaagctctttagttccttaatcatttcacggtgccttcggacgctttttttccacctaaaacgtttagtttcagctcagtgatcagctaccccagctcggcgggggagcggaaggcttgaattattccgacctgtgagcggcccctggcaccaaaaaaaaaaaaaaaaaaaaaaaaaaaagaaaaaaaaaggcacaaaaaagtggaaacttttccctgtccattccatcaagtcctgaaaaatcaaaatggatttagagaaaaattatccgactcctcggaccagcaggacaggacatggaggagtgaatcagcttgggggggtttttgtgaatggacggccactcccggatgtagtccgccagaggatagtggaacttgctcatcaaggtgtcaggccctgcgacatctccaggcagcttcgggtcagccatggttgtgtcagcaaaattcttggcaggtattatgagacaggaagcatcaagcctggggtaattggaggatccaaaccaaaggtcgccacacccaaagtggtggaaaaaatcgctgaatataaacgccaaaatcccaccatgtttgcctgggagatcagggaccggctgctggcagagcgggtgtgtgacaatgacaccgtgcctagcgtcagttccatcaacaggatcatccggacaaaagtacagcagccacccaaccaaccagtcccagcttccagtcacagcatagtgtccactggctccgtgacgcaggtgtcctcggtgagcacggattcggccggctcgtcgtactccatcagcggcatcctgggcatcacgtcccccagcgccgacaccaacaagcgcaagagagacgaaggtattcaggagtctccggtgccgaacggccactcgcttccgggcagagacttcctccggaagcagatgcggggagacttgttcacacagcagcagctggaggtgctggaccgcgtgtttgagaggcagcactactcagacatcttcaccaccacagagcccatcaagcccgagcagaccacagagtattcagccatggcctcgctggctggtgggctggacgacatgaaggccaatctggccagccccacccctgctgacatcgggagcagtgtgccaggcccgcagtcctaccccattgtgacaggccgtgacttggcgagcacgaccctccccgggtaccctccacacgtcccccccgctggacagggcagctactcagcaccgacgctgacagggatggtgcctgggagtgagttttccgggagtccctacagccaccctcagtattcctcgtacaacgactcctggaggttccccaacccggggctgcttggctccccctactattatagcgctgccgcccgaggagccgccccacctgcagccgccactgcctatgaccgtcactgacccttggagccaggcgggcaccaaacactgatggcacctattgagggtgacagccacccagccctcctgaagatagccagagagcccatgagaccgtcccccagcatcccccacttgcctgaagctcccctcttcctctcttcctccagggactctggggccctttggtggggccgttggacttctggatgcttgtctatttctaaaagccaatctatgagcttctcccgatggccactgggtctctgcaaaccaatagactgtcctgcaaataaccgcagccccagcccagcctgcctgtcctccagctgtctgactatccatccatcataaccaccccagcctgggaaggagagcttgcttttgttgcttcagcagcacccatgtaaataccttcttgcttttctgtgggcctgaaggtccgactgagaagactgctccacccatgatgcatctcgcactcttggtgcatcaccggacatcttagacctatggcagagcatcctctctgccctgggtgaccctggcaggtgcgctcagagctgtcctcaagatggaggatgctgcccttgggccccagcctcctgctcatccctccttctttagtatctttacgaggagtctcactgggctggttgtgctgcaggctccccctgaggcccctctccaagaggagcacactttggggagatgtcctggtttcctgcctccatttctctgggaccgatgcagtatcagcagctcttttccagatcaaagaactcaaagaaaactgtctgggagattcctcagctacttttccgaagcagaatgtcatccgaggtattgattacattgtggactttgaatgtgagggctggatgggacgcaggagatcatctgatcccagccaaggaggggcctgaggctctccctactccctcagcccctggaacggtgttttctgaggcatgcccaggttcaggtcacttcggacacctgccatggacacttcacccaccctccaggaccccagcaagtggattctgggcaagcctgttccggtgatgtagacaataattaacacagaggactttcccccacacccagatcacaaacagcctacagccagaacttctgagcatcctctcggggcagaccctccccgtcctcgtggagcttagcaggcagctgggcatggaggtgctggggctggggcagatgcctaatttcgcacaatgcatgcccacctgttgatctaaggggccgcgatggtcagggccacggccaagggccacgggaacttggagagggagcttggagaactcactgtgggctagggtggtcagaggaagccagcagggaagatctgggggacagaggaaggcctcctgagggaggggcaggagagcagtgaggagctgctgtgtgacctgggagtgattttgacatgggggtgccaggtgccatcatctctttacctggggccttaattccttgcatagtctctcttgtcaagtcagaacagccaggtagagcccttgtccaaacctgggctgaatgacagtgatgagagggggcttggccttcttaggtgacaatgtcccccatatctgtatgtcaccaggatggcagagagccagggcagagagagactggacttgggatcagcaggccaggcaggtcttgtcctggtcctggccacatgtctttgctgtgggacctcagacaaaaccctgcacctctttgagccttggctgccttggtgcagcagggtcatctgtagggccaccccacagctctttccttcccctcctctctccagggagccggggctgtgagaggatcatctggggcaggccctccacttccaagcaagcagatgggggtgggcacctgaggcccaataatatttggaccaagtgggaaacaagaacactcggaggggcgggaatcagaagagcctggaaaaagacctagcccaacttcccttgtgggaaactgaggcccagcttggggaaggccaggaccatgcagggagaaaaagcagacttcctctggccaccgctaagtattttgttccctaagtcccccacagggtggtggaacagaagagaaaactaaggctcagcaaggtggagtcctcaagcagtgactggtgggggtggggctgggactcgggctcctgacccccaacccatggtgttccctgtcaccctggtctatccacatctcctattcctgaggagagttgacagtaagagcagtgagagatggttctgggccccatgccctagacaatcagtctgtaagaactgccaaggaagcctggtcacccaggccagggatggagcccagcgagctcacagcaggcacatgcacccccgcccccacccagaacctgcggggcaaagaagggaggtagttggggccagagtccacctccaggagccagggtgagctggctgcagcttccacctgtcaggtaaggtaggagaaggtatgttacctggcatctctctccctgcctccctccatttagcaggaagtggtggggtcaggggtcttcagcacagacttcttgagcctctgccccctgtcacccttcttttggaatgatgtgtacccacatctttggatcctgccctccttgtggttccaggctgttgggaggaggtcagcctcccctgaaccagctgcctgaggcatgcagcatccttcctcggcaaagcccacctggctcacagcggccccctctccccatcctgttcctcttcttgccctgtaatgagctccccccatacctttcctccctcacctgaggctttgctggtcctcagattggttttgtatttgtgagacaaccacttgactcctgggctgccaggcggaagcacaagcgcacatggatgcacacggatgttctcacacacacacgcccgctctcaccaattcacagcacctcgtggtccagcggagctgcctgggagcttggtgaggatggctccaaaggacacaagccgttgagtagatgccagagaattctgaatggaaaacacaagtccggggcctcaccagcatcgtggcagaaggcctggggcatttctccatgggccttcttccctgtgttcgagctctgacttttggaaaaggacattgtggattttatgaaaatttctcataccatcagtctagctccaacctagaaaaattggatgatatatcaaacccaacatccctttcccaaggcaccttagttaaggctagcccttccataactgacattgtacggtgctttgcaatcctcaaccactctgtggagcaaagagcatgatgcctactttatagacggggaaattgacatttggggctctcacggcaacatagaggcgaagtgaattctcagatctccaggccccattctctctccaccgagttgtgctcctgtcatgggagtgtatggcttaaagacactcccccacccccattccctagaaatcccccagacccacaatcaggcaagaaagaacagggacccagaggctggcctgacctaggggcctgcaggttggcggctttgtttcctaagaacattgaaacctgcggagtctttgaccaaatccacaacagtgcttctgaggtttcatccagactctttcccagctgtccctgaggttcagagggtatcagagtcaattcaaggccatgccataatccctgaccaggcctggacatgggtccagccctgactccaggggtccaggtgccaaggtcatgtgctgtcccccacttccctttctttgccttcgcactttggaacaggctccaggcctggctgtgacagtatgcaggagtgcccaagccagggccaccagggtgtccacagcccctggaaacacagatcacaatctcaagtcccctgaatgaactgcttcctgggtgaacggggtggtgtagccttgccactcgggcagcgcaccagacagtacggtgcagcagtgcccgagatgcccagaagtgtgcctgcccccctgagtggcattcaagtatgaaaacttgtaaaattttctgtcggcctaaagaaaaatgtccatgggccaaacttgacccactgggcaccagcctgtgagccccaatgcctgtcaattgccccctttctcattcacctcctgtcctttgttgcagatttggaggagatgggagcccagagaggtgagagatgtgcttcagggtgtccagcaaggcaggggtagaaacgggcacgcccagagcctgccactctcccaggcctcatcttgggctcttgcaagtcttgcgctttgaagatggagttgggtggaaggtcagaggcgctggggacgggattggggagctgctgggttttcaggggaggtcagtgctgcttgggcacctttcacatgtgcagggaagagactcagatgtggccacagggcactgaggggtgaaatccatttaccagaagtcacgctccagaacgactgcccagccttggcagccagtggctccagccaccccctcctcatgacattcagccagaattgagctccaagccagggaagcaaatcttaaaaaccaaccaagcaccctgacacagccctagaaacacgatgagtctgaaatacagcttcccaggaggggagtctaagatacagcttcccgggagggtggaaaccaactcctgccccacggccaggccaggcccaggcaggcatgggtggatcccacagggctctgagctagaccggctccacggtggccccactacgaggccagttctgcagtcttggccttgtcacccatcgagaggctgctctgatggttcccagccacacaccagctctcctggggaaactatttctttcgttcttttggcctcggagaggtccgaggcaagtacatttcttaaaaggtaataaaatgcattattggaaagttggacagtcaggccacgactcctagcccacggcgtgccccacctcccagcagccccttcagccccttgcccctgttgccccaaacctcagggttccctcttgcatattcatgggggaaccacagtgctgatgtgtacttccccactgtcagctcggctgcacctcgtgtggcgccaggtcccaagggcctctgcagaggccaggctgtgagccccttgcctgcctgctcccctgatgaggcaacagcttctctgaaatgagctgccggccaggagcaggcaggcaccagcctgtctttccttttctggtaattcctcagcactgaggctccgttcctgggcaccccaggattgaagggaacctcagaatcatgtcactgccattctagagtttcaatccaaggggtcccctttagctcatctccaagatgggtaaacgtagccaccattcagaaagcccagaaattcttgttcccacatcttagacccctgagcaacacaaggagaaaatgcagctgcttacctattaatatctactgagggacaatcagcaaagcctcaaaggagtcgtctcaggtagggtacttggcctgtggcaggagagacagaggcacaaacccacccacccatcagcttccggtggctgatcggggcccagggagggaagcaggtgaaacagcagggtgggggtgacttggcagtcgtgcatctcctccccgactctgaggcctggcaggaggaggccacaccagcctcacctgccctgacccccgccccccaccctgtgaccctgtggctatggccgctggtcgcccttgtccccaaaatcaccatgcctgtggccacgtccctcatcttctccaaaagcatcattaagaacaagtgattttggatgatggatttttgatttacaaacggcgcatttcccttggagtggaacagaaaggaaaccatttaatggcgcccttcttttcaagcatgaatacattttaatgaaactattttattgtatttgaggaaatggagagttgaacattccaaccaatcaatagccaattaattgctataaagctaaaaagaaaataaataaatcctgagtctattttaaacactgcaaaaagttcagagcctcagaatctggccttcccctccataaggtgcacgagcatgtaaacacacacacacacacacacacacacacacacacactcactcactcccctacacctcagacatacttgaaactcagaaacagcactgagtctccccatgccaattcttgcctgctgtcttcgacttgggtcagagaaggtgagcagacccggcagcagcctgtcccggggctcaggaagaggcaggcccatcccctggccccaagcacccagcacaacagagggtggcgggcagtgagggcctggcgttgcctgggccccacttctcagccccagctgctgggcctccaaggttgggctgaggatggagttttggctctgggtttgccctgactcctgctggaagacgctgccctggtttttcaccctctagtggccttggacattgagtatttgtagaaatgcagattacattgcaaatggaaacctttgccaggaagacacatgcattttgcttttaattctttgagacatttgattttgtcttagggactgacctttcagcatcaaagaaatacatatctactgtatccgccaaagtttgtgatgcctgcatagacgcttacttgtaaaaaaaaaaaaatacaaaaaaatacaaaaaaaccaacaacaaaaaccacaattgaattgcctttgaaagtgggagatgatctgtctccaacggattgaaaaaaaaaaatgcttcttaaaaaatgtgtatgttttgtattctttttttctagtagaaaataactgacttgaaatattggtggtttttttcttagtgacgtgtgttgcttttgtgtgtaataatatttgaatgtaattacagcagtgccaatttgccaaagatgttggacatatttttcttttttggggaggagggcagggctaggggtgggacttgggagaaaacaggggtggggttttggtttaattttttttttacttttttttccttgtcaaacctgaaatttgtggcttccttttaagttaaatggttgactgcaacacctttattttagattagttggagaaacatgcaataagattggcgtagtttcaatatctgtgtgtcttttcatgagtggctgttacttgtgaagaattgattttatgtaacctttatgtgagataattatttgtaaatatttgccataattttattggttcctaaaataaaagtaattttttaagttcagaaaaaga

SEQ ID NO: 7730 - protein, 391 aa, Homo sapiens; identical to SEQ ID NO: 1089

SEQ ID NO: 7731 - DNA, 534 bp, Homo sapiens
tgtccacacgcagcgggtcctgaaagcggctccggggcggcgcggtggcgcactgtgcgcgccgagcaggcggagggctagcgacggcgccgccactgcctatgaccgtcactgacccttggagccaggcgggcaccaaacactgatggcacctattgagggtgacagccacccagccctcctgaagatagccagagagcccatgagaccgtcccccagcatcccccacttgcctgaagctcccctcttcctctcttcctccagggactctggggccctttggtggggccgttggacttctggatgcttgtctatttctaaaagccaatctatgagcttctcccgatggccactgggtctctgcaaaccaatagactgtcctgcaaataaccgcagccccagcccagcctgcctgtcctccagctgtctgactatccatccatcataaccaccccagcctgggaaggagagcttgcttttgttgcttcagcagcacccatgtaaataccttcttgcttttctgtgggcctgaag

SEQ ID NO: 7732 - protein, 100 aa, Homo sapiens
MAPIEGDSHPALLKIAREPMRPSPSIPHLPEAPLFLSSSRDSGALWWGRWTSGCLSISKSQSMSFSRWPLGLCKPIDCPANNRSPSPACLSSSCLTIHPS

SEQ ID NO: 7733 - DNA, 1638 bp, Homo sapiens
ctttttttccacctaaaacgtttagtttcagctcagtgatcagctaccccagctcggcgggggagcggaaggcttgaattattccgacctgtgagcggcccctggcaccaaaaaaaaaaaaaaaaaaaaaaaaaaaagaaaaaaaaaggcacaaaaaagtggaaacttttccctgtccattccatcaagtcctgaaaaatcaaaatggatttagagaaaaattatccgactcctcggaccagcaggacaggacatggaggagtgaatcagcttgggggggtttttgtgaatggacggccactcccggatgtagtccgccagaggatagtggaacttgctcatcaaggtgtcaggccctgcgacatctccaggcagcttcgggtcagccatggttgtgtcagcaaaattcttggcaggtattatgagacaggaagcatcaagcctggggtaattggaggatccaaaccaaaggtcgccacacccaaagtggtggaaaaaatcgctgaatataaacgccaaaatcccaccatgtttgcctgggagatcagggaccggctgctggcagagcgggtgtgtgacaatgacaccgtgcctagcgtcagttccatcaacaggatcatccggacaaaagtacagcagccacccaaccaaccagtcccagcttccagtcacagcatagtgtccactggctccgtgacgcaggtgtcctcggtgagcacggattcggccggctcgtcgtactccatcagcggcatcctgggcatcacgtcccccagcgccgacaccaacaagcgcaagagagacgaaggtattcaggagtctccggtgccgaacggccactcgcttccgggcagagacttcctccggaagcagatgcggggagacttgttcacacagcagcagctggaggtgctggaccgcgtgtttgagaggcagcactactcagacatcttcaccaccacagagcccatcaagcccgagcaggccgtgacttggcgagcacgaccctccccgggtaccctccacacgtcccccccgctggacagggcagctactcagcaccgacgctgacagggatggtgcctgggagtgagttttccgggagtccctacagccaccctcagtattcctcgtacaacgactcctggaggttccccaacccggggctgcttggctccccctactattatagcgctgccgcccgaggagccgccccacctgcagccgccactgcctatgaccgtcactgacccttggagccaggcgggcaccaaacactgatggcacctattgagggtgacagccacccagccctcctgaagatagccagagagcccatgagaccgtcccccagcatcccccacttgcctgaagctcccctcttcctctcttcctccagggactctggggccctttggtggggccgttggacttctggatgcttgtctatttctaaaagccaatctatgagcttctcccgatggccactgggtctctgcaaaccaatagactgtcctgcaaataaccgcagccccagcccagcctgcctgtcctccagctgtctgactatccatccatcataaccaccccagcctgggaaggagagcttgcttttgttgcttcagcagcacccatgta

SEQ ID NO: 7734 - protein, 288 aa, Homo sapiens
MDLEKNYPTPRTSRTGHGGVNQLGGVFVNGRPLPDVVRQRIVELAHQGVRPCDISRQLRVSHGCVSKILGRYYETGSIKPGVIGGSKPKVATPKVVEKIAEYKRQNPTMFAWEIRDRLLAERVCDNDTVPSVSSINRIIRTKVQQPPNQPVPASSHSIVSTGSVTQVSSVSTDSAGSSYSISGILGITSPSADTNKRKRDEGIQESPVPNGHSLPGRDFLRKQMRGDLFTQQQLEVLDRVFERQHYSDIFTTTEPIKPEQAVTWRARPSPGTLHTSPPLDRAATQHRR

SEQ ID NO: 7735 - DNA, 1681 bp, Homo sapiens
ctttttttccacctaaaacgtttagtttcagctcagtgatcagctaccccagctcggcgggggagcggaaggcttgaattattccgacctgtgagcggcccctggcaccaaaaaaaaaaaaaaaaaaaaaaaaaaaagaaaaaaaaaggcacaaaaaagtggaaacttttccctgtccattccatcaagtcctgaaaaatcaaaatggatttagagaaaaattatccgactcctcggaccagcaggacaggacatggaggagtgaatcagcttgggggggtttttgtgaatggacggccactcccggatgtagtccgccagaggatagtggaacttgctcatcaaggtgtcaggccctgcgacatctccaggcagcttcgggtcagccatggttgtgtcagcaaaattcttggcaggtattatgagacaggaagcatcaagcctggggtaattggaggatccaaaccaaaggtcgccacacccaaagtggtggaaaaaatcgctgaatataaacgccaaaatcccaccatgtttgcctgggagatcagggaccggctgctggcagagcgggtgtgtgacaatgacaccgtgcctagcgtcagttccatcaacaggatcatccggacaaaagtacagcagccacccaaccaaccagtcccagcttccagtcacagcatagtgtccactggctccgtgacgcaggtgtcctcggtgagcacggattcggccggctcgtcgtactccatcagcggcatcctgggcatcacgtcccccagcgccgacaccaacaagcgcaagagagacgaaggtattcaggagtctccggtgccgaacggccactcgcttccgggcagagacttcctccggaagcagatgcggggagacttgttcacacagcagcagctggaggtgctggaccgcgtgtttgagaggcagcactactcagacatcttcaccaccacagagcccatcaagcccgagcagaccacagagtattcagccatggcctcgctggctggtgggctggacgacatgaaggccaatctggccagccccacccctgctgacatcgggagcagtgtgccaggcccgcagtcctaccccattgtgacaggccgtgacttggcgagcacgaccctccccgggtaccctccacacgtcccccccgctggacagggcagctactcagcaccgacgctgacagggatggtgcctggctccccctactattatagcgctgccgcccgaggagccgccccacctgcagccgccactgcctatgaccgtcactgacccttggagccaggcgggcaccaaacactgatggcacctattgagggtgacagccacccagccctcctgaagatagccagagagcccatgagaccgtcccccagcatcccccacttgcctgaagctcccctcttcctctcttcctccagggactctggggccctttggtggggccgttggacttctggatgcttgtctatttctaaaagccaatctatgagcttctcccgatggccactgggtctctgcaaaccaatagactgtcctgcaaataaccgcagccccagcccagcctgcctgtcctccagctgtctgactatccatccatcataaccaccccagcctgggaaggagagcttgcttttgttgcttcagcagcacccatgta

SEQ ID NO: 7736 - protein, 362 aa, Homo sapiens
MDLEKNYPTPRTSRTGHGGVNQLGGVFVNGRPLPDVVRQRIVELAHQGVRPCDISRQLRVSHGCVSKILGRYYETGSIKPGVIGGSKPKVATPKVVEKIAEYKRQNPTMFAWEIRDRLLAERVCDNDTVPSVSSINRIIRTKVQQPPNQPVPASSHSIVSTGSVTQVSSVSTDSAGSSYSISGILGITSPSADTNKRKRDEGIQESPVPNGHSLPGRDFLRKQMRGDLFTQQQLEVLDRVFERQHYSDIFTTTEPIKPEQTTEYSAMASLAGGLDDMKANLASPTPADIGSSVPGPQSYPIVTGRDLASTTLPGYPPHVPPAGQGSYSAPTLTGMVPGSPYYYSAAARGAAPPAAATAYDRH

SEQ ID NO: 7737 - DNA, 1666 bp, Homo sapiens
ctttttttccacctaaaacgtttagtttcagctcagtgatcagctaccccagctcggcgggggagcggaaggcttgaattattccgacctgtgagcggcccctggcaccaaaaaaaaaaaaaaaaaaaaaaaaaaaagaaaaaaaaaggcacaaaaaagtggaaacttttccctgtccattccatcaagtcctgaaaaatcaaaatggatttagagaaaaattatccgactcctcggaccagcaggacaggacatggaggagtgaatcagcttgggggggtttttgtgaatggacggccactcccggatgtagtccgccagaggatagtggaacttgctcatcaaggtgtcaggccctgcgacatctccaggcagcttcgggtcagccatggttgtgtcagcaaaattcttggcaggtattatgagacaggaagcatcaagcctggggtaattggaggatccaaaccaaaggtcgccacacccaaagtggtggaaaaaatcgctgaatataaacgccaaaatcccaccatgtttgcctgggagatcagggaccggctgctggcagagcgggtgtgtgacaatgacaccgtgcctagcgtcagttccatcaacaggatcatccggacaaaagtacagcagccacccaaccaaccagtcccagcttccagtcacagcatagtgtccactggctccgtgacgcaggtgtcctcggtgagcacggattcggccggctcgtcgtactccatcagcggcatcctgggcatcacgtcccccagcgccgacaccaacaagcgcaagagagacgaaggtattcaggagtctccggtgccgaacggccactcgcttccgggcagagacttcctccggaagcagatgcggggagacttgttcacacagcagcagctggaggtgctggaccgcgtgtttgagaggcagcactactcagacatcttcaccaccacagagcccatcaagcccgagcagaccacagagtattcagccatggcctcgctggctggtgggctggacgacatgaaggccaatctggccagccccacccctgctgacatcgggagcagtgtgccaggcccgcagtcctaccccattgtgacagggagtgagttttccgggagtccctacagccaccctcagtattcctcgtacaacgactcctggaggttccccaacccggggctgcttggctccccctactattatagcgctgccgcccgaggagccgccccacctgcagccgccactgcctatgaccgtcactgacccttggagccaggcgggcaccaaacactgatggcacctattgagggtgacagccacccagccctcctgaagatagccagagagcccatgagaccgtcccccagcatcccccacttgcctgaagctcccctcttcctctcttcctccagggactctggggccctttggtggggccgttggacttctggatgcttgtctatttctaaaagccaatctatgagcttctcccgatggccactgggtctctgcaaaccaatagactgtcctgcaaataaccgcagccccagcccagcctgcctgtcctccagctgtctgactatccatccatcataaccaccccagcctgggaaggagagcttgcttttgttgcttcagcagcacccatgta

SEQ ID NO: 7738 - protein, 357 aa, Homo sapiens
MDLEKNYPTPRTSRTGHGGVNQLGGVFVNGRPLPDVVRQRIVELAHQGVRPCDISRQLRVSHGCVSKILGRYYETGSIKPGVIGGSKPKVATPKVVEKIAEYKRQNPTMFAWEIRDRLLAERVCDNDTVPSVSSINRIIRTKVQQPPNQPVPASSHSIVSTGSVTQVSSVSTDSAGSSYSISGILGITSPSADTNKRKRDEGIQESPVPNGHSLPGRDFLRKQMRGDLFTQQQLEVLDRVFERQHYSDIFTTTEPIKPEQTTEYSAMASLAGGLDDMKANLASPTPADIGSSVPGPQSYPIVTGSEFSGSPYSHPQYSSYNDSWRFPNPGLLGSPYYYSAAARGAAPPAAATAYDRH

SEQ ID NO: 7739 - DNA, 1449 bp, Homo sapiens
ctttttttccacctaaaacgtttagtttcagctcagtgatcagctaccccagctcggcgggggagcggaaggcttgaattattccgacctgtgagcggcccctggcaccaaaaaaaaaaaaaaaaaaaaaaaaaaaagaaaaaaaaaggcacaaaaaagtggaaacttttccctgtccattccatcaagtcctgaaaaatcaaaatggatttagagaaaaattatccgactcctcggaccagcaggacaggacatggaggagtgaatcagcttgggggggtttttgtgaatggacggccactcccggatgtagtccgccagaggatagtggaacttgctcatcaaggtgtcaggccctgcgacatctccaggcagcttcgggtcagccatggttgtgtcagcaaaattcttggcaggtattatgagacaggaagcatcaagcctggggtaattggaggatccaaaccaaaggtcgccacacccaaagtggtggaaaaaatcgctgaatataaacgccaaaatcccaccatgtttgcctgggagatcagggaccggctgctggcagagcgggtgtgtgacaatgacaccgtgcctagcgtcagttccatcaacaggatcatccggacaaaagtacagcagccacccaaccaaccagtcccagcttccagtcacagcatagtgtccactggctccgtgacgcaggtgtcctcggtgagcacggattcggccggctcgtcgtactccatcagcggcatcctgggcatcacgtcccccagcgccgacaccaacaagcgcaagagagacgaaggtattcaggagtctccggtgccgaacggccactcgcttccgggcagagacttcctccggaagcagatgcggggagacttgttcacacagcagcagctggaggtgctggaccgcgtgtttgagaggcagcactactcagacatcttcaccaccacagagcccatcaagcccgagcaggctccccctactattatagcgctgccgcccgaggagccgccccacctgcagccgccactgcctatgaccgtcactgacccttggagccaggcgggcaccaaacactgatggcacctattgagggtgacagccacccagccctcctgaagatagccagagagcccatgagaccgtcccccagcatcccccacttgcctgaagctcccctcttcctctcttcctccagggactctggggccctttggtggggccgttggacttctggatgcttgtctatttctaaaagccaatctatgagcttctcccgatggccactgggtctctgcaaaccaatagactgtcctgcaaataaccgcagccccagcccagcctgcctgtcctccagctgtctgactatccatccatcataaccaccccagcctgggaaggagagcttgcttttgttgcttcagcagcacccatgta

SEQ ID NO: 7740 - protein, 295 aa, Homo sapiens
MDLEKNYPTPRTSRTGHGGVNQLGGVFVNGRPLPDVVRQRIVELAHQGVRPCDISRQLRVSHGCVSKILGRYYETGSIKPGVIGGSKPKVATPKVVEKIAEYKRQNPTMFAWEIRDRLLAERVCDNDTVPSVSSINRIIRTKVQQPPNQPVPASSHSIVSTGSVTQVSSVSTDSAGSSYSISGILGITSPSADTNKRKRDEGIQESPVPNGHSLPGRDFLRKQMRGDLFTQQQLEVLDRVFERQHYSDIFTTTEPIKPEQAPPTIIALPPEEPPHLQPPLPMTVTDPWSQAGTKH

SEQ ID NO: 7741 - DNA, 1536 bp, Homo sapiens
ctttttttccacctaaaacgtttagtttcagctcagtgatcagctaccccagctcggcgggggagcggaaggcttgaattattccgacctgtgagcggcccctggcaccaaaaaaaaaaaaaaaaaaaaaaaaaaaagaaaaaaaaaggcacaaaaaagtggaaacttttccctgtccattccatcaagtcctgaaaaatcaaaatggatttagagaaaaattatccgactcctcggaccagcaggacaggacatggaggagtgaatcagcttgggggggtttttgtgaatggacggccactcccggatgtagtccgccagaggatagtggaacttgctcatcaaggtgtcaggccctgcgacatctccaggcagcttcgggtcagccatggttgtgtcagcaaaattcttggcaggtattatgagacaggaagcatcaagcctggggtaattggaggatccaaaccaaaggtcgccacacccaaagtggtggaaaaaatcgctgaatataaacgccaaaatcccaccatgtttgcctgggagatcagggaccggctgctggcagagcgggtgtgtgacaatgacaccgtgcctagcgtcagttccatcaacaggatcatccggacaaaagtacagcagccacccaaccaaccagtcccagcttccagtcacagcatagtgtccactggctccgtgacgcaggtgtcctcggtgagcacggattcggccggctcgtcgtactccatcagcggcatcctgggcatcacgtcccccagcgccgacaccaacaagcgcaagagagacgaaggtattcaggagtctccggtgccgaacggccactcgcttccgggcagagacttcctccggaagcagatgcggggagacttgttcacacagcagcagctggaggtgctggaccgcgtgtttgagaggcagcactactcagacatcttcaccaccacagagcccatcaagcccgagcagggagtgagttttccgggagtccctacagccaccctcagtattcctcgtacaacgactcctggaggttccccaacccggggctgcttggctccccctactattatagcgctgccgcccgaggagccgccccacctgcagccgccactgcctatgaccgtcactgacccttggagccaggcgggcaccaaacactgatggcacctattgagggtgacagccacccagccctcctgaagatagccagagagcccatgagaccgtcccccagcatcccccacttgcctgaagctcccctcttcctctcttcctccagggactctggggccctttggtggggccgttggacttctggatgcttgtctatttctaaaagccaatctatgagcttctcccgatggccactgggtctctgcaaaccaatagactgtcctgcaaataaccgcagccccagcccagcctgcctgtcctccagctgtctgactatccatccatcataaccaccccagcctgggaaggagagcttgcttttgttgcttcagcagcacccatgta

SEQ ID NO: 7742 - protein, 324 aa, Homo sapiens
MDLEKNYPTPRTSRTGHGGVNQLGGVFVNGRPLPDVVRQRIVELAHQGVRPCDISRQLRVSHGCVSKILGRYYETGSIKPGVIGGSKPKVATPKVVEKIAEYKRQNPTMFAWEIRDRLLAERVCDNDTVPSVSSINRIIRTKVQQPPNQPVPASSHSIVSTGSVTQVSSVSTDSAGSSYSISGILGITSPSADTNKRKRDEGIQESPVPNGHSLPGRDFLRKQMRGDLFTQQQLEVLDRVFERQHYSDIFTTTEPIKPEQGVSFPGVPTATLSIPRTTTPGGSPTRGCLAPPTIIALPPEEPPHLQPPLPMTVTDPWSQAGTKH

SEQ ID NO: 7743 - DNA, 736 bp, Homo sapiens
cagacatcttcaccaccacagagcccatcaagcccgagcagaccacagagtattcagccatggcctcgctggctggtgggctggacgacatgaaggccaatctggccagccccacccctgctgacatcgggagcagtgtgccaggcccgcagtcctaccccattgtgacaggtgagggcacctggggcatgggggatgagtgagggagagagagagagataggagtgtgtggtgggaagagtggcttcttggtgtgtttggatgtgattggccaattttgttttaacaaggttatgaggcctgggaacaggtcaggtgctggggccagggttgcagctgtgatgagacatggctggatatgattccaacaaagctggggagaacaaatgccaaatggactgtgggctggaggggacttggggtagggggcaggaaacctcatgccagaggggcccccgtgggtggggctgagtgttcagaggcctagggtttatttctttcatgagaaaggccaccctggtgggcaccaacctcaaggaggaatgggattccttgcagattgatgttggcaggcagaatctgagtcaagaagggtaggtggcgtaagctggatggtgcatggtggatgccaagcagcttccctctggaagtcccagggccagactctttagctgtctgtgtagagattgggagtgtgggtcctggaggtgcactgttgagtctgatcatgccattt

SEQ ID NO: 7744 - protein, 47 aa, Homo sapiens [sequence omitted]

SEQ ID NO: 7745 - DNA, 456 bp, Homo sapiens
agagagattaagtaactcgctacaagaagtcctcaaaccatttcatccctgcccatgagcctgtgcctttgactcaacaccttatttggggctctccagggatcagagatctgtgaactctcaatcccacaggggctgcttgcagacacagtactggcacagaagcattggccacccaggctagaacaggcctgcctcaaaagtcacagagtccgaaccagaatgtcatccttgactcttctgctcctcatttgtccagcgcctgctcacacctctgatgatggagagctcactacctttctaagataaagcttccattcttggcccagcctggctgcttctgaaagccatatgttgcattcagccataatctgcctcctgcagcttcctttaaccagccccagctcttcctccagaggccacagagatcttacctgctgctgaagaacagttcat

SEQ ID NO: 7746 - protein, 30 aa, Homo sapiens
MLHSAIICLLQLPLTSPSSSSRGHRDLTCC

SEQ ID NO: 7747 - DNA, 739 bp, Homo sapiens
caggatgccgctgatggagtacgacgagccggccgaatccgtgctcaccgaggacacctgcgtcacggagccagtggacactgcgcggagaaagacgggcggtcagggccgcagagggctgagggcggcggaccggctgtcaccgcacaaccttaggctctgaagagtttgtagacgtccagcaaggaccacgcatgcgcaagacagcaagtccggcgcatctgagagcagcagaacagggccacgcgaaaagctccttcggatctaccagaaagctccttccttggcatttgggagaagagtgggtcataataaaatgtccggtttctttggaaaagttatattccagtctcaaactattaccttttgaaaggacatttattagagttttttctcattataacagtaatatacgttcattgtagactctttggacagtatgggaaagtataaagaagacatctaaaaacggtattttggtgtatttcctttataccaacattcctgggcatatttagaaatatccatttttctcttaacaaaatcaggattatgccatgtatacagttttttttgttgtggtggttgtttgttttgagacagagtcttgctctgttgcccaggctggagtatagtggtgcgatctcagttcactgcaacctccgcctcccaggtttgagtgattctcctgcctcatcctcccaagtatctaggattacaggcatgcgccaccatgccc

SEQ ID NO: 7748 - protein, 52 aa, Homo sapiens
MPLMEYDEPAESVLTEDTCVTEPVDTARRKTGGQGRRGLRAADRLSPHNLRL

SEQ ID NO: 7749 - DNA, 1165 bp, Homo sapiens
gaattttatttttttgaactgtacgttttggtgggggatcgggttatattttcatgtgttgtctttagtttttgtgtttgtgagatgcgctggtgagagtttgcgtgtgtattttggcttttgtggggctttgggattagggaggggacatcagccgctactccgttcctgcccgcacccatgaagggcagaggattaggccaagcatcacgaatcgtaggttcgccgtgctccgccgcttcgcgctctggacgctcgagaccagcgggaaacaaatgtggttcccgagggggcgcccgctggtcgtcaaaacctcgcgggcccggaggcgccgctgctgggtcagaatcgcagagcccccctcgcggggtaccgaggcccagccgccgtccccttgcccaccctctcccctgtgagtcggtctccccttgcgcctggccagcatgcttcggaccgtccggactcccgcagcgttggcccaaggggcggctcccctcggcggagcaggtgacgaaccacttcggaggacacggaattgacactgcggccctagagatacgggacaaggggccagaacgcggggagtctaggctcagatcggagtcgggatcccgggaaaatcccccatctcccttgcccgcagccctagaatcccagaaacccaactccgcgcagctttcggtttggagagcccgccctggtttgcaagcacagatacatgtgcccacacccgaacacacgcagacaccgccagagagcgagacagcgagcgggcgcctccgtagcagcggcctgcggggcggaaccggagctggcgccgcctcaaggggaaaccgaactgtagtgaccggaaatgtccccaggacagaataagccattccttctgtccacgttgccaggacttctccagctcaacacaccttggtttgtttaatgttacacgagggagaagatttagaggcagagacacatgctggctcaatcggcgaggaaatacgagcagagtctaaacagaaagaaatatggaacggggggagactagactgtggggaaggcaaattggaggcccagaaaaggggctggtgcggaagctcctccaggcccctgggcgctctggcattctgtgagaaggagaaagcagaagccgagaacagagagtgacagg

SEQ ID NO: 7750 - protein, 230 aa, Homo sapiens [sequence omitted]

SEQ ID NO: 7751 - DNA, 4520 bp, Homo sapiens
atggatgatgagcagaatcagaagcaaaggtggaggaaatatttgtcttcccatttgaagaagttgcagttccaaatcttcgattcagcaactctgattgggatacgaagttttacggtttatgcaagttgcatctctcagggctgtgttgtcccggaagtgccttctctcctcccgggtctgcgcggacgcggcctccttacctcatttgtcctcgcccctccccgtccctctacgcgttttggtccctgtttggtgctttctgtttgcagctacggcagtgagtatgtatgtgacggaccccgagtcacccgcggcctgggacccctgcctaccctccgtctcgccagccgagctgtggaactagcgcgtgccccctcgccgacctcggcgtctccggtccgcccctcacttgtggtggggcgcagctcctggtccctcagctgcgcgccgccccacgcggccgggctgcgggtctagggggtccgcatctccctggctttccaagggctaaggtcgtgattctagggcggctgggcgtccagggcctcggtgggggtggcgtgtctgccctttttatctccccgcaaggcccccagtcttctagggaagccagtcagtgaagcgcggaggtccgggcgcgccgagagagagtccagtctttgaggaccgagtagtcctgggccacctcccgcctctgctgtcagaagcagcagctgccgccgtggaatccaaaatttcgggagctgtgaccctttcctcatgtaaaacgagtagtcttggacgatctgggcataggaaccaatcagaaacaatcgcttcagcaatcaagaccattgttcatcatggaggaacccatggatacctctgagcctctatctgcattaccattcactgggcagcagtcttttgagccaagtggcaaatttggacagtatccatcgatgcagatgaaccacatccaggcactggggaagtggaggacatagaacagctcaatcagtgtttgatccaacacttccatctcattaagacaagtttgatttttctttgctttttatttcatggaatacatgagaatctcttaactgttggagtttccaaggaggcatacctcatgacttcagttaatggaaagaacaaaactaaaatgctgtatggccaaagccacaaagggaaggatccacaatttacattcttggagctatcatctgtactgtactgttgtgatctactgattggcattggcatagtagtaggggtcaagtgacagaatccgtgccagcagtctccaggttcagaagcaattcaagaccctgatgatagctctccagcaaccaacacatggtgattgtgccaacttgttgctcagttataatgcagggccagtgattggtttaagtgaagaccatggttgagatcatttgtctttggtctaatagaatttgagtctagtagaatttgagtctccagggaaagagctacttgaccaaattaaactagtagcaggtagagcatgaatgacagcatattataccatcaagatgttcttagagcagtgtatggatggatcgattgtactgccatcagttgtgactgacgttgtattcaaggagaaagagaaacttgtttagaaagcactttgaaagttttttgagtacgggggtgccctgtatcaccccgttatggttgaactttctccttcaaaattaccagacttggcagcagtggcaaattattgggctaaaagacttaatcagacatattctgggttcaaggctcctaatataatacctggtgcaaacattatacttccactcattcagatggttgcatcctgccaggcatccagtgggactgggaatatggacacttgaacattaaacatcctgaagaattttggaatgacaggttacaagtgaacataatcagttctctatattaaaaaaaaaaaaagatttgggcatagattgggctcacataatctttagagagattttttcatttttgtgaaagtacagaaattcttaactgcttatgaaatgctgattgttaaacagcatccacagctattttgtgttgtttccctgaccccaccctgaagaaaagaaaaattatggcatattgaaaacagcagtatgatgtaagagaaaagatcacaaattccttgagggtgggtcttttccatactcataagcctatttataatattcagagtaatttattgacacatattaatattccctcctatcccattaattgccaaatcatcaaacatttattgagcacctactctgtgtagggtgtaagcagtactggggacttacagtgataaaagacatagttttagccttaagtgatgtactgtttcactgaagagatggaatataagaagccaagtaatttatggaattctcttctttgtttttcttttttttttttggcagtggagtcttgctctttaaatagagcaaggctagtctggaactcctgggctcatgtggtcctcccgccttagctttcagtgtagctgggactacaggtgtgaacacagcttggaaatctcttaaccatgggagttaagtctcaaaattctggtgatacaagtggttgaaacttaaaactgtatttaaaaaataggattcgtgaatttgagatagttcataagtctgcaaaaggctgtataaatacatattttacatttactattattaattttgtagtaaatttgagtacagcactctctttatctgtggaaacttcagactctcccctattactttaatttcagtgagacattattaaatataagtgggcttacacatttgttttgctttactgacaaataatacacaacttggaggcttttttttcctttctattcttcctctaaatgttcaacacttttctgattttgtgatttgaggttgtttaatagcttcctgaggctccattgagaccgtatatacgtgacacttaacagtctagccttcctcggtacatatagatatatgatggtggctttgcctgtagtaaattcatgccaaaacataggctttcagtgcctattacatatggctttcagctctctctactgagggatgtaggagtttatttctgaggtctgagcctcttttcctttacttcctttactctttcctaagccttctttataaaaactatgcatgttctattgttttcctttttgattccctttcttttattatccccagtaggagtgacttgtaattctcatatgttagaaaggcagatctcctggttgaagaaaagatccacccaagcaagtcagcatgtttaataatttttgagggggatctcaaatgtgggaaggattgttatataagacaaccaaatgatgacatgagacaataaatgctataggaattatggaggaataattagctatttattttcttggttagggaagagatattattagttgtagaagtaattactaacttctacattttttattgtggaaatcaaaaatatatatatgaaaataaaatgttataattgacttcagtgtcccataaaccagcttcaacaattaccaaattgtgaccaatctttacacacatgcacaggtgtccctcagtatctgtggggcattggttctaggaccacttatggataccaacatctatggatgctcaagtccctgatataaaatggtggactatttgcatataacctgtgtacatcccgtattatttaaatcatccctagatcacttataatacgtaatacaatgtaaatgccatgtaaataactgttatactgtattaaggaataacaacaagaaaaatgtacatgttcagtacagacgcaattttttttgtgtgtggaatattttcattccaaggtcagttgaacccatggacataggaggctgactgtgtgtgtgtgtgtgtgtgtgtgtgtgtgtgtgtgcatacagacacacatatttctgaaatgtaaatattctcttcttaaaaaaattattatcacagctaaacaaattaccagtaattcttttatcctcatatacccggtgttcagattttctagattggctcctaatttttttacagattatttgaatctgattcaattcatgtactgtaatgtttgataacttaagtaccctttataggttctcttttacctcttctttattaaattccttgtaatttgttgtactaaatagattgtcttctagaatttcctgtagtctgaattatgtagtattgtttcacatgttccagtgtcctcttatttcctgtgagttggtagttagatctagaagcttgattaaattcagattttctctctttagatcatcaactttagatcatcaacttggatcatttgtttcattttgcttttgatatgttgttttttagaattacctcttaaaattttgatttaattttataatcatgtaaaatgtttataaatttccaaattcagatcagcaaaacacaataaaatctattcagagaaggcaaaccttc

SEQ ID NO: 7752 - protein, 159 aa, Homo sapiens
MDDEQNQKQRWRKYLSSHLKKLQFQIFDSATLIGIRSFTVYASCISQGCVVPEVPSLLPGLRGRGLLTSFVLAPPRPSTRFGPCLVLSVCSYGSEYVCDGPRVTRGLGPLPTLRLASRAVELARAPSPTSASPVRPSLVVGRSSWSLSCAPPHAAGLRV

SEQ ID NO: 7753 - DNA, 2125 bp, Homo sapiens
gtaggacaacaatgcgcagctgaattgggatgaggggccaggacaaagcagaaatctgctgcagagagcaggaaagatattctgtagcaggatctgggcaagcggcactcatccatatcctttgcattgcaaagagaggagctacctccttcctttttattttccagtttattggtggctcctagaacctctgagaactaactgattttgacctcttaacagttgcctttcaactaccattcatttactgcaagcctactgtgtaacaggcccttgctaaccacttcagatatattgtctcttgtccagcttcaagtgactctcttagggagggattagcctcacctcactagtatggaaatggagacttggagtaatcaagtgacttgctctgaattacacagctgggaagtggtgaagctggaattcaactcaagttatgtctagatctaaaactcatgctcttttctatgctcaaagctgcatatcaaaactgaactttagcatggagtctatgatgactggctcatgtctctccacccagcacctagcccaaggccaagcacagagaaggctcacagtggacacttttggaatgagtagattttttatggaatggtcgagcacactgaactacctggagtaaaggggcatcatgtctgaaactgatgcttaagtggctcagaaaaaaaattctgggagctagagggagagagagacagaggagtgtggtaaaaagttaacattttggggatctgcgtaaaggtatatgaggattctttgtacagattttgcaatttttctccaaatgtgaaattatgtcaaaatataaaattaaaagacaaaattaaaagaatgaatgagagtttgctaggtagagaagcagggggatcttctggcaaaggaacaggataagcaaaagcatcacaagtgtgcgagtcttctgtgttgacaaacaagccctgactctgaatatccaggactagcatggtgtggggagacggggattagacgtatgatgagcagcataacccacaaatggacacatttccctgctacctaagattggaagtaaagactttaggcctacattatacccagcctcaagagttgcaagacataacatgagttctcatggcggctcagtctttgcattggcagtgtctcttcatccagtgactgtgtggaacaatggaagccctagaatcatggctgaaagggacatctagtccaactctctcattttgcagaagggacaactaagatgcaaaatgaagagatttgcaaggccccagcaaaggttagtgttaaaactggcctgcaggccgggtgtggtggctcacacctataatcccagcactttgggaggcctaggagggtggatcacctgagatcaggagtttgagaccagcctgcccaacaaggtgaaaccctgtctctactaaaaacacaaaaattagccaggtgtggtggcacacgcctgtaatcccagctactggggaggctaaggcaggagaatcgcttgaacccaggaggtggaggttgcagtgagccgagattgtgccactgcactccagcctgggcaacaagatcgaaactccgtctcaaaagaaaaaactggcctacatttcacaatccatcactctttctatttgcaccaacgtctaaatgataagggagaagaaatagaaggctagcaagggaagtgactgaatgttaaagtttggatgttttttatttgcacaaacttagtgtctgtacaattttaaaagtaaacaatatagataccaatgttattgtagaaactgttgtcacttaagccaatagcttccaactggtaagtgatattcaattcaggctcctaggtctgaagcagcaatcaaggtgattctcaggaattctcaatgacattggtacccatctggatttgttgaaaagtttaacatccttttgtattattcatgattttgcagttcttcaaattgcaaagtgatggagagagcacacaattttcaaccagcctatgaaatcgttcttgaaaatgtggaaattcatagagatggcttttaatttttcttggagaccgcctttccttatgaaataatgaaatttaaaaatatatatt

SEQ ID NO: 7754 - protein, 68 aa, Homo sapiens
MSRSKTHALFYAQSCISKLNFSMESMMTGSCLSTQHLAQGQAQRRLTVDTFGMSRFFMEWSSTLNYLE

SEQ ID NO: 7755 - DNA, 1812 bp, Homo sapiens
ggaagtgccttctctcctcccgggtctgcgcggacgcggcctccttacctcatttgtcctcgcccctccccgtccctctacgcgttttggtccctgtttggtgctttctgtttgcagctacggcagtgagtatgtatgtgacggaccccgagtcacccgcggcctgggacccctgcctaccctccgtctcgccagccgagctgtggaactagcgcgtgccccctcgccgacctcggcgtctccggtccgcccctcacttgtggtggggcgcagctcctggtccctcagctgcgcgccgccccacgcggccgggctgcgggtctagggggtccgcatctccctggctttccaagggctaaggtcgtgattctagggcggctgggcgtccagggcctcggtgggggtggcgtgtctgccctttttatctccccgcaaggcccccagtcttctagggaagccagtcagtgaagcgcggaggtccgggcgcgccgagagagagtccagtctttgaggaccgagtagtcctgggccacctcccgcctctgctgtcagaagcagcagctgccgccgtggaatccaaaatttcgggagctgtgaccctttcctcatgtaaaacgagtagtcttggacgatctgggcataggaaccaatcagaaacaatcgcttcagcaatcaagaccattgttcatcatggaggaacccatggatacctctgagcctctatctgcattaccattcactgggcagcagtcttttgagccaagtggcaaatttggacagtatccatcgatgcagatgaaccacatccaggcactggggaagtggaggacatagaacagctcaatcagtgtttgatccaacacttccatctcattaagacaagtttgatttttctttgctttttatttcatggaatacatgagaatctcttaactgttggagtttccaaggaggcatacctcatgacttcagttaatggaaagaacaaaactaaaatgctgtatggccaaagccacaaagggaaggatccacaatttacattcttggagctatcatctgtactgtactgttgtgatctactgattggcattggcatagtagtaggggtcaagtgacagaatccgtgccagcagtctccaggttcagaagcaattcaagaccctgatgatagctctccagcaaccaacacatggtgattgtgccaacttgttgctcagttataatgcagggccagtgattggtttaagtgaagaccatggttgagatcatttgtctttggtctaatagaatttgagtctagtagaatttgagtctccagggaaagagctacttgaccaaattaaactagtagcaggtagagcatgaatgacagcatattataccatcaagatgttcttagagcagtgtatggatggatcgattgtactgccatcagttgtgactgacgttgtattcaaggagaaagagaaacttgtttagaaagcactttgaaagttttttgagtacgggggtgccctgtatcaccccgttatggttgaactttctccttcaaaattaccagacttggcagcagtggcaaattattgggctaaaagacttaatcagacatattctgggttcaaggctcctaatataatacctggtgcaaacattatacttccactcattcagatggttgcatcctgccaggcatccagtgggactgggaatatggacacttgaacattaaacatcctgaagaattttggaatgacaggttacaagtgaacataatcagttctctatattaaaaaaaaaaaaagatttgggcat

SEQ ID NO: 7756 - protein, 63 aa, Homo sapiens [sequence omitted]

SEQ ID NO: 7757 - DNA, 4455 bp, Homo sapiens
gtgccttctctcctcccgggtctgcgcggacgcggcctccttacctcatttgtcctcgcccctccccgtccctctacgcgttttggtccctgtttggtgctttctgtttgcagctacggcagtgagtatgtatgtgacggaccccgagtcacccgcggcctgggacccctgcctaccctccgtctcgccagccgagctgtggaactagcgcgtgccccctcgccgacctcggcgtctccggtccgcccctcacttgtggtggggcgcagctcctggtccctcagctgcgcgccgccccacgcggccgggctgcgggtctagggggtccgcatctccctggctttccaagggctaaggtcgtgattctagggcggctgggcgtccagggcctcggtgggggtggcgtgtctgccctttttatctccccgcaaggcccccagtcttctagggaagccagtcagtgaagcgcggaggtccgggcgcgccgagagagagtccagtctttgaggaccgagtagtcctgggccacctcccgcctctgctgtcagaagcagcagctgccgccgtggaatccaaaatttcgggagctgtgaccctttcctcatgtaaaacgagtagtcttggacggctggagtgtagtggcgtgatcatagctcactgtcaactttgaacacttgggctcaagctatcctccctcagcctcccaaggtgggaggtacagatctgggcataggaaccaatcagaaacaatcgcttcagcaatcaagaccattgttcatcatggaggaacccatggatacctctgagcctctatctgcattaccattcactgggcagcagtcttttgagccaagtggcaaatttggacagtatccatcgatgcagatgaaccacatccaggcactggggaagtggaggacatagaacagctcaatcagtgtttgatccaacacttccatctcattaagacaagtttgatttttctttgctttttatttcatggaatacatgagaatctcttaactgttggagtttccaaggaggcatacctcatgacttcagttaatggaaagaacaaaactaaaatgctgtatggccaaagccacaaagggaaggatccacaatttacattcttggagctatcatctgtactgtactgttgtgatctactgattggcattggcatagtagtaggggtcaagtgacagaatccgtgccagcagtctccaggttcagaagcaattcaagaccctgatgatagctctccagcaaccaacacatggtgattgtgccaacttgttgctcagttataatgcagggccagtgattggtttaagtgaagaccatggttgagatcatttgtctttggtctaatagaatttgagtctagtagaatttgagtctccagggaaagagctacttgaccaaattaaactagtagcaggtagagcatgaatgacagcatattataccatcaagatgttcttagagcagtgtatggatggatcgattgtactgccatcagttgtgactgacgttgtattcaaggagaaagagaaacttgtttagaaagcactttgaaagttttttgagtacgggggtgccctgtatcaccccgttatggttgaactttctccttcaaaattaccagacttggcagcagtggcaaattattgggctaaaagacttaatcagacatattctgggttcaaggctcctaatataatacctggtgcaaacattatacttccactcattcagatggttgcatcctgccaggcatccagtgggactgggaatatggacacttgaacattaaacatcctgaagaattttggaatgacaggttacaagtgaacataatcagttctctatattaaaaaaaaaaaaagatttgggcatagattgggctcacataatctttagagagattttttcatttttgtgaaagtacagaaattcttaactgcttatgaaatgctgattgttaaacagcatccacagctattttgtgttgtttccctgaccccaccctgaagaaaagaaaaattatggcatattgaaaacagcagtatgatgtaagagaaaagatcacaaattccttgagggtgggtcttttccatactcataagcctatttataatattcagagtaatttattgacacatattaatattccctcctatcccattaattgccaaatcatcaaacatttattgagcacctactctgtgtagggtgtaagcagtactggggacttacagtgataaaagacatagttttagccttaagtgatgtactgtttcactgaagagatggaatataagaagccaagtaatttatggaattctcttctttgtttttcttttttttttttggcagtggagtcttgctctttaaatagagcaaggctagtctggaactcctgggctcatgtggtcctcccgccttagctttcagtgtagctgggactacaggtgtgaacacagcttggaaatctcttaaccatgggagttaagtctcaaaattctggtgatacaagtggttgaaacttaaaactgtatttaaaaaataggattcgtgaatttgagatagttcataagtctgcaaaaggctgtataaatacatattttacatttactattattaattttgtagtaaatttgagtacagcactctctttatctgtggaaacttcagactctcccctattactttaatttcagtgagacattattaaatataagtgggcttacacatttgttttgctttactgacaaataatacacaacttggaggcttttttttcctttctattcttcctctaaatgttcaacacttttctgattttgtgatttgaggttgtttaatagcttcctgaggctccattgagaccgtatatacgtgacacttaacagtctagccttcctcggtacatatagatatatgatggtggctttgcctgtagtaaattcatgccaaaacataggctttcagtgcctattacatatggctttcagctctctctactgagggatgtaggagtttatttctgaggtctgagcctcttttcctttacttcctttactctttcctaagccttctttataaaaactatgcatgttctattgttttcctttttgattccctttcttttattatccccagtaggagtgacttgtaattctcatatgttagaaaggcagatctcctggttgaagaaaagatccacccaagcaagtcagcatgtttaataatttttgagggggatctcaaatgtgggaaggattgttatataagacaaccaaatgatgacatgagacaataaatgctataggaattatggaggaataattagctatttattttcttggttagggaagagatattattagttgtagaagtaattactaacttctacattttttattgtggaaatcaaaaatatatatatgaaaataaaatgttataattgacttcagtgtcccataaaccagcttcaacaattaccaaattgtgaccaatctttacacacatgcacaggtgtccctcagtatctgtggggcattggttctaggaccacttatggataccaacatctatggatgctcaagtccctgatataaaatggtggactatttgcatataacctgtgtacatcccgtattatttaaatcatccctagatcacttataatacgtaatacaatgtaaatgccatgtaaataactgttatactgtattaaggaataacaacaagaaaaatgtacatgttcagtacagacgcaattttttttgtgtgtggaatattttcattccaaggtcagttgaacccatggacataggaggctgactgtgtgtgtgtgtgtgtgtgtgtgtgtgtgtgtgtgcatacagacacacatatttctgaaatgtaaatattctcttcttaaaaaaattattatcacagctaaacaaattaccagtaattcttttatcctcatatacccggtgttcagattttctagattggctcctaatttttttacagattatttgaatctgattcaattcatgtactgtaatgtttgataacttaagtaccctttataggttctcttttacctcttctttattaaattccttgtaatttgttgtactaaatagattgtcttctagaatttcctgtagtctgaattatgtagtattgtttcacatgttccagtgtcctcttatttcctgtgagttggtagttagatctagaagcttgattaaattcagattttctctctttagatcatcaactttagatcatcaacttggatcatttgtttcattttgcttttgatatgttgttttttagaattacctcttaaaattttgatttaattttataatcatgtaaaatgtttataaatttccaaattcagatcagcaaaacacaataaaatctattcagagaaggcaaaccttc

SEQ ID NO: 7758 - protein, 63 aa, Homo sapiens [sequence omitted]

SEQ ID NO: 7759 - DNA, 3856 bp, Homo sapiens
ctctcctcccgggtctgcgcggacgcggcctccttacctcatttgtcctcgcccctccccgtccctctacgcgttttggtccctgtttggtgctttctgtttgcagctacggcagtgagtatatctgggcataggaaccaatcagaaacaatcgcttcagcaatcaagaccattgttcatcatggaggaacccatggatacctctgagcctctatctgcattaccattcactgggcagcagtcttttgagccaagtggcaaatttggacagtatccatcgatgcagatgaaccacatccaggcactggggaagtggaggacatagaacagctcaatcagtgtttgatccaacacttccatctcattaagacaagtttgatttttctttgctttttatttcatggaatacatgagaatctcttaactgttggagtttccaaggaggcatacctcatgacttcagttaatggaaagaacaaaactaaaatgctgtatggccaaagccacaaagggaaggatccacaatttacattcttggagctatcatctgtactgtactgttgtgatctactgattggcattggcatagtagtaggggtcaagtgacagaatccgtgccagcagtctccaggttcagaagcaattcaagaccctgatgatagctctccagcaaccaacacatggtgattgtgccaacttgttgctcagttataatgcagggccagtgattggtttaagtgaagaccatggttgagatcatttgtctttggtctaatagaatttgagtctagtagaatttgagtctccagggaaagagctacttgaccaaattaaactagtagcaggtagagcatgaatgacagcatattataccatcaagatgttcttagagcagtgtatggatggatcgattgtactgccatcagttgtgactgacgttgtattcaaggagaaagagaaacttgtttagaaagcactttgaaagttttttgagtacgggggtgccctgtatcaccccgttatggttgaactttctccttcaaaattaccagacttggcagcagtggcaaattattgggctaaaagacttaatcagacatattctgggttcaaggctcctaatataatacctggtgcaaacattatacttccactcattcagatggttgcatcctgccaggcatccagtgggactgggaatatggacacttgaacattaaacatcctgaagaattttggaatgacaggttacaagtgaacataatcagttctctatattaaaaaaaaaaaaagatttgggcatagattgggctcacataatctttagagagattttttcatttttgtgaaagtacagaaattcttaactgcttatgaaatgctgattgttaaacagcatccacagctattttgtgttgtttccctgaccccaccctgaagaaaagaaaaattatggcatattgaaaacagcagtatgatgtaagagaaaagatcacaaattccttgagggtgggtcttttccatactcataagcctatttataatattcagagtaatttattgacacatattaatattccctcctatcccattaattgccaaatcatcaaacatttattgagcacctactctgtgtagggtgtaagcagtactggggacttacagtgataaaagacatagttttagccttaagtgatgtactgtttcactgaagagatggaatataagaagccaagtaatttatggaattctcttctttgtttttcttttttttttttggcagtggagtcttgctctttaaatagagcaaggctagtctggaactcctgggctcatgtggtcctcccgccttagctttcagtgtagctgggactacaggtgtgaacacagcttggaaatctcttaaccatgggagttaagtctcaaaattctggtgatacaagtggttgaaacttaaaactgtatttaaaaaataggattcgtgaatttgagatagttcataagtctgcaaaaggctgtataaatacatattttacatttactattattaattttgtagtaaatttgagtacagcactctctttatctgtggaaacttcagactctcccctattactttaatttcagtgagacattattaaatataagtgggcttacacatttgttttgctttactgacaaataatacacaacttggaggcttttttttcctttctattcttcctctaaatgttcaacacttttctgattttgtgatttgaggttgtttaatagcttcctgaggctccattgagaccgtatatacgtgacacttaacagtctagccttcctcggtacatatagatatatgatggtggctttgcctgtagtaaattcatgccaaaacataggctttcagtgcctattacatatggctttcagctctctctactgagggatgtaggagtttatttctgaggtctgagcctcttttcctttacttcctttactctttcctaagccttctttataaaaactatgcatgttctattgttttcctttttgattccctttcttttattatccccagtaggagtgacttgtaattctcatatgttagaaaggcagatctcctggttgaagaaaagatccacccaagcaagtcagcatgtttaataatttttgagggggatctcaaatgtgggaaggattgttatataagacaaccaaatgatgacatgagacaataaatgctataggaattatggaggaataattagctatttattttcttggttagggaagagatattattagttgtagaagtaattactaacttctacattttttattgtggaaatcaaaaatatatatatgaaaataaaatgttataattgacttcagtgtcccataaaccagcttcaacaattaccaaattgtgaccaatctttacacacatgcacaggtgtccctcagtatctgtggggcattggttctaggaccacttatggataccaacatctatggatgctcaagtccctgatataaaatggtggactatttgcatataacctgtgtacatcccgtattatttaaatcatccctagatcacttataatacgtaatacaatgtaaatgccatgtaaataactgttatactgtattaaggaataacaacaagaaaaatgtacatgttcagtacagacgcaattttttttgtgtgtggaatattttcattccaaggtcagttgaacccatggacataggaggctgactgtgtgtgtgtgtgtgtgtgtgtgtgtgtgtgtgtgcatacagacacacatatttctgaaatgtaaatattctcttcttaaaaaaattattatcacagctaaacaaattaccagtaattcttttatcctcatatacccggtgttcagattttctagattggctcctaatttttttacagattatttgaatctgattcaattcatgtactgtaatgtttgataacttaagtaccctttataggttctcttttacctcttctttattaaattccttgtaatttgttgtactaaatagattgtcttctagaatttcctgtagtctgaattatgtagtattgtttcacatgttccagtgtcctcttatttcctgtgagttggtagttagatctagaagcttgattaaattcagattttctctctttagatcatcaactttagatcatcaacttggatcatttgtttcattttgcttttgatatgttgttttttagaattacctcttaaaattttgatttaattttataatcatgtaaaatgtttataaatttccaaattcagatcagcaaaacacaataaaatctattcagagaaggcaaaccttc

SEQ ID NO: 7760 - protein, 63 aa, Homo sapiens [sequence omitted]

SEQ ID NO: 7761 - DNA, 1367 bp, Homo sapiens
attaaaaaaaaaaaaagatttgggcatagattgggctcacataatctttagagagattttttcatttttgtgaaagtacagaaattcttaactgcttatgaaatgctgattgttaaacagcatccacagctattttgtgttgtttccctgaccccaccctgaagaaaagaaaaattatggcatattgaaaacagcagtatgatgtaagagaaaagatcacaaattccttgagggtgggtcttttccatactcataagcctatttataatattcagagtaatttattgacacatattaatattccctcctatcccattaattgccaaatcatcaaacatttattgagcacctactctgtgtagggtgtaagcagtactggggacttacagtgataaaagacatagttttagccttaagtgatgtactgtttcactgaagagatggaatataagaagccaagtaatttatggaattctcttctttgtttttcttttttttttttggcagtggagtcttgctctttaaatagagcaaggctagtctggaactcctgggctcatgtggtcctcccgccttagctttcagtgtagctgggactacaggtgtgaacacagcttggaaatctcttaaccatgggagttaagtctcaaaattctggtgatacaagtggttgaaacttaaaactgtatttaaaaaataggattcgtgaatttgagatagttcataagtctgcaaaaggctgtataaatacatattttacatttactattattaattttgtagtaaatttgagtacagcactctctttatctgtggaaacttcagactctcccctattactttaatttcagtgagacattattaaatataagtgggcttacacatttgttttgctttactgacaaataatacacaacttggaggcttttttttcctttctattcttcctctaaatgttcaacacttttctgattttgtgatttgaggttgtttaatagcttcctgaggctccattgagaccgtatatacgtgacacttaacagtctagccttcctcggtacatatagatatatgatggtggctttgcctgtagtaaattcatgtagtattgtttcacatgttccagtgtcctcttatttcctgtgagttggtagttagatctagaagcttgattaaattcagattttctctctttagatcatcaactttagatcatcaacttggatcatttgtttcattttgcttttgatatgttgttttttagaattacctcttaaaattttgatttaattttataatcatgtaaaatgtttataaatttccaaattcagatcagcaaaacacaataaaatctattcagagaaggc

SEQ ID NO: 7762 - protein, 52 aa, Homo sapiens
MYCFTEEMEYKKPSNLWNSLLCFSFFFLAVESCSLNRARLVWNSWAHVVLPP

SEQ ID NO: 7763 - DNA, 1348 bp, Homo sapiens
ggtgactagagctgtgttgtccccggaagtgccttccctcccgggtctgcgcggacgcggcctccttacctcatttgtcctcgcccctccccgtccctctacgcgttttggttcccggttggtgcttcctgttcgcagctgcggcacttcaaggttactgactttttatgatgtttggtggctatgagactatagaagcatacgaagatgatctttatcgagatgagtcatctagtgaactgagtgttgatagtgaggtggaatttcaactctatagccaaattcattatgcccaagatcttgatgatgtcatcagggaggaagagcatgaagaaaagaactctgggaattcggaatcttcgagtagtaaaccaaatcagaagaagctaatcgtcctttcagatagtgaggtcatccagctgtcagatgggtcagaggtcatcactttgtctgatgaagacagtatttatagatgtaaaggaaagaatgttagagttcaagcacaagaaaatgcccatggtctttcttcttctcttcaatctaatgagctggttgataagaaatgcaagagtgatattgagaagcctaaatctgaagagagatcaggtgtaatccgagaggtcatgattatagaggtcagttcaagtgaagaggaagagagcaccatttcagaaggtgataatgtggaaagctggatgctactgggatgtgaagtagatgataaagatgatgatatccttctcaaccttgtgggatgtgaaaactctgttactgaaggagaagatggtataaactggtccatcagtgacaaagacattgaggcccagatagctaataaccgaacacctggaagatggacccagcggtactattcagccaacaaaaacattatctgtagaaattgtgacaaacgtggtcatttatcaaaaaactgccccttaccacgaaaagttcgtcgctgcttcctgtgctccaggagaggacatctcctgtattcctgtccagcccccctttgcgaatactgtcctgtgcctaagatgttggaccactcatgtcttttcagacattcctgggataaacagtgtgaccgatgtcatatgctaggccactatacagatgcttgcacagaaatctggaggcagtatcacctaacgaccaaacctggaccacccaaaaagccgaagaccccttcaagaccatcagccttagcatattgctatcactgcgcgcaaaaaggccattatggacacgaatgtccagaaagagaagtgtatgacccgtctccagtatctccattcatctgctactatgatgacaaatatgaaattcaggagagagaaaagagact

SEQ ID NO: 7764 - protein, 392 aa, Homo sapiens
MMFGGYETIEAYEDDLYRDESSSELSVDSEVEFQLYSQIHYAQDLDDVIREEEHEEKNSGNSESSSSKPNQKKLIVLSDSEVIQLSDGSEVITLSDEDSIYRCKGKNVRVQAQENAHGLSSSLQSNELVDKKCKSDIEKPKSEERSGVIREVMIIEVSSSEEEESTISEGDNVESWMLLGCEVDDKDDDILLNLVGCENSVTEGEDGINWSISDKDIEAQIANNRTPGRWTQRYYSANKNIICRNCDKRGHLSKNCPLPRKVRRCFLCSRRGHLLYSCPAPLCEYCPVPKMLDHSCLFRHSWDKQCDRCHMLGHYTDACTEIWRQYHLTTKPGPPKKPKTPSRPSALAYCYHCAQKGHYGHECPEREVYDPSPVSPFICYYDDKYEIQEREK

SEQ ID NO: 7765 - DNA, 1919 bp, Homo sapiens
ggtgactagagctgtgttgtccccggaagtgccttccctcccgggtctgcgcggacgcggcctccttacctcatttgtcctcgcccctccccgtccctctacgcgttttggttcccggttggtgcttcctgttcgcagctgcggcacttcaaggttactgactttttatgatgtttggtggctatgagactatagaagcatacgaagatgatctttatcgagatgagtcatctagtgaactgagtgttgatagtgaggtggaatttcaactctatagccaaattcattatgcccaagatcttgatgatgtcatcagggaggaagagcatgaagaaaagaactctgggaattcggaatcttcgagtagtaaaccaaatcagaagaagctaatcgtcctttcagatagtgaggtcatccagctgtcagatgggtcagaggtcatcactttgtctgatgaagacagtatttatagatgtaaaggaaagaatgttagagttcaagcacaagaaaatgcccatggtctttcttcttctcttcaatctaatgagctggttgataagaaatgcaagagtgatattgagaagcctaaatctgaagagagatcaggtgtaatccgagaggtcatgattatagaggtcagttcaagtgaagaggaagagagcaccatttcagaaggtgataatgtggaaagctggatgctactgggatgtgaagtagatgataaagatgatgatatccttctcaaccttgtgggatgtgaaaactctgttactgaaggagaagatggtataaactggtccatcagtgacaaagacattgaggcccagatagctaataaccgaacacctggaagatggacccagcggtactattcagccaacaaaaacattatctgtagaaattgtgacaaacgtggtcatttatcaaaaaactgccccttaccacgaaaagttcgtcgctgcttcctgtgctccaggagaggacatctcctgtattcctgtccagcccccctttgcgaatactgtcctgtgcctaagatgttggaccactcatgtcttttcagacattcctgggataaacagtgtgaccgatgtcatatgctaggccactatacagatgcttgcacagaaatctggaggcagtatcacctaacgaccaaacctggaccacccaaaaagccgaagaccccttcaagaccatcagccttagcatattgctatcactgcgcgcaaaaaggccattatggacacgaatgtccagaaagagaagtgtatgacccgtctccagtatctccattcatctgctactatgatgacaaatatgaaattcaggagagagaaaagagactaaaacaaaaaataaaagtactcaagaaaaatggggttatcccagagccatccaagctaccttatataaaagcagcaaatgagaacccccaccatgatataaggaagggccgtgcctcatggaaaagcaacaggtggcctcaagaaaataaagaaacacaaaaagaaatgaagaacaagaatagaaactgggagaagcacaggaaggctgacagacatcgtgaagtggatgaggattttcccaggggccccaaaacctactcttctcctggcagttttaaaacccagaagccttctaagccctttcaccgttcatcacattaccacacgtcaagagaagacaagtctcccaaggaaggcaagaggggcaagcagaagaaaaaggagaggtgctgggaagatgatgacaatgataacttatttcttattaagcagagaaaaaaaaagtcttaagccgtcaggcagcctctgatgtggcttttcattgttcatttggcctttgtgtctataaccttctggcactgtgtttattatctatgattaaataaagtgagtttttggttttgttttttt

SEQ ID NO: 7766 - protein, 543 aa, Homo sapiens; identical to SEQ ID NO: 1091

SEQ ID NO: 7767 - DNA, 2680 bp, Homo sapiens
ggtgactagagctgtgttgtccccggaagtgccttccctcccgggtctgcgcggacgcggcctccttacctcatttgtcctcgcccctccccgtccctctacgcgttttggttcccggttggtgcttcctgttcgcagctgcggcacttcaaggttactgactttttatgatgtttggtggctatgagactatagaagcatacgaagatgatctttatcgagatgagtcatctagtgaactgagtgttgatagtgaggtggaatttcaactctatagccaaattcattatgcccaagatcttgatgatgtcatcagggaggaagagcatgaagaaaagaactctgggaattcggaatcttcgagtagtaaaccaaatcagaagaagctaatcgtcctttcagatagtgaggtcatccagctgtcagatgggtcagaggtcatcactttgtctgatgaagacagtatttatagatgtaaaggaaagaatgttagagttcaagcacaagaaaatgcccatggtctttcttcttctcttcaatctaatgagctggttgataagaaatgcaagagtgatattgagaagcctaaatctgaagagagatcaggtgtaatccgagaggtcatgattatagaggtcagttcaagtgaagaggaagagagcaccatttcagaaggtgataatgtggaaagctggatgctactgggatgtgaagtagatgataaagatgatgatatccttctcaaccttgtgggatgtgaaaactctgttactgaaggagaagatggtataaactggtccatcagtgacaaagacattgaggcccagatagctaataaccgaacacctggaagatggacccagcggtactattcagccaacaaaaacattatctgtagaaattgtgacaaacgtggtcatttatcaaaaaactgccccttaccacgaaaagttcgtcgctgcttcctgtgctccaggagaggacatctcctgtattcctgtccagcccccctttgcgaatactgtcctgtgcctaagatgttggaccactcatgtcttttcagacattcctgggataaacagtgtgaccgatgtcatatgctaggccactatacagatgcttgcacagaaatctggaggcagtatcacctaacgaccaaacctggaccacccaaaaagccgaagaccccttcaagaccatcagccttagcatattgctatcactgcgcgcaaaaaggccattatggacacgaatgtccagaaagagaagtgtatgacccgtctccagtatctccattcatctgctactatgatgacaaatatgaaattcaggagagagaaaagagactaaaacaaaaaataaaagtactcaagaaaaatggggttatcccagagccatccaagctaccttatataaaagcagcaaatgagaacccccaccatgatataaggaagggccgtgcctcatggaaaagcaacaggtggcctcaagaaaataaagaaacacaaaaagaaatgaagaacaagaatagaaactgggagaagcacaggaaggctgacagacatcgtgaagtggatgaggattttcccaggggccccaaaacctactcttctcctggcagttttaaaacccagaagccttctaagccctttcaccgttcatcacattaccacacgtcaagagaagacaagtctcccaaggaaggcaagaggggcaagcagaagaaaaaggagaggtgctgggaagatgatgacaatgataacttatttcttattaagcagagaaaaaaaaagtcttaagccgtcaggcagcctctgatgtggcttttcattgttcatttggcctttgtgtctataaccttctggcactgtgtttattatctatgattaaataaagtgagtttttggttttgtttttttaatttcagccattcctagagttactgaatatccatggagatctcaattctctgtgtccaacaggatattaggtaagaaagtacaaagataaacctggacttctcctattccaatatgtcatctttactcagaatcctagggataggtagaagaattcatcttttcaagaaagtgttttaaaaatactttgggaaaaaaactgcatcaaaggtaatttatcctcaaattaaatccttgcaggaagagaaattaacactaagaaaaagtcatcaatatttttcaactttttttttttttttttttactttggaaaggacaataactataaacctatatccagattttctttctgctgaagctgttgtcagaatcttcctttggacaaaacatcactagctgactataaaaacaaaagtgtcatcattgaagccctgaagaggcagggaattgagcttcagcaaaatacaggaaaagaactatccagtataaatgtcagaagacagatttcctaaacaagtaaaagagacatcaaaaattttaacataatcacaatgaaatcattttttaccacttttacagcggtgtttcaagcggactgtcactcagatctgcagagatgaatattactcaaaaaatttttttgttctcttgcatttttttcaactaccgcaaagctatacagatttttttgtacttgtggatcttttgtacttctcataacctaatgtcagactaagaaaaataaaatatctgagagtaaa

SEQ ID NO: 7768 - protein, 543 aa, Homo sapiens; identical to SEQ ID NO: 1091

SEQ ID NO: 7769 - DNA, 1028 bp, Homo sapiens
tgtgttgtccccggaagtgccttccctcccgggtctgcgcggacgcggcctccttacctcatttgtcctcgcccctccccgtccctctacgcgttttggttcccggttggtgcttcctgttcgcagctgcggcacttcaaggttactgactttttatgatgtttggtggctatgagactatagaagcatacgaagatgatctttatcgagatgagtcatctagtgaactgagtgttgatagtgaggtggaatttcaactctatagccaaattcattatgcccaagatcttgatgatgtcatcagggaggaagagcatgaagaaaagaactctgggaattcggaatcttcgagtagtaaaccaaatcagaagaagctaatcgtcctttcagatagtgaggtcatccagctgtcagatgggtcagaggtcatcactttgtctgatgaagacagtatttatagatgtaaaggaaagaatgttagagttcaagcacaagaaaatgcccatggtctttcttcttctcttcaatctaatgagctggttgataagaaatgcaagagtgatattgagaagcctaaatctgaagagagatcaggtgtaatccgagaggtcatgattatagaggtcagttcaagtgaagaggaagagagcaccatttcagaaggtgataatgtggaaagctggatgctactgggatgtgaagtagatgataaagatgatgatatccttctcaaccttgtgggatgtgaaaactctgttactgaaggttagtatcatattggccattttgaaagtagtatcatctttcataaggaggactgcttttcctagagaaaagaccaatagggtctactccgtttaattcctcactttttggtcttgttttttggtttgtttctcatgcgactctcttaccagtggctactctaatggtggtttgtctgaacgtcagaaagagtatgtcagaataccaaagacactctgcttctgctgtaagcagattcatagctgcttcttcctgtttggcta

SEQ ID NO: 7770 - protein, 204 aa, Homo sapiens
MMFGGYETIEAYEDDLYRDESSSELSVDSEVEFQLYSQIHYAQDLDDVIREEEHEEKNSGNSESSSSKPNQKKLIVLSDSEVIQLSDGSEVITLSDEDSIYRCKGKNVRVQAQENAHGLSSSLQSNELVDKKCKSDIEKPKSEERSGVIREVMIIEVSSSEEEESTISEGDNVESWMLLGCEVDDKDDDILLNLVGCENSVTEG

SEQ ID NO: 7771 - DNA, 1200 bp, Homo sapiens
gtccctctacgcgttttggttcccggttggtgcttcctgttcgcagctgcggcagtgagagaagatggtataaactggtccatcagtgacaaagacattgaggcccagatagctaataaccgaacacctggaagatggacccagcggtactattcagccaacaaaaacattatctgtagaaattgtgacaaacgtggtcatttatcaaaaaactgccccttaccacgaaaagttcgtcgctgcttcctgtgctccaggagaggacatctcctgtattcctgtccagcccccctttgcgaatactgtcctgtgcctaagatgttggaccactcatgtcttttcagacattcctgggataaacagtgtgaccgatgtcatatgctaggccactatacagatgcttgcacagaaatctggaggcagtatcacctaacgaccaaacctggaccacccaaaaagccgaagaccccttcaagaccatcagccttagcatattgctatcactgcgcgcaaaaaggccattatggacacgaatgtccagaaagagaagtgtatgacccgtctccagtatctccattcatctgctactatgatgacaaatatgaaattcaggagagagaaaagagactaaaacaaaaaataaaagtactcaagaaaaatggggttatcccagagccatccaagctaccttatataaaagcagcaaatgagaacccccaccatgatataaggaagggccgtgcctcatggaaaagcaacaggtggcctcaagaaaataaagaaacacaaaaagaaatgaagaacaagaatagaaactgggagaagcacaggaaggctgacagacatcgtgaagtggatgaggattttcccaggggccccaaaacctactcttctcctggcagttttaaaacccagaagccttctaagccctttcaccgttcatcacattaccacacgtcaagagaagacaagtctcccaaggaaggcaagaggggcaagcagaagaaaaaggagaggtgctgggaagatgatgacaatgataacttatttcttattaagcagagaaaaaaaaagtcttaagccgtcaggcagcctctgatgtggcttttcattgttcatttggcctttgtgtctataaccttctggcactgtgtttattatctatgattaaataaagtgagtttttggttttgttttttt

SEQ ID NO: 7772 - protein, 253 aa, Homo sapiens
MLDHSCLFRHSWDKQCDRCHMLGHYTDACTEIWRQYHLTTKPGPPKKPKTPSRPSALAYCYHCAQKGHYGHECPEREVYDPSPVSPFICYYDDKYEIQEREKRLKQKIKVLKKNGVIPEPSKLPYIKAANENPHHDIRKGRASWKSNRWPQENKETQKEMKNKNRNWEKHRKADRHREVDEDFPRGPKTYSSPGSFKTQKPSKPFHRSSHYHTSREDKSPKEGKRGKQKKKERCWEDDDNDNLFLIKQRKKKS

SEQ ID NO: 7773 - DNA, 1961 bp, Homo sapiens
gtccctctacgcgttttggttcccggttggtgcttcctgttcgcagctgcggcagtgagagaagatggtataaactggtccatcagtgacaaagacattgaggcccagatagctaataaccgaacacctggaagatggacccagcggtactattcagccaacaaaaacattatctgtagaaattgtgacaaacgtggtcatttatcaaaaaactgccccttaccacgaaaagttcgtcgctgcttcctgtgctccaggagaggacatctcctgtattcctgtccagcccccctttgcgaatactgtcctgtgcctaagatgttggaccactcatgtcttttcagacattcctgggataaacagtgtgaccgatgtcatatgctaggccactatacagatgcttgcacagaaatctggaggcagtatcacctaacgaccaaacctggaccacccaaaaagccgaagaccccttcaagaccatcagccttagcatattgctatcactgcgcgcaaaaaggccattatggacacgaatgtccagaaagagaagtgtatgacccgtctccagtatctccattcatctgctactatgatgacaaatatgaaattcaggagagagaaaagagactaaaacaaaaaataaaagtactcaagaaaaatggggttatcccagagccatccaagctaccttatataaaagcagcaaatgagaacccccaccatgatataaggaagggccgtgcctcatggaaaagcaacaggtggcctcaagaaaataaagaaacacaaaaagaaatgaagaacaagaatagaaactgggagaagcacaggaaggctgacagacatcgtgaagtggatgaggattttcccaggggccccaaaacctactcttctcctggcagttttaaaacccagaagccttctaagccctttcaccgttcatcacattaccacacgtcaagagaagacaagtctcccaaggaaggcaagaggggcaagcagaagaaaaaggagaggtgctgggaagatgatgacaatgataacttatttcttattaagcagagaaaaaaaaagtcttaagccgtcaggcagcctctgatgtggcttttcattgttcatttggcctttgtgtctataaccttctggcactgtgtttattatctatgattaaataaagtgagtttttggttttgtttttttaatttcagccattcctagagttactgaatatccatggagatctcaattctctgtgtccaacaggatattaggtaagaaagtacaaagataaacctggacttctcctattccaatatgtcatctttactcagaatcctagggataggtagaagaattcatcttttcaagaaagtgttttaaaaatactttgggaaaaaaactgcatcaaaggtaatttatcctcaaattaaatccttgcaggaagagaaattaacactaagaaaaagtcatcaatatttttcaactttttttttttttttttttactttggaaaggacaataactataaacctatatccagattttctttctgctgaagctgttgtcagaatcttcctttggacaaaacatcactagctgactataaaaacaaaagtgtcatcattgaagccctgaagaggcagggaattgagcttcagcaaaatacaggaaaagaactatccagtataaatgtcagaagacagatttcctaaacaagtaaaagagacatcaaaaattttaacataatcacaatgaaatcattttttaccacttttacagcggtgtttcaagcggactgtcactcagatctgcagagatgaatattactcaaaaaatttttttgttctcttgcatttttttcaactaccgcaaagctatacagatttttttgtacttgtggatcttttgtacttctcataacctaatgtcagactaagaaaaataaaatatctgagagtaaa

SEQ ID NO: 7774 - protein, 253 aa, Homo sapiens; identical to SEQ ID NO: 7772

SEQ ID NO: 7775 - DNA, 1241 bp, Homo sapiens
tcccggttggtgcttcctgttcgcagctgcggcagtgaatacctccccaaccccctctccaccaaactcctggtaaccaccattttattctctacttctgagaagatggtataaactggtccatcagtgacaaagacattgaggcccagatagctaataaccgaacacctggaagatggacccagcggtactattcagccaacaaaaacattatctgtagaaattgtgacaaacgtggtcatttatcaaaaaactgccccttaccacgaaaagttcgtcgctgcttcctgtgctccaggagaggacatctcctgtattcctgtccagcccccctttgcgaatactgtcctgtgcctaagatgttggaccactcatgtcttttcagacattcctgggataaacagtgtgaccgatgtcatatgctaggccactatacagatgcttgcacagaaatctggaggcagtatcacctaacgaccaaacctggaccacccaaaaagccgaagaccccttcaagaccatcagccttagcatattgctatcactgcgcgcaaaaaggccattatggacacgaatgtccagaaagagaagtgtatgacccgtctccagtatctccattcatctgctactatgatgacaaatatgaaattcaggagagagaaaagagactaaaacaaaaaataaaagtactcaagaaaaatggggttatcccagagccatccaagctaccttatataaaagcagcaaatgagaacccccaccatgatataaggaagggccgtgcctcatggaaaagcaacaggtggcctcaagaaaataaagaaacacaaaaagaaatgaagaacaagaatagaaactgggagaagcacaggaaggctgacagacatcgtgaagtggatgaggattttcccaggggccccaaaacctactcttctcctggcagttttaaaacccagaagccttctaagccctttcaccgttcatcacattaccacacgtcaagagaagacaagtctcccaaggaaggcaagaggggcaagcagaagaaaaaggagaggtgctgggaagatgatgacaatgataacttatttcttattaagcagagaaaaaaaaagtcttaagccgtcaggcagcctctgatgtggcttttcattgttcatttggcctttgtgtctataaccttctggcactgtgtttattatctatgattaaataaagtgagtttttggttttgttttttt

SEQ ID NO: 7776 - protein, 253 aa, Homo sapiens; identical to SEQ ID NO: 7772

SEQ ID NO: 7777 - DNA, 2002 bp, Homo sapiens
tcccggttggtgcttcctgttcgcagctgcggcagtgaatacctccccaaccccctctccaccaaactcctggtaaccaccattttattctctacttctgagaagatggtataaactggtccatcagtgacaaagacattgaggcccagatagctaataaccgaacacctggaagatggacccagcggtactattcagccaacaaaaacattatctgtagaaattgtgacaaacgtggtcatttatcaaaaaactgccccttaccacgaaaagttcgtcgctgcttcctgtgctccaggagaggacatctcctgtattcctgtccagcccccctttgcgaatactgtcctgtgcctaagatgttggaccactcatgtcttttcagacattcctgggataaacagtgtgaccgatgtcatatgctaggccactatacagatgcttgcacagaaatctggaggcagtatcacctaacgaccaaacctggaccacccaaaaagccgaagaccccttcaagaccatcagccttagcatattgctatcactgcgcgcaaaaaggccattatggacacgaatgtccagaaagagaagtgtatgacccgtctccagtatctccattcatctgctactatgatgacaaatatgaaattcaggagagagaaaagagactaaaacaaaaaataaaagtactcaagaaaaatggggttatcccagagccatccaagctaccttatataaaagcagcaaatgagaacccccaccatgatataaggaagggccgtgcctcatggaaaagcaacaggtggcctcaagaaaataaagaaacacaaaaagaaatgaagaacaagaatagaaactgggagaagcacaggaaggctgacagacatcgtgaagtggatgaggattttcccaggggccccaaaacctactcttctcctggcagttttaaaacccagaagccttctaagccctttcaccgttcatcacattaccacacgtcaagagaagacaagtctcccaaggaaggcaagaggggcaagcagaagaaaaaggagaggtgctgggaagatgatgacaatgataacttatttcttattaagcagagaaaaaaaaagtcttaagccgtcaggcagcctctgatgtggcttttcattgttcatttggcctttgtgtctataaccttctggcactgtgtttattatctatgattaaataaagtgagtttttggttttgtttttttaatttcagccattcctagagttactgaatatccatggagatctcaattctctgtgtccaacaggatattaggtaagaaagtacaaagataaacctggacttctcctattccaatatgtcatctttactcagaatcctagggataggtagaagaattcatcttttcaagaaagtgttttaaaaatactttgggaaaaaaactgcatcaaaggtaatttatcctcaaattaaatccttgcaggaagagaaattaacactaagaaaaagtcatcaatatttttcaactttttttttttttttttttactttggaaaggacaataactataaacctatatccagattttctttctgctgaagctgttgtcagaatcttcctttggacaaaacatcactagctgactataaaaacaaaagtgtcatcattgaagccctgaagaggcagggaattgagcttcagcaaaatacaggaaaagaactatccagtataaatgtcagaagacagatttcctaaacaagtaaaagagacatcaaaaattttaacataatcacaatgaaatcattttttaccacttttacagcggtgtttcaagcggactgtcactcagatctgcagagatgaatattactcaaaaaatttttttgttctcttgcatttttttcaactaccgcaaagctatacagatttttttgtacttgtggatcttttgtacttctcataacctaatgtcagactaagaaaaataaaatatctgagagtaaa

SEQ ID NO: 7778 - protein, 253 aa, Homo sapiens; identical to SEQ ID NO: 7772

SEQ ID NO: 7779 - DNA, 1221 bp, Homo sapiens
cctgttcgcagctgcggcagtgagtatgtgtgtgacggacccccgccgcccgcggctcgggacccctgcctaccctccttcttgcccgccgggctgtggaactagcgcgtgccccctcgccggcctcgacgtctcccgtccgcccctcactcgtggcagggcgcagctcctggagaatctgagcatggggaataaagtcaggaaggatcgcaagtgaggattatattaatatgataattagcacgcttcaaggttactgactttttatgatgtttggtggctatgagactatagaagcatacgaagatgatctttatcgagatgagtcatctagtgaactgagtgttgatagtgaggtggaatttcaactctatagccaaattcattatgcccaagatcttgatgatgtcatcagggaggaagagcatgaagaaaagaactctgggaattcggaatcttcgagtagtaaaccaaatcagaagaagctaatcgtcctttcagatagtgaggtcatccagctgtcagatgggtcagaggtcatcactttgtctgatgaagacagtatttatagatgtaaaggaaagaatgttagagttcaagcacaagaaaatgcccatggtctttcttcttctcttcaatctaatgagctggttgataagaaatgcaagagtgatattgagaagcctaaatctgaagagagatcaggtgtaatccgagaggtcatgattatagaggtcagttcaagtgaagaggaagagagcaccatttcagaaggtgataatgtggaaagctggatgctactgggatgtgaagtagatgataaagatgatgatatccttctcaaccttgtgggatgtgaaaactctgttactgaaggccaagaataaaatctttatgaactaacaagatgaattaaagatggaatgattcatttctatggttaggttttaattaatacatgggggatgattttggcactttttcaaagaatttgtttctgtgtatctgaatttgcacctactctgtaacctaactgcgatttataaaatgaaacaatctcttctaatttggcacttgataggtgctttgactttaaaaggcaagtgtatttttctgtcacgaatatcttgtcattctaaaataagtaaaaacaatggattgatgaaacttcttcactgcttttttctttgtgtataacaaatacattgatattttactggc

SEQ ID NO: 7780 - protein, 206 aa, Homo sapiens
MMFGGYETIEAYEDDLYRDESSSELSVDSEVEFQLYSQIHYAQDLDDVIREEEHEEKNSGNSESSSSKPNQKKLIVLSDSEVIQLSDGSEVITLSDEDSIYRCKGKNVRVQAQENAHGLSSSLQSNELVDKKCKSDIEKPKSEERSGVIREVMIIEVSSSEEEESTISEGDNVESWMLLGCEVDDKDDDILLNLVGCENSVTEGQE

SEQ ID NO: 7781 - DNA, 2793 bp, Homo sapiens
gtgacggacccccgccgcccgcggctcgggacccctgcctaccctccttcttgcccgccgggctgtggaactagcgcgtgccccctcgccggcctcgacgtctcccgtccgcccctcactcgtggcagggcgcagctcctggtccgtcacctgcgcgccgccccacgcggccgggctgcgggtctagggggtccgcgtctccctggctttccaagggctaatgccgtgattctagagcggctgggcgtctagggcctcgcttcaaggttactgactttttatgatgtttggtggctatgagactatagaagcatacgaagatgatctttatcgagatgagtcatctagtgaactgagtgttgatagtgaggtggaatttcaactctatagccaaattcattatgcccaagatcttgatgatgtcatcagggaggaagagcatgaagaaaagaactctgggaattcggaatcttcgagtagtaaaccaaatcagaagaagctaatcgtcctttcagatagtgaggtcatccagctgtcagatgggtcagaggtcatcactttgtctgatgaagacagtatttatagatgtaaaggaaagaatgttagagttcaagcacaagaaaatgcccatggtctttcttcttctcttcaatctaatgagctggttgataagaaatgcaagagtgatattgagaagcctaaatctgaagagagatcaggtgtaatccgagaggtcatgattatagaggtcagttcaagtgaagaggaagagagcaccatttcagaaggtgataatgtggaaagctggatgctactgggatgtgaagtagatgataaagatgatgatatccttctcaaccttgtgggatgtgaaaactctgttactgaaggagaagatggtataaactggtccatcagtgacaaagacattgaggcccagatagctaataaccgaacacctggaagatggacccagcggtactattcagccaacaaaaacattatctgtagaaattgtgacaaacgtggtcatttatcaaaaaactgccccttaccacgaaaagttcgtcgctgcttcctgtgctccaggagaggacatctcctgtattcctgtccagcccccctttgcgaatactgtcctgtgcctaagatgttggaccactcatgtcttttcagacattcctgggataaacagtgtgaccgatgtcatatgctaggccactatacagatgcttgcacagaaatctggaggcagtatcacctaacgaccaaacctggaccacccaaaaagccgaagaccccttcaagaccatcagccttagcatattgctatcactgcgcgcaaaaaggccattatggacacgaatgtccagaaagagaagtgtatgacccgtctccagtatctccattcatctgctactatgatgacaaatatgaaattcaggagagagaaaagagactaaaacaaaaaataaaagtactcaagaaaaatggggttatcccagagccatccaagctaccttatataaaagcagcaaatgagaacccccaccatgatataaggaagggccgtgcctcatggaaaagcaacaggtggcctcaagaaaataaagaaacacaaaaagaaatgaagaacaagaatagaaactgggagaagcacaggaaggctgacagacatcgtgaagtggatgaggattttcccaggggccccaaaacctactcttctcctggcagttttaaaacccagaagccttctaagccctttcaccgttcatcacattaccacacgtcaagagaagacaagtctcccaaggaaggcaagaggggcaagcagaagaaaaaggagaggtgctgggaagatgatgacaatgataacttatttcttattaagcagagaaaaaaaaagtcttaagccgtcaggcagcctctgatgtggcttttcattgttcatttggcctttgtgtctataaccttctggcactgtgtttattatctatgattaaataaagtgagtttttggttttgtttttttaatttcagccattcctagagttactgaatatccatggagatctcaattctctgtgtccaacaggatattaggtaagaaagtacaaagataaacctggacttctcctattccaatatgtcatctttactcagaatcctagggataggtagaagaattcatcttttcaagaaagtgttttaaaaatactttgggaaaaaaactgcatcaaaggtaatttatcctcaaattaaatccttgcaggaagagaaattaacactaagaaaaagtcatcaatatttttcaactttttttttttttttttttactttggaaaggacaataactataaacctatatccagattttctttctgctgaagctgttgtcagaatcttcctttggacaaaacatcactagctgactataaaaacaaaagtgtcatcattgaagccctgaagaggcagggaattgagcttcagcaaaatacaggaaaagaactatccagtataaatgtcagaagacagatttcctaaacaagtaaaagagacatcaaaaattttaacataatcacaatgaaatcattttttaccacttttacagcggtgtttcaagcggactgtcactcagatctgcagagatgaatattactcaaaaaatttttttgttctcttgcatttttttcaactaccgcaaagctatacagatttttttgtacttgtggatcttttgtacttctcataacctaatgtcagactaagaaaaataaaatatctgagagtaaa

SEQ ID NO: 7782 - protein, 543 aa, Homo sapiens; identical to SEQ ID NO: 1091

SEQ ID NO: 7783 - DNA, 1292 bp, Homo sapiens
cggggtcaatgtcagatttagtcatgctgttattttagcccagtggtccagagagatgactgaaaagtaatacctagcaaatacagaaagagagataaagcaagcaagctgttttgaaagtgtctaatattggctgatgtagagctataggagaagatggtataaactggtccatcagtgacaaagacattgaggcccagatagctaataaccgaacacctggaagatggacccagcggtactattcagccaacaaaaacattatctgtagaaattgtgacaaacgtggtcatttatcaaaaaactgccccttaccacgaaaagttcgtcgctgcttcctgtgctccaggagaggacatctcctgtattcctgtccagcccccctttgcgaatactgtcctgtgcctaagatgttggaccactcatgtcttttcagacattcctgggataaacagtgtgaccgatgtcatatgctaggccactatacagatgcttgcacagaaatctggaggcagtatcacctaacgaccaaacctggaccacccaaaaagccgaagaccccttcaagaccatcagccttagcatattgctatcactgcgcgcaaaaaggccattatggacacgaatgtccagaaagagaagtgtatgacccgtctccagtatctccattcatctgctactatgatgacaaatatgaaattcaggagagagaaaagagactaaaacaaaaaataaaagtactcaagaaaaatggggttatcccagagccatccaagctaccttatataaaagcagcaaatgagaacccccaccatgatataaggaagggccgtgcctcatggaaaagcaacaggtggcctcaagaaaataaagaaacacaaaaagaaatgaagaacaagaatagaaactgggagaagcacaggaaggctgacagacatcgtgaagtggatgaggattttcccaggggccccaaaacctactcttctcctggcagttttaaaacccagaagccttctaagccctttcaccgttcatcacattaccacacgtcaagagaagacaagtctcccaaggaaggcaagaggggcaagcagaagaaaaaggagaggtgctgggaagatgatgacaatgataacttatttcttattaagcagagaaaaaaaaagtcttaagccgtcaggcagcctctgatgtggcttttcattgttcatttggcctttgtgtctataaccttctggcactgtgtttattatctatgattaaataaagtgagtttttggttttgttttttt

SEQ ID NO: 7784 - protein, 253 aa, Homo sapiens; identical to SEQ ID NO: 7772

SEQ ID NO: 7785 - DNA, 2053 bp, Homo sapiens
cggggtcaatgtcagatttagtcatgctgttattttagcccagtggtccagagagatgactgaaaagtaatacctagcaaatacagaaagagagataaagcaagcaagctgttttgaaagtgtctaatattggctgatgtagagctataggagaagatggtataaactggtccatcagtgacaaagacattgaggcccagatagctaataaccgaacacctggaagatggacccagcggtactattcagccaacaaaaacattatctgtagaaattgtgacaaacgtggtcatttatcaaaaaactgccccttaccacgaaaagttcgtcgctgcttcctgtgctccaggagaggacatctcctgtattcctgtccagcccccctttgcgaatactgtcctgtgcctaagatgttggaccactcatgtcttttcagacattcctgggataaacagtgtgaccgatgtcatatgctaggccactatacagatgcttgcacagaaatctggaggcagtatcacctaacgaccaaacctggaccacccaaaaagccgaagaccccttcaagaccatcagccttagcatattgctatcactgcgcgcaaaaaggccattatggacacgaatgtccagaaagagaagtgtatgacccgtctccagtatctccattcatctgctactatgatgacaaatatgaaattcaggagagagaaaagagactaaaacaaaaaataaaagtactcaagaaaaatggggttatcccagagccatccaagctaccttatataaaagcagcaaatgagaacccccaccatgatataaggaagggccgtgcctcatggaaaagcaacaggtggcctcaagaaaataaagaaacacaaaaagaaatgaagaacaagaatagaaactgggagaagcacaggaaggctgacagacatcgtgaagtggatgaggattttcccaggggccccaaaacctactcttctcctggcagttttaaaacccagaagccttctaagccctttcaccgttcatcacattaccacacgtcaagagaagacaagtctcccaaggaaggcaagaggggcaagcagaagaaaaaggagaggtgctgggaagatgatgacaatgataacttatttcttattaagcagagaaaaaaaaagtcttaagccgtcaggcagcctctgatgtggcttttcattgttcatttggcctttgtgtctataaccttctggcactgtgtttattatctatgattaaataaagtgagtttttggttttgtttttttaatttcagccattcctagagttactgaatatccatggagatctcaattctctgtgtccaacaggatattaggtaagaaagtacaaagataaacctggacttctcctattccaatatgtcatctttactcagaatcctagggataggtagaagaattcatcttttcaagaaagtgttttaaaaatactttgggaaaaaaactgcatcaaaggtaatttatcctcaaattaaatccttgcaggaagagaaattaacactaagaaaaagtcatcaatatttttcaactttttttttttttttttttactttggaaaggacaataactataaacctatatccagattttctttctgctgaagctgttgtcagaatcttcctttggacaaaacatcactagctgactataaaaacaaaagtgtcatcattgaagccctgaagaggcagggaattgagcttcagcaaaatacaggaaaagaactatccagtataaatgtcagaagacagatttcctaaacaagtaaaagagacatcaaaaattttaacataatcacaatgaaatcattttttaccacttttacagcggtgtttcaagcggactgtcactcagatctgcagagatgaatattactcaaaaaatttttttgttctcttgcatttttttcaactaccgcaaagctatacagatttttttgtacttgtggatcttttgtacttctcataacctaatgtcagactaagaaaaataaaatatctgagagtaaa

SEQ ID NO: 7786 - protein, 253 aa, Homo sapiens; identical to SEQ ID NO: 7772

SEQ ID NO: 7787 - DNA, 1197 bp, Homo sapiens
tcagatttagtcatgctgttattttagcccagtggtccagagagatgactgaaaagagaagatggtataaactggtccatcagtgacaaagacattgaggcccagatagctaataaccgaacacctggaagatggacccagcggtactattcagccaacaaaaacattatctgtagaaattgtgacaaacgtggtcatttatcaaaaaactgccccttaccacgaaaagttcgtcgctgcttcctgtgctccaggagaggacatctcctgtattcctgtccagcccccctttgcgaatactgtcctgtgcctaagatgttggaccactcatgtcttttcagacattcctgggataaacagtgtgaccgatgtcatatgctaggccactatacagatgcttgcacagaaatctggaggcagtatcacctaacgaccaaacctggaccacccaaaaagccgaagaccccttcaagaccatcagccttagcatattgctatcactgcgcgcaaaaaggccattatggacacgaatgtccagaaagagaagtgtatgacccgtctccagtatctccattcatctgctactatgatgacaaatatgaaattcaggagagagaaaagagactaaaacaaaaaataaaagtactcaagaaaaatggggttatcccagagccatccaagctaccttatataaaagcagcaaatgagaacccccaccatgatataaggaagggccgtgcctcatggaaaagcaacaggtggcctcaagaaaataaagaaacacaaaaagaaatgaagaacaagaatagaaactgggagaagcacaggaaggctgacagacatcgtgaagtggatgaggattttcccaggggccccaaaacctactcttctcctggcagttttaaaacccagaagccttctaagccctttcaccgttcatcacattaccacacgtcaagagaagacaagtctcccaaggaaggcaagaggggcaagcagaagaaaaaggagaggtgctgggaagatgatgacaatgataacttatttcttattaagcagagaaaaaaaaagtcttaagccgtcaggcagcctctgatgtggcttttcattgttcatttggcctttgtgtctataaccttctggcactgtgtttattatctatgattaaataaagtgagtttttggttttgttttttt

SEQ ID NO: 7788 - protein, 253 aa, Homo sapiens; identical to SEQ ID NO: 7772

SEQ ID NO: 7789 - DNA, 1958 bp, Homo sapiens
tcagatttagtcatgctgttattttagcccagtggtccagagagatgactgaaaagagaagatggtataaactggtccatcagtgacaaagacattgaggcccagatagctaataaccgaacacctggaagatggacccagcggtactattcagccaacaaaaacattatctgtagaaattgtgacaaacgtggtcatttatcaaaaaactgccccttaccacgaaaagttcgtcgctgcttcctgtgctccaggagaggacatctcctgtattcctgtccagcccccctttgcgaatactgtcctgtgcctaagatgttggaccactcatgtcttttcagacattcctgggataaacagtgtgaccgatgtcatatgctaggccactatacagatgcttgcacagaaatctggaggcagtatcacctaacgaccaaacctggaccacccaaaaagccgaagaccccttcaagaccatcagccttagcatattgctatcactgcgcgcaaaaaggccattatggacacgaatgtccagaaagagaagtgtatgacccgtctccagtatctccattcatctgctactatgatgacaaatatgaaattcaggagagagaaaagagactaaaacaaaaaataaaagtactcaagaaaaatggggttatcccagagccatccaagctaccttatataaaagcagcaaatgagaacccccaccatgatataaggaagggccgtgcctcatggaaaagcaacaggtggcctcaagaaaataaagaaacacaaaaagaaatgaagaacaagaatagaaactgggagaagcacaggaaggctgacagacatcgtgaagtggatgaggattttcccaggggccccaaaacctactcttctcctggcagttttaaaacccagaagccttctaagccctttcaccgttcatcacattaccacacgtcaagagaagacaagtctcccaaggaaggcaagaggggcaagcagaagaaaaaggagaggtgctgggaagatgatgacaatgataacttatttcttattaagcagagaaaaaaaaagtcttaagccgtcaggcagcctctgatgtggcttttcattgttcatttggcctttgtgtctataaccttctggcactgtgtttattatctatgattaaataaagtgagtttttggttttgtttttttaatttcagccattcctagagttactgaatatccatggagatctcaattctctgtgtccaacaggatattaggtaagaaagtacaaagataaacctggacttctcctattccaatatgtcatctttactcagaatcctagggataggtagaagaattcatcttttcaagaaagtgttttaaaaatactttgggaaaaaaactgcatcaaaggtaatttatcctcaaattaaatccttgcaggaagagaaattaacactaagaaaaagtcatcaatatttttcaactttttttttttttttttttactttggaaaggacaataactataaacctatatccagattttctttctgctgaagctgttgtcagaatcttcctttggacaaaacatcactagctgactataaaaacaaaagtgtcatcattgaagccctgaagaggcagggaattgagcttcagcaaaatacaggaaaagaactatccagtataaatgtcagaagacagatttcctaaacaagtaaaagagacatcaaaaattttaacataatcacaatgaaatcattttttaccacttttacagcggtgtttcaagcggactgtcactcagatctgcagagatgaatattactcaaaaaatttttttgttctcttgcatttttttcaactaccgcaaagctatacagatttttttgtacttgtggatcttttgtacttctcataacctaatgtcagactaagaaaaataaaatatctgagagtaaa

SEQ ID NO: 7790 - protein, 253 aa, Homo sapiens; identical to SEQ ID NO: 7772

SEQ ID NO: 7791 - DNA, 420 bp, Homo sapiens
agttagccccgataatttctacccaaacacctccaaattatgctacttcaaaaacagttgaagggaagtttaggaatataatatagtttcattttaagaccactaggataatagacattgtaatgtaatggaaaaacattttgtcccataaaaaccactttcatttaatgctttgtttttctgtctaaccaggtaatacctagcaaatacagaaagagagataaagcaagcaagctgttttgaaagtgtctaatattggctgatgtagagctatagaatccatcagtagaagaattattttgtacactatgtgtgaaagatcaaagaatatggggcagtcaccagttgtttacaacctggtttgcaagtggcataaaaaaatattagtttgtctgctgaataaaattaaacttatttttc

SEQ ID NO: 7792 - protein, 36 aa, Homo sapiens
MCERSKNMGQSPVVYNLVCKWHKKILVCLLNKIKLI

SEQ ID NO: 7793 - DNA, 390 bp, Homo sapiens
aggtaatacctagcaaatacagaaagagagataaagcaagcaagctgttttgaaagtgtctaatattggctgatgtagagctataggctgccagacaccctacttgaaggatcctgttggaacctgtggaaataatacttacaagaacgttgcagctaagctggtccgggtgcagtggtgttacaactaatggatcacaaccagtcacggatttctttgttccatctccattcccacttcttcacttgactagccttaaaaaggctcatgcctgtaatcccagcactaagggaggctcagacagaaggatcatttgagcccaggagtttgagatcagcccaggcaacatagcgagacttcatctctactaaaaataaaataaaaaaatta

SEQ ID NO: 7794 - protein, 38 aa, Homo sapiens
CRAIGCQTPYLKDPVGTCGNNTYKNVAAKLVRVQWCYN

SEQ ID NO: 7795 - DNA, 462 bp, Homo sapiens
acattaataatctcaggcccaaataagataagtgatatgtcaacgtatgttcactttggtctttacatggcagctatagtatacggaatattataagctcagatcgtcatagctacataactcctttagttggaagatcacgcgtaaatgcccatcaagagctagcagttctgcatttgactcttgaagaccgtggcatggcagacaacacttcttgagctgtaacaggtggacattaaatccatgacaggaggtagagacggccagattacttgagcccaagagtttgagaccagcctaggcaacatggaaacaacagttccaggccaggtgcgatggctcatgcctgtcatctcaacactttgggaggctgaggtggttggaccacctgaggtcaggagttcaagaccagcctggccaacatggcaaaactctgtctctactaaaaaatacaggccgggt

SEQ ID NO: 7796 - protein, 51 aa, Homo sapiens
METTVPGQVRWLMPVISTLWEAEVVGPPEVRSSRPAWPTWQNSVSTKKYRP

SEQ ID NO: 7797 - DNA, 1238 bp, Homo sapiens
ctcctgctgtgtggcccagttcctaacaggccacgaactggtactgattgttccccagagtttggggaccccttgtcttgacagtatcatgcacaggagaagatggtataaactggtccatcagtgacaaagacattgaggcccagatagctaataaccgaacacctggaagatggacccagcggtactattcagccaacaaaaacattatctgtagaaattgtgacaaacgtggtcatttatcaaaaaactgccccttaccacgaaaagttcgtcgctgcttcctgtgctccaggagaggacatctcctgtattcctgtccagcccccctttgcgaatactgtcctgtgcctaagatgttggaccactcatgtcttttcagacattcctgggataaacagtgtgaccgatgtcatatgctaggccactatacagatgcttgcacagaaatctggaggcagtatcacctaacgaccaaacctggaccacccaaaaagccgaagaccccttcaagaccatcagccttagcatattgctatcactgcgcgcaaaaaggccattatggacacgaatgtccagaaagagaagtgtatgacccgtctccagtatctccattcatctgctactatgatgacaaatatgaaattcaggagagagaaaagagactaaaacaaaaaataaaagtactcaagaaaaatggggttatcccagagccatccaagctaccttatataaaagcagcaaatgagaacccccaccatgatataaggaagggccgtgcctcatggaaaagcaacaggtggcctcaagaaaataaagaaacacaaaaagaaatgaagaacaagaatagaaactgggagaagcacaggaaggctgacagacatcgtgaagtggatgaggattttcccaggggccccaaaacctactcttctcctggcagttttaaaacccagaagccttctaagccctttcaccgttcatcacattaccacacgtcaagagaagacaagtctcccaaggaaggcaagaggggcaagcagaagaaaaaggagaggtgctgggaagatgatgacaatgataacttatttcttattaagcagagaaaaaaaaagtcttaagccgtcaggcagcctctgatgtggcttttcattgttcatttggcctttgtgtctataaccttctggcactgtgtttattatctatgattaaataaagtgagtttttggttttgttttttt

SEQ ID NO: 7798 - protein, 253 aa, Homo sapiens; identical to SEQ ID NO: 7772

SEQ ID NO: 7799 - DNA, 1999 bp, Homo sapiens
ctcctgctgtgtggcccagttcctaacaggccacgaactggtactgattgttccccagagtttggggaccccttgtcttgacagtatcatgcacaggagaagatggtataaactggtccatcagtgacaaagacattgaggcccagatagctaataaccgaacacctggaagatggacccagcggtactattcagccaacaaaaacattatctgtagaaattgtgacaaacgtggtcatttatcaaaaaactgccccttaccacgaaaagttcgtcgctgcttcctgtgctccaggagaggacatctcctgtattcctgtccagcccccctttgcgaatactgtcctgtgcctaagatgttggaccactcatgtcttttcagacattcctgggataaacagtgtgaccgatgtcatatgctaggccactatacagatgcttgcacagaaatctggaggcagtatcacctaacgaccaaacctggaccacccaaaaagccgaagaccccttcaagaccatcagccttagcatattgctatcactgcgcgcaaaaaggccattatggacacgaatgtccagaaagagaagtgtatgacccgtctccagtatctccattcatctgctactatgatgacaaatatgaaattcaggagagagaaaagagactaaaacaaaaaataaaagtactcaagaaaaatggggttatcccagagccatccaagctaccttatataaaagcagcaaatgagaacccccaccatgatataaggaagggccgtgcctcatggaaaagcaacaggtggcctcaagaaaataaagaaacacaaaaagaaatgaagaacaagaatagaaactgggagaagcacaggaaggctgacagacatcgtgaagtggatgaggattttcccaggggccccaaaacctactcttctcctggcagttttaaaacccagaagccttctaagccctttcaccgttcatcacattaccacacgtcaagagaagacaagtctcccaaggaaggcaagaggggcaagcagaagaaaaaggagaggtgctgggaagatgatgacaatgataacttatttcttattaagcagagaaaaaaaaagtcttaagccgtcaggcagcctctgatgtggcttttcattgttcatttggcctttgtgtctataaccttctggcactgtgtttattatctatgattaaataaagtgagtttttggttttgtttttttaatttcagccattcctagagttactgaatatccatggagatctcaattctctgtgtccaacaggatattaggtaagaaagtacaaagataaacctggacttctcctattccaatatgtcatctttactcagaatcctagggataggtagaagaattcatcttttcaagaaagtgttttaaaaatactttgggaaaaaaactgcatcaaaggtaatttatcctcaaattaaatccttgcaggaagagaaattaacactaagaaaaagtcatcaatatttttcaactttttttttttttttttttactttggaaaggacaataactataaacctatatccagattttctttctgctgaagctgttgtcagaatcttcctttggacaaaacatcactagctgactataaaaacaaaagtgtcatcattgaagccctgaagaggcagggaattgagcttcagcaaaatacaggaaaagaactatccagtataaatgtcagaagacagatttcctaaacaagtaaaagagacatcaaaaattttaacataatcacaatgaaatcattttttaccacttttacagcggtgtttcaagcggactgtcactcagatctgcagagatgaatattactcaaaaaatttttttgttctcttgcatttttttcaactaccgcaaagctatacagatttttttgtacttgtggatcttttgtacttctcataacctaatgtcagactaagaaaaataaaatatctgagagtaaa

SEQ ID NO: 7800 - protein, 253 aa, Homo sapiens; identical to SEQ ID NO: 7772

SEQ ID NO: 7801 - DNA, 1225 bp, Homo sapiens
gagttttgtgaattcaagttagacagtaacagaggccaagactctaagcgaacaatatctgaaaaggaagtacacaaaaacaggagaagatggtataaactggtccatcagtgacaaagacattgaggcccagatagctaataaccgaacacctggaagatggacccagcggtactattcagccaacaaaaacattatctgtagaaattgtgacaaacgtggtcatttatcaaaaaactgccccttaccacgaaaagttcgtcgctgcttcctgtgctccaggagaggacatctcctgtattcctgtccagcccccctttgcgaatactgtcctgtgcctaagatgttggaccactcatgtcttttcagacattcctgggataaacagtgtgaccgatgtcatatgctaggccactatacagatgcttgcacagaaatctggaggcagtatcacctaacgaccaaacctggaccacccaaaaagccgaagaccccttcaagaccatcagccttagcatattgctatcactgcgcgcaaaaaggccattatggacacgaatgtccagaaagagaagtgtatgacccgtctccagtatctccattcatctgctactatgatgacaaatatgaaattcaggagagagaaaagagactaaaacaaaaaataaaagtactcaagaaaaatggggttatcccagagccatccaagctaccttatataaaagcagcaaatgagaacccccaccatgatataaggaagggccgtgcctcatggaaaagcaacaggtggcctcaagaaaataaagaaacacaaaaagaaatgaagaacaagaatagaaactgggagaagcacaggaaggctgacagacatcgtgaagtggatgaggattttcccaggggccccaaaacctactcttctcctggcagttttaaaacccagaagccttctaagccctttcaccgttcatcacattaccacacgtcaagagaagacaagtctcccaaggaaggcaagaggggcaagcagaagaaaaaggagaggtgctgggaagatgatgacaatgataacttatttcttattaagcagagaaaaaaaaagtcttaagccgtcaggcagcctctgatgtggcttttcattgttcatttggcctttgtgtctataaccttctggcactgtgtttattatctatgattaaataaagtgagtttttggttttgttttttt

SEQ ID NO: 7802 - protein, 253 aa, Homo sapiens; identical to SEQ ID NO: 7772

SEQ ID NO: 7803 - DNA, 1986 bp, Homo sapiens
gagttttgtgaattcaagttagacagtaacagaggccaagactctaagcgaacaatatctgaaaaggaagtacacaaaaacaggagaagatggtataaactggtccatcagtgacaaagacattgaggcccagatagctaataaccgaacacctggaagatggacccagcggtactattcagccaacaaaaacattatctgtagaaattgtgacaaacgtggtcatttatcaaaaaactgccccttaccacgaaaagttcgtcgctgcttcctgtgctccaggagaggacatctcctgtattcctgtccagcccccctttgcgaatactgtcctgtgcctaagatgttggaccactcatgtcttttcagacattcctgggataaacagtgtgaccgatgtcatatgctaggccactatacagatgcttgcacagaaatctggaggcagtatcacctaacgaccaaacctggaccacccaaaaagccgaagaccccttcaagaccatcagccttagcatattgctatcactgcgcgcaaaaaggccattatggacacgaatgtccagaaagagaagtgtatgacccgtctccagtatctccattcatctgctactatgatgacaaatatgaaattcaggagagagaaaagagactaaaacaaaaaataaaagtactcaagaaaaatggggttatcccagagccatccaagctaccttatataaaagcagcaaatgagaacccccaccatgatataaggaagggccgtgcctcatggaaaagcaacaggtggcctcaagaaaataaagaaacacaaaaagaaatgaagaacaagaatagaaactgggagaagcacaggaaggctgacagacatcgtgaagtggatgaggattttcccaggggccccaaaacctactcttctcctggcagttttaaaacccagaagccttctaagccctttcaccgttcatcacattaccacacgtcaagagaagacaagtctcccaaggaaggcaagaggggcaagcagaagaaaaaggagaggtgctgggaagatgatgacaatgataacttatttcttattaagcagagaaaaaaaaagtcttaagccgtcaggcagcctctgatgtggcttttcattgttcatttggcctttgtgtctataaccttctggcactgtgtttattatctatgattaaataaagtgagtttttggttttgtttttttaatttcagccattcctagagttactgaatatccatggagatctcaattctctgtgtccaacaggatattaggtaagaaagtacaaagataaacctggacttctcctattccaatatgtcatctttactcagaatcctagggataggtagaagaattcatcttttcaagaaagtgttttaaaaatactttgggaaaaaaactgcatcaaaggtaatttatcctcaaattaaatccttgcaggaagagaaattaacactaagaaaaagtcatcaatatttttcaactttttttttttttttttttactttggaaaggacaataactataaacctatatccagattttctttctgctgaagctgttgtcagaatcttcctttggacaaaacatcactagctgactataaaaacaaaagtgtcatcattgaagccctgaagaggcagggaattgagcttcagcaaaatacaggaaaagaactatccagtataaatgtcagaagacagatttcctaaacaagtaaaagagacatcaaaaattttaacataatcacaatgaaatcattttttaccacttttacagcggtgtttcaagcggactgtcactcagatctgcagagatgaatattactcaaaaaatttttttgttctcttgcatttttttcaactaccgcaaagctatacagatttttttgtacttgtggatcttttgtacttctcataacctaatgtcagactaagaaaaataaaatatctgagagtaaa

SEQ ID NO: 7804 - protein, 253 aa, Homo sapiens; identical to SEQ ID NO: 7772

SEQ ID NO: 7805 - DNA, 261 bp, Homo sapiens
atatatttattgaagaaacatcattgagcactcacgtgtatgttaaatactacacagtttaaactgagttctccttaaaataaacttttgcactgtgaaaaatattgtagtatatggctgatatgggagcatttttctagcatcaaaaaagtaaaaaggccggggttgagtaatgacttaaaagcagccatggcatgtgagaaagaggctgatatcatctcttaagattcagggtcacggaagatgagcagcaagcatttg

SEQ ID NO: 7806 - DNA, 928 bp, Homo sapiens
cgtattattctgaggacactgtggtaatcaagaactatccataactaatgtataaataactgcttgcttatttctacaataatccaactcaaattatatatacacagcaaaaagcttatgatagaaggcttgcacagaaatctggaggcagtatcacctaacgaccaaacctggaccacccaaaaagccgaagaccccttcaagaccatcagccttagcatattgctatcactgcgcgcaaaaaggccattatggacacgaatgtccagaaagagaagtgtatgacccgtctccagtatctccattcatctgctactatgatgacaaatatgaaattcaggagagagaaaagagactaaaacaaaaaataaaagtactcaagaaaaatggggttatcccagagccatccaagctaccttatataaaagcagcaaatgagaacccccaccatgatataaggaagggccgtgcctcatggaaaagcaacaggtggcctcaagaaaataaagaaacacaaaaagaaatgaagaacaagaatagaaactgggagaagcacaggaaggctgacagacatcgtgaagtggatgaggattttcccaggggccccaaaacctactcttctcctggcagttttaaaacccagaagccttctaagccctttcaccgttcatcacattaccacacgtcaagagaagacaagtctcccaaggaaggcaagaggggcaagcagaagaaaaaggagaggtgctgggaagatgatgacaatgataacttatttcttattaagcagagaaaaaaaaagtcttaagccgtcaggcagcctctgatgtggcttttcattgttcatttggcctttgtgtctataaccttctggcactgtgtttattatctatgattaaataaagtgagtttttggttttgttttttt

SEQ ID NO: 7807 - protein, 55 aa, Homo sapiens
MIEGLHRNLEAVSPNDQTWTTQKAEDPFKTISLSILLSLRAKRPLWTRMSRKRSV

SEQ ID NO: 7808 - DNA, 1689 bp, Homo sapiens
cgtattattctgaggacactgtggtaatcaagaactatccataactaatgtataaataactgcttgcttatttctacaataatccaactcaaattatatatacacagcaaaaagcttatgatagaaggcttgcacagaaatctggaggcagtatcacctaacgaccaaacctggaccacccaaaaagccgaagaccccttcaagaccatcagccttagcatattgctatcactgcgcgcaaaaaggccattatggacacgaatgtccagaaagagaagtgtatgacccgtctccagtatctccattcatctgctactatgatgacaaatatgaaattcaggagagagaaaagagactaaaacaaaaaataaaagtactcaagaaaaatggggttatcccagagccatccaagctaccttatataaaagcagcaaatgagaacccccaccatgatataaggaagggccgtgcctcatggaaaagcaacaggtggcctcaagaaaataaagaaacacaaaaagaaatgaagaacaagaatagaaactgggagaagcacaggaaggctgacagacatcgtgaagtggatgaggattttcccaggggccccaaaacctactcttctcctggcagttttaaaacccagaagccttctaagccctttcaccgttcatcacattaccacacgtcaagagaagacaagtctcccaaggaaggcaagaggggcaagcagaagaaaaaggagaggtgctgggaagatgatgacaatgataacttatttcttattaagcagagaaaaaaaaagtcttaagccgtcaggcagcctctgatgtggcttttcattgttcatttggcctttgtgtctataaccttctggcactgtgtttattatctatgattaaataaagtgagtttttggttttgtttttttaatttcagccattcctagagttactgaatatccatggagatctcaattctctgtgtccaacaggatattaggtaagaaagtacaaagataaacctggacttctcctattccaatatgtcatctttactcagaatcctagggataggtagaagaattcatcttttcaagaaagtgttttaaaaatactttgggaaaaaaactgcatcaaaggtaatttatcctcaaattaaatccttgcaggaagagaaattaacactaagaaaaagtcatcaatatttttcaactttttttttttttttttttactttggaaaggacaataactataaacctatatccagattttctttctgctgaagctgttgtcagaatcttcctttggacaaaacatcactagctgactataaaaacaaaagtgtcatcattgaagccctgaagaggcagggaattgagcttcagcaaaatacaggaaaagaactatccagtataaatgtcagaagacagatttcctaaacaagtaaaagagacatcaaaaattttaacataatcacaatgaaatcattttttaccacttttacagcggtgtttcaagcggactgtcactcagatctgcagagatgaatattactcaaaaaatttttttgttctcttgcatttttttcaactaccgcaaagctatacagatttttttgtacttgtggatcttttgtacttctcataacctaatgtcagactaagaaaaataaaatatctgagagtaaa

SEQ ID NO: 7809 - protein, 55 aa, Homo sapiens; identical to SEQ ID NO: 7807

SEQ ID NO: 7810 - DNA, 1662 bp, Homo sapiens
atttatatagttacaaacaacacactttttgctcctgagaagatggtaaactgatcaactatacataagcagcttggttagaaaaagtgtccttaacaaggcttgcacagaaatctggaggcagtatcacctaacgaccaaacctggaccacccaaaaagccgaagaccccttcaagaccatcagccttagcatattgctatcactgcgcgcaaaaaggccattatggacacgaatgtccagaaagagaagtgtatgacccgtctccagtatctccattcatctgctactatgatgacaaatatgaaattcaggagagagaaaagagactaaaacaaaaaataaaagtactcaagaaaaatggggttatcccagagccatccaagctaccttatataaaagcagcaaatgagaacccccaccatgatataaggaagggccgtgcctcatggaaaagcaacaggtggcctcaagaaaataaagaaacacaaaaagaaatgaagaacaagaatagaaactgggagaagcacaggaaggctgacagacatcgtgaagtggatgaggattttcccaggggccccaaaacctactcttctcctggcagttttaaaacccagaagccttctaagccctttcaccgttcatcacattaccacacgtcaagagaagacaagtctcccaaggaaggcaagaggggcaagcagaagaaaaaggagaggtgctgggaagatgatgacaatgataacttatttcttattaagcagagaaaaaaaaagtcttaagccgtcaggcagcctctgatgtggcttttcattgttcatttggcctttgtgtctataaccttctggcactgtgtttattatctatgattaaataaagtgagtttttggttttgtttttttaatttcagccattcctagagttactgaatatccatggagatctcaattctctgtgtccaacaggatattaggtaagaaagtacaaagataaacctggacttctcctattccaatatgtcatctttactcagaatcctagggataggtagaagaattcatcttttcaagaaagtgttttaaaaatactttgggaaaaaaactgcatcaaaggtaatttatcctcaaattaaatccttgcaggaagagaaattaacactaagaaaaagtcatcaatatttttcaactttttttttttttttttttactttggaaaggacaataactataaacctatatccagattttctttctgctgaagctgttgtcagaatcttcctttggacaaaacatcactagctgactataaaaacaaaagtgtcatcattgaagccctgaagaggcagggaattgagcttcagcaaaatacaggaaaagaactatccagtataaatgtcagaagacagatttcctaaacaagtaaaagagacatcaaaaattttaacataatcacaatgaaatcattttttaccacttttacagcggtgtttcaagcggactgtcactcagatctgcagagatgaatattactcaaaaaatttttttgttctcttgcatttttttcaactaccgcaaagctatacagatttttttgtacttgtggatcttttgtacttctcataacctaatgtcagactaagaaaaataaaatatctgagagtaaa

SEQ ID NO: 7811 - protein, 35 aa, Homo sapiens
MDTNVQKEKCMTRLQYLHSSATMMTNMKFRREKRD

SEQ ID NO: 7812 - DNA, 891 bp, Homo sapiens
ttacaaacaacacactttttgctcctgagaagatggtaaactgatcaactatacataagcagcttggttagaaaaagtgtccttaacaaggcttgcacagaaatctggaggcagtatcacctaacgaccaaacctggaccacccaaaaagccgaagaccccttcaagaccatcagccttagcatattgctatcactgcgcgcaaaaaggccattatggacacgaatgtccagaaagagaagtgtatgacccgtctccagtatctccattcatctgctactatgatgacaaatatgaaattcaggagagagaaaagagactaaaacaaaaaataaaagtactcaagaaaaatggggttatcccagagccatccaagctaccttatataaaagcagcaaatgagaacccccaccatgatataaggaagggccgtgcctcatggaaaagcaacaggtggcctcaagaaaataaagaaacacaaaaagaaatgaagaacaagaatagaaactgggagaagcacaggaaggctgacagacatcgtgaagtggatgaggattttcccaggggccccaaaacctactcttctcctggcagttttaaaacccagaagccttctaagccctttcaccgttcatcacattaccacacgtcaagagaagacaagtctcccaaggaaggcaagaggggcaagcagaagaaaaaggagaggtgctgggaagatgatgacaatgataacttatttcttattaagcagagaaaaaaaaagtcttaagccgtcaggcagcctctgatgtggcttttcattgttcatttggcctttgtgtctataaccttctggcactgtgtttattatctatgattaaataaagtgagtttttggttttgttttttt

SEQ ID NO: 7813 - protein, 35 aa, Homo sapiens; identical to SEQ ID NO: 7811

SEQ ID NO: 7814 - DNA, 886 bp, Homo sapiens
atcaactatacataagcagcttggttagaaaaagtgtccttaacaaggtcataatttaggcataagaagatttatatatgtgttcgcttgcacagaaatctggaggcagtatcacctaacgaccaaacctggaccacccaaaaagccgaagaccccttcaagaccatcagccttagcatattgctatcactgcgcgcaaaaaggccattatggacacgaatgtccagaaagagaagtgtatgacccgtctccagtatctccattcatctgctactatgatgacaaatatgaaattcaggagagagaaaagagactaaaacaaaaaataaaagtactcaagaaaaatggggttatcccagagccatccaagctaccttatataaaagcagcaaatgagaacccccaccatgatataaggaagggccgtgcctcatggaaaagcaacaggtggcctcaagaaaataaagaaacacaaaaagaaatgaagaacaagaatagaaactgggagaagcacaggaaggctgacagacatcgtgaagtggatgaggattttcccaggggccccaaaacctactcttctcctggcagttttaaaacccagaagccttctaagccctttcaccgttcatcacattaccacacgtcaagagaagacaagtctcccaaggaaggcaagaggggcaagcagaagaaaaaggagaggtgctgggaagatgatgacaatgataacttatttcttattaagcagagaaaaaaaaagtcttaagccgtcaggcagcctctgatgtggcttttcattgttcatttggcctttgtgtctataaccttctggcactgtgtttattatctatgattaaataaagtgagtttttggttttgttttttt

SEQ ID NO: 7815 - protein, 35 aa, Homo sapiens; identical to SEQ ID NO: 7811

SEQ ID NO: 7816 - DNA, 1647 bp, Homo sapiens
atcaactatacataagcagcttggttagaaaaagtgtccttaacaaggtcataatttaggcataagaagatttatatatgtgttcgcttgcacagaaatctggaggcagtatcacctaacgaccaaacctggaccacccaaaaagccgaagaccccttcaagaccatcagccttagcatattgctatcactgcgcgcaaaaaggccattatggacacgaatgtccagaaagagaagtgtatgacccgtctccagtatctccattcatctgctactatgatgacaaatatgaaattcaggagagagaaaagagactaaaacaaaaaataaaagtactcaagaaaaatggggttatcccagagccatccaagctaccttatataaaagcagcaaatgagaacccccaccatgatataaggaagggccgtgcctcatggaaaagcaacaggtggcctcaagaaaataaagaaacacaaaaagaaatgaagaacaagaatagaaactgggagaagcacaggaaggctgacagacatcgtgaagtggatgaggattttcccaggggccccaaaacctactcttctcctggcagttttaaaacccagaagccttctaagccctttcaccgttcatcacattaccacacgtcaagagaagacaagtctcccaaggaaggcaagaggggcaagcagaagaaaaaggagaggtgctgggaagatgatgacaatgataacttatttcttattaagcagagaaaaaaaaagtcttaagccgtcaggcagcctctgatgtggcttttcattgttcatttggcctttgtgtctataaccttctggcactgtgtttattatctatgattaaataaagtgagtttttggttttgtttttttaatttcagccattcctagagttactgaatatccatggagatctcaattctctgtgtccaacaggatattaggtaagaaagtacaaagataaacctggacttctcctattccaatatgtcatctttactcagaatcctagggataggtagaagaattcatcttttcaagaaagtgttttaaaaatactttgggaaaaaaactgcatcaaaggtaatttatcctcaaattaaatccttgcaggaagagaaattaacactaagaaaaagtcatcaatatttttcaactttttttttttttttttttactttggaaaggacaataactataaacctatatccagattttctttctgctgaagctgttgtcagaatcttcctttggacaaaacatcactagctgactataaaaacaaaagtgtcatcattgaagccctgaagaggcagggaattgagcttcagcaaaatacaggaaaagaactatccagtataaatgtcagaagacagatttcctaaacaagtaaaagagacatcaaaaattttaacataatcacaatgaaatcattttttaccacttttacagcggtgtttcaagcggactgtcactcagatctgcagagatgaatattactcaaaaaatttttttgttctcttgcatttttttcaactaccgcaaagctatacagatttttttgtacttgtggatcttttgtacttctcataacctaatgtcagactaagaaaaataaaatatctgagagtaaa

SEQ ID NO: 7817 - protein, 35 aa, Homo sapiens; identical to SEQ ID NO: 7811

SEQ ID NO: 7818 - DNA, 944 bp, Homo sapiens
gttagcaccaagtgattccgtaaaagatgccaacagctatcacaaatatgtaataacagtgaagtcttcttaaagcagttactattaaattgttttccatcttactaccaaagttcaaaatgctgttttaaaaggtgtacttggcttgcacagaaatctggaggcagtatcacctaacgaccaaacctggaccacccaaaaagccgaagaccccttcaagaccatcagccttagcatattgctatcactgcgcgcaaaaaggccattatggacacgaatgtccagaaagagaagtgtatgacccgtctccagtatctccattcatctgctactatgatgacaaatatgaaattcaggagagagaaaagagactaaaacaaaaaataaaagtactcaagaaaaatggggttatcccagagccatccaagctaccttatataaaagcagcaaatgagaacccccaccatgatataaggaagggccgtgcctcatggaaaagcaacaggtggcctcaagaaaataaagaaacacaaaaagaaatgaagaacaagaatagaaactgggagaagcacaggaaggctgacagacatcgtgaagtggatgaggattttcccaggggccccaaaacctactcttctcctggcagttttaaaacccagaagccttctaagccctttcaccgttcatcacattaccacacgtcaagagaagacaagtctcccaaggaaggcaagaggggcaagcagaagaaaaaggagaggtgctgggaagatgatgacaatgataacttatttcttattaagcagagaaaaaaaaagtcttaagccgtcaggcagcctctgatgtggcttttcattgttcatttggcctttgtgtctataaccttctggcactgtgtttattatctatgattaaataaagtgagtttttggttttgttttttt

SEQ ID NO: 7819 - protein, 35 aa, Homo sapiens; identical to SEQ ID NO: 7811

SEQ ID NO: 7820 - DNA, 1705 bp, Homo sapiens
gttagcaccaagtgattccgtaaaagatgccaacagctatcacaaatatgtaataacagtgaagtcttcttaaagcagttactattaaattgttttccatcttactaccaaagttcaaaatgctgttttaaaaggtgtacttggcttgcacagaaatctggaggcagtatcacctaacgaccaaacctggaccacccaaaaagccgaagaccccttcaagaccatcagccttagcatattgctatcactgcgcgcaaaaaggccattatggacacgaatgtccagaaagagaagtgtatgacccgtctccagtatctccattcatctgctactatgatgacaaatatgaaattcaggagagagaaaagagactaaaacaaaaaataaaagtactcaagaaaaatggggttatcccagagccatccaagctaccttatataaaagcagcaaatgagaacccccaccatgatataaggaagggccgtgcctcatggaaaagcaacaggtggcctcaagaaaataaagaaacacaaaaagaaatgaagaacaagaatagaaactgggagaagcacaggaaggctgacagacatcgtgaagtggatgaggattttcccaggggccccaaaacctactcttctcctggcagttttaaaacccagaagccttctaagccctttcaccgttcatcacattaccacacgtcaagagaagacaagtctcccaaggaaggcaagaggggcaagcagaagaaaaaggagaggtgctgggaagatgatgacaatgataacttatttcttattaagcagagaaaaaaaaagtcttaagccgtcaggcagcctctgatgtggcttttcattgttcatttggcctttgtgtctataaccttctggcactgtgtttattatctatgattaaataaagtgagtttttggttttgtttttttaatttcagccattcctagagttactgaatatccatggagatctcaattctctgtgtccaacaggatattaggtaagaaagtacaaagataaacctggacttctcctattccaatatgtcatctttactcagaatcctagggataggtagaagaattcatcttttcaagaaagtgttttaaaaatactttgggaaaaaaactgcatcaaaggtaatttatcctcaaattaaatccttgcaggaagagaaattaacactaagaaaaagtcatcaatatttttcaactttttttttttttttttttactttggaaaggacaataactataaacctatatccagattttctttctgctgaagctgttgtcagaatcttcctttggacaaaacatcactagctgactataaaaacaaaagtgtcatcattgaagccctgaagaggcagggaattgagcttcagcaaaatacaggaaaagaactatccagtataaatgtcagaagacagatttcctaaacaagtaaaagagacatcaaaaattttaacataatcacaatgaaatcattttttaccacttttacagcggtgtttcaagcggactgtcactcagatctgcagagatgaatattactcaaaaaatttttttgttctcttgcatttttttcaactaccgcaaagctatacagatttttttgtacttgtggatcttttgtacttctcataacctaatgtcagactaagaaaaataaaatatctgagagtaaa

SEQ ID NO: 7821 - protein, 35 aa, Homo sapiens; identical to SEQ ID NO: 7811

SEQ ID NO: 7822 - DNA, 406 bp, Homo sapiens
tgtaaaattcaattaaactgtctagccaggtttttgaagctgaaatgcagaccctttctgttaagcttcttattttcctgtgaccgacaccggtggatgctgggttatgccaaaaccaacaggctgtaaagtaccttgtttcatgctcccagctgatcaatatttttattttccaggcttgcacagaaatctggaggcagtatcacctaacgaccaaacctggaccacccaaaaagccgaagaccccttcaagaccatcagccttagcatattgctatcactgcgcgcaaaaaggccattatggacacgaatgtccagaaagagaagtgtatgacccgtctccagtatctccattcatctgctactatgatgacaaatatgaaattcaggagagagaaaagagact

SEQ ID NO: 7823 - protein, 75 aa, Homo sapiens
MPKPTGCKVPCFMLPADQYFYFPGLHRNLEAVSPNDQTWTTQKAEDPFKTISLSILLSLRAKRPLWTRMSRKRSV

SEQ ID NO: 7824 - DNA, 845 bp, Homo sapiens
accttgtttcatgctcccagctgatcaatatttttattttccaggcttgcacagaaatctggaggcagtatcacctaacgaccaaacctggaccacccaaaaagccgaagaccccttcaagaccatcagccttagcatattgctatcactgcgcgcaaaaaggccattatggacacgaatgtccagaaagagaagtgtatgacccgtctccagtatctccattcatctgctactatgatgacaaatatgaaattcaggagagagaaaagagactaaaacaaaaaataaaagtactcaagaaaaatggggttatcccagagccatccaagctaccttatataaaagcagcaaatgagaacccccaccatgatataaggaagggccgtgcctcatggaaaagcaacaggtggcctcaagaaaataaagaaacacaaaaagaaatgaagaacaagaatagaaactgggagaagcacaggaaggctgacagacatcgtgaagtggatgaggattttcccaggggccccaaaacctactcttctcctggcagttttaaaacccagaagccttctaagccctttcaccgttcatcacattaccacacgtcaagagaagacaagtctcccaaggaaggcaagaggggcaagcagaagaaaaaggagaggtgctgggaagatgatgacaatgataacttatttcttattaagcagagaaaaaaaaagtcttaagccgtcaggcagcctctgatgtggcttttcattgttcatttggcctttgtgtctataaccttctggcactgtgtttattatctatgattaaataaagtgagtttttggttttgttttttt

SEQ ID NO: 7825 - protein, 63 aa, Homo sapiens
MLPADQYFYFPGLHRNLEAVSPNDQTWTTQKAEDPFKTISLSILLSLRAKRPLWTRMSRKRSV

SEQ ID NO: 7826 - DNA, 1606 bp, Homo sapiens
accttgtttcatgctcccagctgatcaatatttttattttccaggcttgcacagaaatctggaggcagtatcacctaacgaccaaacctggaccacccaaaaagccgaagaccccttcaagaccatcagccttagcatattgctatcactgcgcgcaaaaaggccattatggacacgaatgtccagaaagagaagtgtatgacccgtctccagtatctccattcatctgctactatgatgacaaatatgaaattcaggagagagaaaagagactaaaacaaaaaataaaagtactcaagaaaaatggggttatcccagagccatccaagctaccttatataaaagcagcaaatgagaacccccaccatgatataaggaagggccgtgcctcatggaaaagcaacaggtggcctcaagaaaataaagaaacacaaaaagaaatgaagaacaagaatagaaactgggagaagcacaggaaggctgacagacatcgtgaagtggatgaggattttcccaggggccccaaaacctactcttctcctggcagttttaaaacccagaagccttctaagccctttcaccgttcatcacattaccacacgtcaagagaagacaagtctcccaaggaaggcaagaggggcaagcagaagaaaaaggagaggtgctgggaagatgatgacaatgataacttatttcttattaagcagagaaaaaaaaagtcttaagccgtcaggcagcctctgatgtggcttttcattgttcatttggcctttgtgtctataaccttctggcactgtgtttattatctatgattaaataaagtgagtttttggttttgtttttttaatttcagccattcctagagttactgaatatccatggagatctcaattctctgtgtccaacaggatattaggtaagaaagtacaaagataaacctggacttctcctattccaatatgtcatctttactcagaatcctagggataggtagaagaattcatcttttcaagaaagtgttttaaaaatactttgggaaaaaaactgcatcaaaggtaatttatcctcaaattaaatccttgcaggaagagaaattaacactaagaaaaagtcatcaatatttttcaactttttttttttttttttttactttggaaaggacaataactataaacctatatccagattttctttctgctgaagctgttgtcagaatcttcctttggacaaaacatcactagctgactataaaaacaaaagtgtcatcattgaagccctgaagaggcagggaattgagcttcagcaaaatacaggaaaagaactatccagtataaatgtcagaagacagatttcctaaacaagtaaaagagacatcaaaaattttaacataatcacaatgaaatcattttttaccacttttacagcggtgtttcaagcggactgtcactcagatctgcagagatgaatattactcaaaaaatttttttgttctcttgcatttttttcaactaccgcaaagctatacagatttttttgtacttgtggatcttttgtacttctcataacctaatgtcagactaagaaaaataaaatatctgagagtaaa

SEQ ID NO: 7827 - protein, 63 aa, Homo sapiens; identical to SEQ ID NO: 7825

SEQ ID NO: 7828 - DNA, 1004 bp, Homo sapiens
caatgccaaattgaatgaggagggaagaaggagagggaagcacacattgacattaagagtaaaagaattgttcttaccatgttatatactttaatatatggaatcgcctgaatacaggtctccatacaaaactctaagaaacttctaaggaatcccttacctataaagctcttttggaaagaatgaggttttaattttcttctaacatcaacaaaccctcacaaatattcatgttgcagaccaaacctggaccacccaaaaagccgaagaccccttcaagaccatcagccttagcatattgctatcactgcgcgcaaaaaggccattatggacacgaatgtccagaaagagaagtgtatgacccgtctccagtatctccattcatctgctactatgatgacaaatatgaaattcaggagagagaaaagagactaaaacaaaaaataaaagtactcaagaaaaatggggttatcccagagccatccaagctaccttatataaaagcagcaaatgagaacccccaccatgatataaggaagggccgtgcctcatggaaaagcaacaggtggcctcaagaaaataaagaaacacaaaaagaaatgaagaacaagaatagaaactgggagaagcacaggaaggctgacagacatcgtgaagtggatgaggattttcccaggggccccaaaacctactcttctcctggcagttttaaaacccagaagccttctaagccctttcaccgttcatcacattaccacacgtcaagagaagacaagtctcccaaggaaggcaagaggggcaagcagaagaaaaaggagaggtgctgggaagatgatgacaatgataacttatttcttattaagcagagaaaaaaaaagtcttaagccgtcaggcagcctctgatgtggcttttcattgttcatttggcctttgtgtctataaccttctggcactgtgtttattatctatgattaaataaagtgagtttttggttttgttttttt

SEQ ID NO: 7829 - protein, 217 aa, Homo sapiens [sequence omitted]

SEQ ID NO: 7830 - DNA, 1765 bp, Homo sapiens
caatgccaaattgaatgaggagggaagaaggagagggaagcacacattgacattaagagtaaaagaattgttcttaccatgttatatactttaatatatggaatcgcctgaatacaggtctccatacaaaactctaagaaacttctaaggaatcccttacctataaagctcttttggaaagaatgaggttttaattttcttctaacatcaacaaaccctcacaaatattcatgttgcagaccaaacctggaccacccaaaaagccgaagaccccttcaagaccatcagccttagcatattgctatcactgcgcgcaaaaaggccattatggacacgaatgtccagaaagagaagtgtatgacccgtctccagtatctccattcatctgctactatgatgacaaatatgaaattcaggagagagaaaagagactaaaacaaaaaataaaagtactcaagaaaaatggggttatcccagagccatccaagctaccttatataaaagcagcaaatgagaacccccaccatgatataaggaagggccgtgcctcatggaaaagcaacaggtggcctcaagaaaataaagaaacacaaaaagaaatgaagaacaagaatagaaactgggagaagcacaggaaggctgacagacatcgtgaagtggatgaggattttcccaggggccccaaaacctactcttctcctggcagttttaaaacccagaagccttctaagccctttcaccgttcatcacattaccacacgtcaagagaagacaagtctcccaaggaaggcaagaggggcaagcagaagaaaaaggagaggtgctgggaagatgatgacaatgataacttatttcttattaagcagagaaaaaaaaagtcttaagccgtcaggcagcctctgatgtggcttttcattgttcatttggcctttgtgtctataaccttctggcactgtgtttattatctatgattaaataaagtgagtttttggttttgtttttttaatttcagccattcctagagttactgaatatccatggagatctcaattctctgtgtccaacaggatattaggtaagaaagtacaaagataaacctggacttctcctattccaatatgtcatctttactcagaatcctagggataggtagaagaattcatcttttcaagaaagtgttttaaaaatactttgggaaaaaaactgcatcaaaggtaatttatcctcaaattaaatccttgcaggaagagaaattaacactaagaaaaagtcatcaatatttttcaactttttttttttttttttttactttggaaaggacaataactataaacctatatccagattttctttctgctgaagctgttgtcagaatcttcctttggacaaaacatcactagctgactataaaaacaaaagtgtcatcattgaagccctgaagaggcagggaattgagcttcagcaaaatacaggaaaagaactatccagtataaatgtcagaagacagatttcctaaacaagtaaaagagacatcaaaaattttaacataatcacaatgaaatcattttttaccacttttacagcggtgtttcaagcggactgtcactcagatctgcagagatgaatattactcaaaaaatttttttgttctcttgcatttttttcaactaccgcaaagctatacagatttttttgtacttgtggatcttttgtacttctcataacctaatgtcagactaagaaaaataaaatatctgagagtaaa

SEQ ID NO: 7831 - protein, 217 aa, Homo sapiens [sequence omitted]

SEQ ID NO: 7832 - DNA, 703 bp, Homo sapiens
catgtgacatcataattttacatacaatttataggaatgtccagaaagagaagtgtatgacccgtctccagtatctccattcatctgctactatgatgacaaatatgaaattcaggagagagaaaagagactaaaacaaaaaataaaagtactcaagaaaaatggggttatcccagagccatccaagctaccttatataaaagcagcaaatgagaacccccaccatgatataaggaagggccgtgcctcatggaaaagcaacaggtggcctcaagaaaataaagaaacacaaaaagaaatgaagaacaagaatagaaactgggagaagcacaggaaggctgacagacatcgtgaagtggatgaggattttcccaggggccccaaaacctactcttctcctggcagttttaaaacccagaagccttctaagccctttcaccgttcatcacattaccacacgtcaagagaagacaagtctcccaaggaaggcaagaggggcaagcagaagaaaaaggagaggtgctgggaagatgatgacaatgataacttatttcttattaagcagagaaaaaaaaagtcttaagccgtcaggcagcctctgatgtggcttttcattgttcatttggcctttgtgtctataaccttctggcactgtgtttattatctatgattaaataaagtgagtttttggttttgttttttt

SEQ ID NO: 7833 - protein, 94 aa, Homo sapiens
MKNKNRNWEKHRKADRHREVDEDFPRGPKTYSSPGSFKTQKPSKPFHRSSHYHTSREDKSPKEGKRGKQKKKERCWEDDDNDNLFLIKQRKKKS

SEQ ID NO: 7834 - DNA, 1464 bp, Homo sapiens
catgtgacatcataattttacatacaatttataggaatgtccagaaagagaagtgtatgacccgtctccagtatctccattcatctgctactatgatgacaaatatgaaattcaggagagagaaaagagactaaaacaaaaaataaaagtactcaagaaaaatggggttatcccagagccatccaagctaccttatataaaagcagcaaatgagaacccccaccatgatataaggaagggccgtgcctcatggaaaagcaacaggtggcctcaagaaaataaagaaacacaaaaagaaatgaagaacaagaatagaaactgggagaagcacaggaaggctgacagacatcgtgaagtggatgaggattttcccaggggccccaaaacctactcttctcctggcagttttaaaacccagaagccttctaagccctttcaccgttcatcacattaccacacgtcaagagaagacaagtctcccaaggaaggcaagaggggcaagcagaagaaaaaggagaggtgctgggaagatgatgacaatgataacttatttcttattaagcagagaaaaaaaaagtcttaagccgtcaggcagcctctgatgtggcttttcattgttcatttggcctttgtgtctataaccttctggcactgtgtttattatctatgattaaataaagtgagtttttggttttgtttttttaatttcagccattcctagagttactgaatatccatggagatctcaattctctgtgtccaacaggatattaggtaagaaagtacaaagataaacctggacttctcctattccaatatgtcatctttactcagaatcctagggataggtagaagaattcatcttttcaagaaagtgttttaaaaatactttgggaaaaaaactgcatcaaaggtaatttatcctcaaattaaatccttgcaggaagagaaattaacactaagaaaaagtcatcaatatttttcaactttttttttttttttttttactttggaaaggacaataactataaacctatatccagattttctttctgctgaagctgttgtcagaatcttcctttggacaaaacatcactagctgactataaaaacaaaagtgtcatcattgaagccctgaagaggcagggaattgagcttcagcaaaatacaggaaaagaactatccagtataaatgtcagaagacagatttcctaaacaagtaaaagagacatcaaaaattttaacataatcacaatgaaatcattttttaccacttttacagcggtgtttcaagcggactgtcactcagatctgcagagatgaatattactcaaaaaatttttttgttctcttgcatttttttcaactaccgcaaagctatacagatttttttgtacttgtggatcttttgtacttctcataacctaatgtcagactaagaaaaataaaatatctgagagtaaa

SEQ ID NO: 7835 - protein, 94 aa, Homo sapiens; identical to SEQ ID NO: 7833

SEQ ID NO: 7836 - DNA, 562 bp, Homo sapiens
aaagaagaactgattgaagagtggcaaccagaacctcttgttcctcctgtcccaaaagaccatcctgctctcaactacaacatcgtttcaggaaacatctgcgtgagaagggcccctctcataaaatgaaaacaaaggacagaaagcattgctgagggcttaaggtgtggatgaaatgacacattgaagctgaagaatccccatgttgacagcattcaatccaagaaaagctccactgtacacatgttctaacatatgagtgatccaaaagagagagcttcacatacaatatcctatgcctactttctcagctcagagagagaggctcagtcattcataaactggagcaacattcatgtactgcggaccactttgaaagacttatctgtctcctgtttacagatgtgtacagcaagctgcaaagcactgcctgtccttttactcacaatcaattgcagagaacatgaagtacagaagacaacagctttttttttcttttggaaaatcccttaagtcctttccgtgctgtgctatcattgttcaggtgctaaagtgaaataaa

SEQ ID NO: 7837 - protein, 85 aa, Homo sapiens
MSDPKERASHTISYAYFLSSEREAQSFINWSNIHVLRTTLKDLSVSCLQMCTASCKALPVLLLTINCREHEVQKTTAFFFFWKIP

SEQ ID NO: 7838 - DNA, 578 bp, Homo sapiens
agaatgaagaaggatggaggagagcagtgtggcagaacatgaagatgattgagcagcacaatcaggaatacagggaagggaaacacagcttcacaatggccatgaacgcctttggagaaatgaccagtgaagaattcaggcaggtggtgaatggctttcaaaaccagaagcacaggaaggggaaagtgctccaggaacctctgcttcatgacatccgcaaatctgtggattggagagagaaaggctacgtgactcctgtgaaggatcagtgtgcagacctggtggactgctctaggcttcaaggcaatgttggctgcatttttggagaaccattattttgcttccagtatgttgccgacaatggaggcctggactctgaggaatccttttcatatgaagaaaaggaaaaagcctgtaggtacaatcccaagtattctgctactaatgacactgggtacatgcaaatactccctgtggaagagaaggccctaatgaaggctgtggcaactgtggggcgcatctctgctgttgtttatggacttcttgattccttctggtcctataaaaaaagaaggtaa

SEQ ID NO: 7839 - protein, 179 aa, Homo sapiens
MKMIEQHNQEYREGKHSFTMAMNAFGEMTSEEFRQVVNGFQNQKHRKGKVLQEPLLHDIRKSVDWREKGYVTPVKDQCADLVDCSRLQGNVGCIFGEPLFCFQYVADNGGLDSEESFSYEEKEKACRYNPKYSATNDTGYMQILPVEEKALMKAVATVGRISAVVYGLLDSFWSYKKRR

SEQ ID NO: 7840 - DNA, 729 bp, Homo sapiens
ctccactctgttccacccaggaatgggggatgaaatgttggggtgaaaagggcagggaatttgtgatcgtggtagcaccatggctggattcaggcaacagtgttttttcattcattcattctgaaaaattttattgagtctctttaagtcaggtcttgtgctgaggaatcaatgatgaaccaacactgagacattccctgtgctggagaagcctgaatgtgtagaaggctctaccatctagatttgtggtttccagtggaaaagacatcttgtttcctaaacaacaattggccacacactggagacacataacctgcctatgaactggagaatcctattgaaatcttagaggaagtttgagattttcctcagataggtgtttactattcaagttggcacgaataggttttgttaaaacccattttctttctattctgcctctatctggtacaagatagaactaaagaggatataaagcagcaaggtacaatttgaaatcaaatggcaacaatggaagataatggtcttggttcaacccaatgcccacctgaaatcacttttattaaggacgaccaactggaacaaaattgtatattagtcttctcatgataatttcaagtgtgttttgatttgagaatttctttatgaaagtcttcaaaaatcccacctcttaatccatggaattttccctggagtctgaaaattccccaaatctttggagacttgatg

SEQ ID NO: 7841 - protein, 31 aa, Homo sapiens
MCRRLYHLDLWFPVEKTSCFLNNNWPHTGDT

SEQ ID NO: 7842 - DNA, 901 bp, Homo sapiens
ctggattcccatcgtaacttcaaggaaaactttcacaatgtgcggagcccttgatgtcctgcaaatgaagaagaaggatgtccttaagttccttgcagcaggaacccacttaggtggcaccaatcttgacttccagatgaaacagtacatctataaaaggaaaagttatggcacctacatcacaaatctgaagaggacctgggagaagcttctgctggcagctcatgccattgttgccattgaataccctgctgatgtcagtgtcatattctccaggaatactggccagagggccgtgctgaagtttgctgctgccactggagccactccaattgctggccgcttcactcctgcaaccttcactaaccagatccaggcaaccttccgggagccacggcttcttgtggttaccgaccccagggctgaccaccagcctctcacggaggcatcttatgttaacctacctaccatcgctctgtgtaacacagattctcctctgcactgtgtggacattgccatcccatgcaacaacaagggagctccctcagtgggtcagatatggtggatgccagctcgggaagttctgcacatgcgtggcaccatttcctgtgaacacccgtgggaggtcatgcctgatctctacttctacagagatcctgaagagattgaaaaagaagagcaggctgctgctgaaaaggctgtgaccaaggaggaatttcagggtgagtggactgctctagctcctgagttcactgctactcagcctgagattgcagactggtttgaaggtatgcaggtgccctctgtgcctattcacagttccctactaaagactggagtgctcagcctgccacggaagtctagtctgcagctcccactgctcaggccactgagtgggtag

SEQ ID NO: 7843 - protein, 287 aa, Homo sapiens [sequence omitted]

SEQ ID NO: 7844 - DNA, 4548 bp, Homo sapiens
cgtcgcagttcggcgggcgcagtgcgcgtgcgccctgactgttggggggcgggcggcgtccgcggcgagggagcgggggcggggaggcgccgtctggctcaggctggggccggcgggagcgcgaacgagcgacggcggaacccgtgggcctgtggactgcagcctcggcggtcagcagagtgcttgtgatttcacgtatttttgctgaactcgtaaaagagacacttggatggtggattaaccagaacactaacattctgtgaaaagtttcaaattggagaatattgaattttcaccctagtccagcagctccgctgctcacttaaatacagatgaatgaagaccccattcggaaagacacctggccagcggtccagagctgatgcaggccatgctggagtatctgccaacatgatgaagaagaggacatcccacaaaaaacatcggagcagtgtgggtccgagcaaacctgtttcccagccccggcggaacatcgtaggctgcaggattcagcatgggtggaaagaggggaatggccctgttacccagtggaaaggaaccgttctggaccaggtgcctgtaaatccttctttgtatcttataaaatacgatggatttgactgtgtttatggactagaacttaataaagatgaaagagtttctgcgcttgaagtcctccctgatagagttgcgacatctcgaatcagcgatgcacacttggcagacacaatgattggcaaagcagtggaacatatgtttgagacagaggatggttctaaagatgagtggaggggaatggtcttagcacgtgcacctgtcatgaacacatggttttacattacctatgagaaagaccctgtcttgtacatgtaccaactcttagatgattacaaagaaggcgaccttcgcattatgcctgattccaatgattcacctccagcagaaagggaaccaggagaagttgtggacagcctggtaggcaaacaagtggaatatgccaaagaagatggctcgaaaaggactggcatggtcattcatcaagtagaagccaagccctccgtctatttcatcaagtttgatgatgatttccatatttatgtctacgatttggtgaaaacatcctagatgtcatcacaaactctgccaaatttgtggaactatgaaatgtattatttgtagacataaagacttgattgctttccagtttaatgaaagcttaaatgtccctgcgaacccacaatctctgccagcagaactggttttgttctgaatagtacagattgatgtgaacacaaagcattttgtgtaaggagaacccctttcttttaaaagaagtctgtctatttcgaggggagttacaggcaagtttggtaaaagttaagctagtatcatagtcatttaaaattgtaatagatcttaaccattttccccctcaccctaactctcttattctgccgccacaatgcaagcatagtttgatgttttcgttattgccttttttgagatgtatgtatctgtatctacctatatctatatgtgtgtatacatatataatatatacacacagatacaagtgtacacacacacaccacacaccacacacaccccactggcagtctttgtggattaggatgggggtgacataattttcttgagtttaacaggagtgctttacccaagtcagtcatggatatgatatcactgctctttatttaaaagtaaactttgggcacaggaaccatatgggaacattcagcttgtttaaaaaaaaaaaatcagaagttcagagcaccttttcaatctggagcccttaaaccataagtccaaatatgaattatttgtgaacagttaatgacccatattagaattttacaatctggtgaacaatctgggtaaaaggctacctttaattctaagcttcatttttttttgggggggggttacattttaatcataaattcttttttgcaaagcccaggttcttgttccacacagtgtaatgtaggtgtattttggacagcacatatggtccattgtgtacaagtcagtaatctggatttcagtacatggatttaaaaggcaacaatccatcactggtttgtgtgtttttggttaagtttctggaagaatacaatgcttttatattggaagtataagttttgagtggcattgttgccttctaacaagctctctgggacttttaaagttttattactattattgctaatgtatgattatggtcagagactttcaacccaccccttcctgcctacccctggcttttcctcacaaagaatgtctagacaaacagcagcttagtctcctgacacctcttgtggggtgcatgttcctgctccaggtatgctgttcatgtggattcattccattcagtggccccttggggtttgcatgccagtgaagcgttaccatagaagagccagccgtttgtgttcgcttggtaggtgtaagtaatagcagcccttagccacggagtctttatgtggtttattcctgcaaggttgttttaaactgaaatagaactgctagtgtgattggttgatcagcaaaacagctgctctcattttgttttggaggaaccctggtggtttgacagccaggagaaaggccatatgtgaaaccagtctcttgtggagattggaaatcctccctgatatttgggcagagcctaaacgtgcatgcttgtcactcaaacaccagaagtttgaatcagaggtctgagtgacctcttttgtggctgttcttgatggtttccaggcctcgttatgcatggtttgcttgatgcccattttttgtgccttgtgctgttggatggtaacgaccactcaccatgtaaacacagtacctcagttttctgtccacagctgcagtcgctctgtccctcgtgcttcactgtgggcagccagggacaagcttctgaaagcagtgtgatacccaagtcataggtgcttctcgtatgtgaacaggtgtcattctacagatctgttatgtgttttcctgttgactcttaagagtccctgcatgtaaatctcaaagctgagcctggctcccagagtccagactgacattacagcgcaagagtttgcaagtgtgtccagcatgcaccaactgtgcagaacttggctcggtaactttgcgtggaaaaataaagtacattttgaagtatcttgagggttgggtcaattgagacatttctagcattacttaatgacttgcattgtggtttttctgcaagcaactttaatgactttttttataccacatggtctcccagtttctagatgaatgcaacatgatgatggtgatgatgacgatgagtttaatcattgttcatttattgcctttagggctgagggaaagggaaggtttgtttttttttctccccattttcccccattctgtctttcttttggtgacttacaccacatgtaatgacgctatgactaattctgctcccaagcccttgtatcttgggcttcattttaggctcatgtgtcagatctgcatgcattgcttgcatttttctggtatctgaatgttggttccttgttccaggaattcaacattaatttccaaaagtatcatgggacttgtgacaatacaagacatgaatctatgtataaaatttatcggcctttctcatttacctgctctagtattattgtattgtgtgtgcgtgcgtgtgtgatgtcaggctgccacgtaaaacttcagagaaaaatcttaaaagcagaccatccttttttgcatgctctattctaagtagaatgttcaatgtaactgactaaaattgcatgttaaagatatttaggtttttttgttttctttatttttatttgttttcagtttcctgtatatttgcttactgtgccgttttagtggttttaggataaaaatgcactggtgaagcaaatgtagtgccaacagaaggtgattttccagttgtaaatgtcatgcagcatttgaagggactgtgttttcttaaaaaaaaatcacagttacttctaaaccagatttcatttcttttattgttttatgtgccaaaccacgaagtgcattgggcttcaatctctgaacactgtagacccattagaagactgttccgattgttacaaattgtagtgcctgaaaacactcttaagctgattgtcttaacaaaatgaaagttctccaaagacaaaacagaacaattattataacaaaataattatggttgaaatgtctgtggttccttggaaatgctgcgctctttgtgtttttccatcattagtgcagttggaatgaatgtgtataggtcagaggtcttcgtgttcacattttaaaattaggtaaatgacctcatctttcaagcttgaattcatttttaattttaattttattttatacaatgtgtagacagttccctgttctctgcatttagaagtatacacaatataaatctgttaattctgtaagtaatttttataattatgatgtaactctatcttatccttaaaacatttaaaataaaccctttatgtgcaactcctg

SEQ ID NO: 7845 - protein, 262 aa, Homo sapiens; identical to SEQ ID NO: 1098

SEQ ID NO: 7846 - DNA, 6164 bp, Homo sapiens
cgtcgcagttcggcgggcgcagtgcgcgtgcgccctgactgttggggggcgggcggcgtccgcggcgagggagcgggggcggggaggcgccgtctggctcaggctggggccggcgggagcgcgaacgagcgacggcggaacccgtgggcctgtggactgcagcctcggcggtcagcagagtgcttgtgatttcacgtatttttgctgaactcgtaaaagagacacttggatggtggattaaccagaacactaacattctgtgaaaagtttcaaattggagaatattgaattttcaccctagtccagcagctccgctgctcacttaaatacagatgaatgaagaccccattcggaaagacacctggccagcggtccagagctgatgcaggccatgctggagtatctgccaacatgatgaagaagaggacatcccacaaaaaacatcggagcagtgtgggtccgagcaaacctgtttcccagccccggcggaacatcgtaggctgcaggattcagcatgggtggaaagaggggaatggccctgttacccagtggaaaggaaccgttctggaccaggtgcctgtaaatccttctttgtatcttataaaatacgatggatttgactgtgtttatggactagaacttaataaagatgaaagagtttctgcgcttgaagtcctccctgatagagttgcgacatctcgaatcagcgatgcacacttggcagacacaatgattggcaaagcagtggaacatatgtttgagacagaggatggttctaaagatgagtggaggggaatggtcttagcacgtgcacctgtcatgaacacatggttttacattacctatgagaaagaccctgtcttgtacatgtaccaactcttagatgattacaaagaaggcgaccttcgcattatgcctgattccaatgattcacctccagcagaaagggaaccaggagaagttgtggacagcctggtaggcaaacaagtggaatatgccaaagaagatggctcgaaaaggactggcatggtcattcatcaagtagaagccaagccctccgtctatttcatcaagtttgatgatgatttccatatttatgtctacgatttggtgaaaacatcctagatgtcatcacaaactctgccaaatttgtggaactatgaaatgtattatttgtagacataaagacttgattgctttccagtttaatgaaagcttaaatgtccctgcgaacccacaatctctgccagcagaactggttttgttctgaatagtacagattgatgtgaacacaaagcattttgtgtaaggagaacccctttcttttaaaagaagtctgtctatttcgaggggagttacaggcaagtttggtaaaagttaagctagtatcatagtcatttaaaattgtaatagatcttaaccattttccccctcaccctaactctcttattctgccgccacaatgcaagcatagtttgatgttttcgttattgccttttttgagatgtatgtatctgtatctacctatatctatatgtgtgtatacatatataatatatacacacagatacaagtgtacacacacacaccacacaccacacacaccccactggcagtctttgtggattaggatgggggtgacataattttcttgagtttaacaggagtgctttacccaagtcagtcatggatatgatatcactgctctttatttaaaagtaaactttgggcacaggaaccatatgggaacattcagcttgtttaaaaaaaaaaaatcagaagttcagagcaccttttcaatctggagcccttaaaccataagtccaaatatgaattatttgtgaacagttaatgacccatattagaattttacaatctggtgaacaatctgggtaaaaggctacctttaattctaagcttcatttttttttgggggggggttacattttaatcataaattcttttttgcaaagcccaggttcttgttccacacagtgtaatgtaggtgtattttggacagcacatatggtccattgtgtacaagtcagtaatctggatttcagtacatggatttaaaaggcaacaatccatcactggtttgtgtgtttttggttaagtttctggaagaatacaatgcttttatattggaagtataagttttgagtggcattgttgccttctaacaagctctctgggacttttaaagttttattactattattgctaatgtatgattatggtcagagactttcaacccaccccttcctgcctacccctggcttttcctcacaaagaatgtctagacaaacagcagcttagtctcctgacacctcttgtggggtgcatgttcctgctccaggtatgctgttcatgtggattcattccattcagtggccccttggggtttgcatgccagtgaagcgttaccatagaagagccagccgtttgtgttcgcttggtaggtgtaagtaatagcagcccttagccacggagtctttatgtggtttattcctgcaaggttgttttaaactgaaatagaactgctagtgtgattggttgatcagcaaaacagctgctctcattttgttttggaggaaccctggtggtttgacagccaggagaaaggccatatgtgaaaccagtctcttgtggagattggaaatcctccctgatatttgggcagagcctaaacgtgcatgcttgtcactcaaacaccagaagtttgaatcagaggtctgagtgacctcttttgtggctgttcttgatggtttccaggcctcgttatgcatggtttgcttgatgcccattttttgtgccttgtgctgttggatggtaacgaccactcaccatgtaaacacagtacctcagttttctgtccacagctgcagtcgctctgtccctcgtgcttcactgtgggcagccagggacaagcttctgaaagcagtgtgatacccaagtcataggtgcttctcgtatgtgaacaggtgtcattctacagatctgttatgtgttttcctgttgactcttaagagtccctgcatgtaaatctcaaagctgagcctggctcccagagtccagactgacattacagcgcaagagtttgcaagtgtgtccagcatgcaccaactgtgcagaacttggctcggtaactttgcgtggaaaaataaagtacattttgaagtatcttgagggttgggtcaattgagacatttctagcattacttaatgacttgcattgtggtttttctgcaagcaactttaatgactttttttataccacatggtctcccagtttctagatgaatgcaacatgatgatggtgatgatgacgatgagtttaatcattgttcatttattgcctttagggctgagggaaagggaaggtttgtttttttttctccccattttcccccattctgtctttcttttggtgacttacaccacatgtaatgacgctatgactaattctgctcccaagcccttgtatcttgggcttcattttaggctcatgtgtcagatctgcatgcattgcttgcatttttctggtatctgaatgttggttccttgttccaggaattcaacattaatttccaaaagtatcatgggacttgtgacaatacaagacatgaatctatgtataaaatttatcggcctttctcatttacctgctctagtattattgtattgtgtgtgcgtgcgtgtgtgatgtcaggctgccacgtaaaacttcagagaaaaatcttaaaagcagaccatccttttttgcatgctctattctaagtagaatgttcaatgtaactgactaaaattgcatgttaaagatatttaggtttttttgttttctttatttttatttgttttcagtttcctgtatatttgcttactgtgccgttttagtggttttaggataaaaatgcactggtgaagcaaatgtagtgccaacagaaggtgattttccagttgtaaatgtcatgcagcatttgaagggactgtgttttcttaaaaaaaaatcacagttacttctaaaccagatttcatttcttttattgttttatgtgccaaaccacgaagtgcattgggcttcaatctctgaacactgtagacccattagaagactgttccgattgttacaaattgtagtgcctgaaaacactcttaagctgattgtcttaacaaaatgaaagttctccaaagacaaaacagaacaattattataacaaaataattatggttgaaatgtctgtggttccttggaaatgctgcgctctttgtgtttttccatcattagtgcagttggaatgaatgtgtataggtcagaggtcttcgtgttcacattttaaaattaggtaaatgacctcatctttcaagcttgaattcatttttaattttaattttattttatacaatgtgtagacagttccctgttctctgcatttagaagtatacacaatataaatctgttaattctgtaagtaatttttataattatgatgtaactctatcttatccttaaaacatttaaaataaaccctttatgtgcaactcctgactgtaaagtttgtgctgatgagcaacatgtgatgtgttaaacttgattctgaaaagttttttgggccaagtaaccttttcaccacatgtaaatgtcagatatgcatagaaagaaatagaatttttatttgataacattcaataatacctgaaagaagaggaggcagtcatcaatatcacacatatattaaatattgaagtttgcaatttgacattgagaaagtttaacttacaagatcttaaacttaaaaaaattcttttaaatataattaaataatgggtattttatacttttcacaagtattcttgctttgaatatttcttataatgcttttactcataaataataaacaatgggattctatagtgaaaaatcactatttctcaatgctaggatacaaaaaaatgaaagtaatataggctggtgcaaagtaatagcagttttgccactgcttttatggcaaaaaatgcaattactttttcaccaacctaatattaacacctatgtatgttttatctttcttgattattttaatcagtgaggtaaaaagtggaatttatggcatgctttaataagatttttttttttaatgtttcccagttcattttggcctaaggatctcatgcttaagtctgggatatttacctgcctttgggagaatggttgatacttggtgagggatgaatgcaaacttgggctttgggacgctgggcttctaggtttgtgtcagtgcagtgcctgtgctccaagtccatggaggttactgaggtggactgaaggcagggtctactccggcttaggtggaagaaggctgcagttcaaggaggaaatgagccattgggaagcacaggtgcctctcttgagtctgggttttctgaccttccttgctgaaggtagattattcgttgtctgtgttatctgtcatgggtacagctctgtaaatattgccccaaaagtataacaatgcaagtttagtctgaagtttgaaacttgataactagtatttgtaaactaatgaatcaactctcctatttaaagcagtcatcactctgttggagaatttttgttttttctcttggtacaattaaactctgtgatgacaaaagcatttggtactaataaagcattcataaatgcttaataagtaccttgccaagcactttccacactattttgtttagttcttaatggtcttttgaggaagaggcagagattgagtatctcacgcaggattataggggaatgaagactcggatctctattttgtgcccagactctgagctgctttatgaacacctcaattaaattacttcattggagtgatttgagtaatctatctatagtgtaatattttctatgaataattttctgtaaccttatttcataagttaatatctaaaaagtgtttatttccaaattgccaaataaaaggttttatattagtcattagaatgtaggcatctgtgtctctgtatgctaagaattataacccaaaattatttttgtgcttaaaaaataaatgatgtctccacgatggcacgcatatacttatgtaacaaacctgcacattctgcacatgtatcccggaacttaaaaaaattttttttccataact

SEQ ID NO: 7847 - protein, 262 aa, Homo sapiens; identical to SEQ ID NO: 1098

SEQ ID NO: 7848 - DNA, 4269 bp, Homo sapiens
ggagcgggggcggggaggcgccgtctggctcaggctggggccggcgggagcgcgaacgagcgacggcggaacccgtgggcctgtggactgcagcctcggcggtcagcaggccatgctggagtatctgccaacatgatgaagaagaggacatcccacaaaaaacatcggagcagtgtgggtccgagcaaacctgtttcccagccccggcggaacatcgtaggctgcaggattcagcatgggtggaaagaggggaatggccctgttacccagtggaaaggaaccgttctggaccaggtgcctgtaaatccttctttgtatcttataaaatacgatggatttgactgtgtttatggactagaacttaataaagatgaaagagtttctgcgcttgaagtcctccctgatagagttgcgacatctcgaatcagcgatgcacacttggcagacacaatgattggcaaagcagtggaacatatgtttgagacagaggatggttctaaagatgagtggaggggaatggtcttagcacgtgcacctgtcatgaacacatggttttacattacctatgagaaagaccctgtcttgtacatgtaccaactcttagatgattacaaagaaggcgaccttcgcattatgcctgattccaatgattcacctccagcagaaagggaaccaggagaagttgtggacagcctggtaggcaaacaagtggaatatgccaaagaagatggctcgaaaaggactggcatggtcattcatcaagtagaagccaagccctccgtctatttcatcaagtttgatgatgatttccatatttatgtctacgatttggtgaaaacatcctagatgtcatcacaaactctgccaaatttgtggaactatgaaatgtattatttgtagacataaagacttgattgctttccagtttaatgaaagcttaaatgtccctgcgaacccacaatctctgccagcagaactggttttgttctgaatagtacagattgatgtgaacacaaagcattttgtgtaaggagaacccctttcttttaaaagaagtctgtctatttcgaggggagttacaggcaagtttggtaaaagttaagctagtatcatagtcatttaaaattgtaatagatcttaaccattttccccctcaccctaactctcttattctgccgccacaatgcaagcatagtttgatgttttcgttattgccttttttgagatgtatgtatctgtatctacctatatctatatgtgtgtatacatatataatatatacacacagatacaagtgtacacacacacaccacacaccacacacaccccactggcagtctttgtggattaggatgggggtgacataattttcttgagtttaacaggagtgctttacccaagtcagtcatggatatgatatcactgctctttatttaaaagtaaactttgggcacaggaaccatatgggaacattcagcttgtttaaaaaaaaaaaatcagaagttcagagcaccttttcaatctggagcccttaaaccataagtccaaatatgaattatttgtgaacagttaatgacccatattagaattttacaatctggtgaacaatctgggtaaaaggctacctttaattctaagcttcatttttttttgggggggggttacattttaatcataaattcttttttgcaaagcccaggttcttgttccacacagtgtaatgtaggtgtattttggacagcacatatggtccattgtgtacaagtcagtaatctggatttcagtacatggatttaaaaggcaacaatccatcactggtttgtgtgtttttggttaagtttctggaagaatacaatgcttttatattggaagtataagttttgagtggcattgttgccttctaacaagctctctgggacttttaaagttttattactattattgctaatgtatgattatggtcagagactttcaacccaccccttcctgcctacccctggcttttcctcacaaagaatgtctagacaaacagcagcttagtctcctgacacctcttgtggggtgcatgttcctgctccaggtatgctgttcatgtggattcattccattcagtggccccttggggtttgcatgccagtgaagcgttaccatagaagagccagccgtttgtgttcgcttggtaggtgtaagtaatagcagcccttagccacggagtctttatgtggtttattcctgcaaggttgttttaaactgaaatagaactgctagtgtgattggttgatcagcaaaacagctgctctcattttgttttggaggaaccctggtggtttgacagccaggagaaaggccatatgtgaaaccagtctcttgtggagattggaaatcctccctgatatttgggcagagcctaaacgtgcatgcttgtcactcaaacaccagaagtttgaatcagaggtctgagtgacctcttttgtggctgttcttgatggtttccaggcctcgttatgcatggtttgcttgatgcccattttttgtgccttgtgctgttggatggtaacgaccactcaccatgtaaacacagtacctcagttttctgtccacagctgcagtcgctctgtccctcgtgcttcactgtgggcagccagggacaagcttctgaaagcagtgtgatacccaagtcataggtgcttctcgtatgtgaacaggtgtcattctacagatctgttatgtgttttcctgttgactcttaagagtccctgcatgtaaatctcaaagctgagcctggctcccagagtccagactgacattacagcgcaagagtttgcaagtgtgtccagcatgcaccaactgtgcagaacttggctcggtaactttgcgtggaaaaataaagtacattttgaagtatcttgagggttgggtcaattgagacatttctagcattacttaatgacttgcattgtggtttttctgcaagcaactttaatgactttttttataccacatggtctcccagtttctagatgaatgcaacatgatgatggtgatgatgacgatgagtttaatcattgttcatttattgcctttagggctgagggaaagggaaggtttgtttttttttctccccattttcccccattctgtctttcttttggtgacttacaccacatgtaatgacgctatgactaattctgctcccaagcccttgtatcttgggcttcattttaggctcatgtgtcagatctgcatgcattgcttgcatttttctggtatctgaatgttggttccttgttccaggaattcaacattaatttccaaaagtatcatgggacttgtgacaatacaagacatgaatctatgtataaaatttatcggcctttctcatttacctgctctagtattattgtattgtgtgtgcgtgcgtgtgtgatgtcaggctgccacgtaaaacttcagagaaaaatcttaaaagcagaccatccttttttgcatgctctattctaagtagaatgttcaatgtaactgactaaaattgcatgttaaagatatttaggtttttttgttttctttatttttatttgttttcagtttcctgtatatttgcttactgtgccgttttagtggttttaggataaaaatgcactggtgaagcaaatgtagtgccaacagaaggtgattttccagttgtaaatgtcatgcagcatttgaagggactgtgttttcttaaaaaaaaatcacagttacttctaaaccagatttcatttcttttattgttttatgtgccaaaccacgaagtgcattgggcttcaatctctgaacactgtagacccattagaagactgttccgattgttacaaattgtagtgcctgaaaacactcttaagctgattgtcttaacaaaatgaaagttctccaaagacaaaacagaacaattattataacaaaataattatggttgaaatgtctgtggttccttggaaatgctgcgctctttgtgtttttccatcattagtgcagttggaatgaatgtgtataggtcagaggtcttcgtgttcacattttaaaattaggtaaatgacctcatctttcaagcttgaattcatttttaattttaattttattttatacaatgtgtagacagttccctgttctctgcatttagaagtatacacaatataaatctgttaattctgtaagtaatttttataattatgatgtaactctatcttatccttaaaacatttaaaataaaccctttatgtgcaactcctg

SEQ ID NO: 7849 - protein, 237 aa, Homo sapiens
MMKKRTSHKKHRSSVGPSKPVSQPRRNIVGCRIQHGWKEGNGPVTQWKGTVLDQVPVNPSLYLIKYDGFDCVYGLELNKDERVSALEVLPDRVATSRISDAHLADTMIGKAVEHMFETEDGSKDEWRGMVLARAPVMNTWFYITYEKDPVLYMYQLLDDYKEGDLRIMPDSNDSPPAEREPGEVVDSLVGKQVEYAKEDGSKRTGMVIHQVEAKPSVYFIKFDDDFHIYVYDLVKTS

SEQ ID NO: 7850 - DNA, 4015 bp, Homo sapiens
ggagcgggggcggggaggcgccgtctggctcaggctggggccggcgggagcgcgaacgagcgacggcggaacccgtgggcctgtggactgcagcctcggcggtcagcaggccatgctggagtatctgccaacatgatgaagaagaggacatcccacaacgacatctcgaatcagcgatgcacacttggcagacacaatgattggcaaagcagtggaacatatgtttgagacagaggatggttctaaagatgagtggaggggaatggtcttagcacgtgcacctgtcatgaacacatggttttacattacctatgagaaagaccctgtcttgtacatgtaccaactcttagatgattacaaagaaggcgaccttcgcattatgcctgattccaatgattcacctccagcagaaagggaaccaggagaagttgtggacagcctggtaggcaaacaagtggaatatgccaaagaagatggctcgaaaaggactggcatggtcattcatcaagtagaagccaagccctccgtctatttcatcaagtttgatgatgatttccatatttatgtctacgatttggtgaaaacatcctagatgtcatcacaaactctgccaaatttgtggaactatgaaatgtattatttgtagacataaagacttgattgctttccagtttaatgaaagcttaaatgtccctgcgaacccacaatctctgccagcagaactggttttgttctgaatagtacagattgatgtgaacacaaagcattttgtgtaaggagaacccctttcttttaaaagaagtctgtctatttcgaggggagttacaggcaagtttggtaaaagttaagctagtatcatagtcatttaaaattgtaatagatcttaaccattttccccctcaccctaactctcttattctgccgccacaatgcaagcatagtttgatgttttcgttattgccttttttgagatgtatgtatctgtatctacctatatctatatgtgtgtatacatatataatatatacacacagatacaagtgtacacacacacaccacacaccacacacaccccactggcagtctttgtggattaggatgggggtgacataattttcttgagtttaacaggagtgctttacccaagtcagtcatggatatgatatcactgctctttatttaaaagtaaactttgggcacaggaaccatatgggaacattcagcttgtttaaaaaaaaaaaatcagaagttcagagcaccttttcaatctggagcccttaaaccataagtccaaatatgaattatttgtgaacagttaatgacccatattagaattttacaatctggtgaacaatctgggtaaaaggctacctttaattctaagcttcatttttttttgggggggggttacattttaatcataaattcttttttgcaaagcccaggttcttgttccacacagtgtaatgtaggtgtattttggacagcacatatggtccattgtgtacaagtcagtaatctggatttcagtacatggatttaaaaggcaacaatccatcactggtttgtgtgtttttggttaagtttctggaagaatacaatgcttttatattggaagtataagttttgagtggcattgttgccttctaacaagctctctgggacttttaaagttttattactattattgctaatgtatgattatggtcagagactttcaacccaccccttcctgcctacccctggcttttcctcacaaagaatgtctagacaaacagcagcttagtctcctgacacctcttgtggggtgcatgttcctgctccaggtatgctgttcatgtggattcattccattcagtggccccttggggtttgcatgccagtgaagcgttaccatagaagagccagccgtttgtgttcgcttggtaggtgtaagtaatagcagcccttagccacggagtctttatgtggtttattcctgcaaggttgttttaaactgaaatagaactgctagtgtgattggttgatcagcaaaacagctgctctcattttgttttggaggaaccctggtggtttgacagccaggagaaaggccatatgtgaaaccagtctcttgtggagattggaaatcctccctgatatttgggcagagcctaaacgtgcatgcttgtcactcaaacaccagaagtttgaatcagaggtctgagtgacctcttttgtggctgttcttgatggtttccaggcctcgttatgcatggtttgcttgatgcccattttttgtgccttgtgctgttggatggtaacgaccactcaccatgtaaacacagtacctcagttttctgtccacagctgcagtcgctctgtccctcgtgcttcactgtgggcagccagggacaagcttctgaaagcagtgtgatacccaagtcataggtgcttctcgtatgtgaacaggtgtcattctacagatctgttatgtgttttcctgttgactcttaagagtccctgcatgtaaatctcaaagctgagcctggctcccagagtccagactgacattacagcgcaagagtttgcaagtgtgtccagcatgcaccaactgtgcagaacttggctcggtaactttgcgtggaaaaataaagtacattttgaagtatcttgagggttgggtcaattgagacatttctagcattacttaatgacttgcattgtggtttttctgcaagcaactttaatgactttttttataccacatggtctcccagtttctagatgaatgcaacatgatgatggtgatgatgacgatgagtttaatcattgttcatttattgcctttagggctgagggaaagggaaggtttgtttttttttctccccattttcccccattctgtctttcttttggtgacttacaccacatgtaatgacgctatgactaattctgctcccaagcccttgtatcttgggcttcattttaggctcatgtgtcagatctgcatgcattgcttgcatttttctggtatctgaatgttggttccttgttccaggaattcaacattaatttccaaaagtatcatgggacttgtgacaatacaagacatgaatctatgtataaaatttatcggcctttctcatttacctgctctagtattattgtattgtgtgtgcgtgcgtgtgtgatgtcaggctgccacgtaaaacttcagagaaaaatcttaaaagcagaccatccttttttgcatgctctattctaagtagaatgttcaatgtaactgactaaaattgcatgttaaagatatttaggtttttttgttttctttatttttatttgttttcagtttcctgtatatttgcttactgtgccgttttagtggttttaggataaaaatgcactggtgaagcaaatgtagtgccaacagaaggtgattttccagttgtaaatgtcatgcagcatttgaagggactgtgttttcttaaaaaaaaatcacagttacttctaaaccagatttcatttcttttattgttttatgtgccaaaccacgaagtgcattgggcttcaatctctgaacactgtagacccattagaagactgttccgattgttacaaattgtagtgcctgaaaacactcttaagctgattgtcttaacaaaatgaaagttctccaaagacaaaacagaacaattattataacaaaataattatggttgaaatgtctgtggttccttggaaatgctgcgctctttgtgtttttccatcattagtgcagttggaatgaatgtgtataggtcagaggtcttcgtgttcacattttaaaattaggtaaatgacctcatctttcaagcttgaattcatttttaattttaattttattttatacaatgtgtagacagttccctgttctctgcatttagaagtatacacaatataaatctgttaattctgtaagtaatttttataattatgatgtaactctatcttatccttaaaacatttaaaataaaccctttatgtgcaactcctg

SEQ ID NO: 7851 - protein, 131 aa, Homo sapiens
MIGKAVEHMFETEDGSKDEWRGMVLARAPVMNTWFYITYEKDPVLYMYQLLDDYKEGDLRIMPDSNDSPPAEREPGEVVDSLVGKQVEYAKEDGSKRTGMVIHQVEAKPSVYFIKFDDDFHIYVYDLVKTS

SEQ ID NO: 7852 - DNA, 5631 bp, Homo sapiens
ggagcgggggcggggaggcgccgtctggctcaggctggggccggcgggagcgcgaacgagcgacggcggaacccgtgggcctgtggactgcagcctcggcggtcagcaggccatgctggagtatctgccaacatgatgaagaagaggacatcccacaacgacatctcgaatcagcgatgcacacttggcagacacaatgattggcaaagcagtggaacatatgtttgagacagaggatggttctaaagatgagtggaggggaatggtcttagcacgtgcacctgtcatgaacacatggttttacattacctatgagaaagaccctgtcttgtacatgtaccaactcttagatgattacaaagaaggcgaccttcgcattatgcctgattccaatgattcacctccagcagaaagggaaccaggagaagttgtggacagcctggtaggcaaacaagtggaatatgccaaagaagatggctcgaaaaggactggcatggtcattcatcaagtagaagccaagccctccgtctatttcatcaagtttgatgatgatttccatatttatgtctacgatttggtgaaaacatcctagatgtcatcacaaactctgccaaatttgtggaactatgaaatgtattatttgtagacataaagacttgattgctttccagtttaatgaaagcttaaatgtccctgcgaacccacaatctctgccagcagaactggttttgttctgaatagtacagattgatgtgaacacaaagcattttgtgtaaggagaacccctttcttttaaaagaagtctgtctatttcgaggggagttacaggcaagtttggtaaaagttaagctagtatcatagtcatttaaaattgtaatagatcttaaccattttccccctcaccctaactctcttattctgccgccacaatgcaagcatagtttgatgttttcgttattgccttttttgagatgtatgtatctgtatctacctatatctatatgtgtgtatacatatataatatatacacacagatacaagtgtacacacacacaccacacaccacacacaccccactggcagtctttgtggattaggatgggggtgacataattttcttgagtttaacaggagtgctttacccaagtcagtcatggatatgatatcactgctctttatttaaaagtaaactttgggcacaggaaccatatgggaacattcagcttgtttaaaaaaaaaaaatcagaagttcagagcaccttttcaatctggagcccttaaaccataagtccaaatatgaattatttgtgaacagttaatgacccatattagaattttacaatctggtgaacaatctgggtaaaaggctacctttaattctaagcttcatttttttttgggggggggttacattttaatcataaattcttttttgcaaagcccaggttcttgttccacacagtgtaatgtaggtgtattttggacagcacatatggtccattgtgtacaagtcagtaatctggatttcagtacatggatttaaaaggcaacaatccatcactggtttgtgtgtttttggttaagtttctggaagaatacaatgcttttatattggaagtataagttttgagtggcattgttgccttctaacaagctctctgggacttttaaagttttattactattattgctaatgtatgattatggtcagagactttcaacccaccccttcctgcctacccctggcttttcctcacaaagaatgtctagacaaacagcagcttagtctcctgacacctcttgtggggtgcatgttcctgctccaggtatgctgttcatgtggattcattccattcagtggccccttggggtttgcatgccagtgaagcgttaccatagaagagccagccgtttgtgttcgcttggtaggtgtaagtaatagcagcccttagccacggagtctttatgtggtttattcctgcaaggttgttttaaactgaaatagaactgctagtgtgattggttgatcagcaaaacagctgctctcattttgttttggaggaaccctggtggtttgacagccaggagaaaggccatatgtgaaaccagtctcttgtggagattggaaatcctccctgatatttgggcagagcctaaacgtgcatgcttgtcactcaaacaccagaagtttgaatcagaggtctgagtgacctcttttgtggctgttcttgatggtttccaggcctcgttatgcatggtttgcttgatgcccattttttgtgccttgtgctgttggatggtaacgaccactcaccatgtaaacacagtacctcagttttctgtccacagctgcagtcgctctgtccctcgtgcttcactgtgggcagccagggacaagcttctgaaagcagtgtgatacccaagtcataggtgcttctcgtatgtgaacaggtgtcattctacagatctgttatgtgttttcctgttgactcttaagagtccctgcatgtaaatctcaaagctgagcctggctcccagagtccagactgacattacagcgcaagagtttgcaagtgtgtccagcatgcaccaactgtgcagaacttggctcggtaactttgcgtggaaaaataaagtacattttgaagtatcttgagggttgggtcaattgagacatttctagcattacttaatgacttgcattgtggtttttctgcaagcaactttaatgactttttttataccacatggtctcccagtttctagatgaatgcaacatgatgatggtgatgatgacgatgagtttaatcattgttcatttattgcctttagggctgagggaaagggaaggtttgtttttttttctccccattttcccccattctgtctttcttttggtgacttacaccacatgtaatgacgctatgactaattctgctcccaagcccttgtatcttgggcttcattttaggctcatgtgtcagatctgcatgcattgcttgcatttttctggtatctgaatgttggttccttgttccaggaattcaacattaatttccaaaagtatcatgggacttgtgacaatacaagacatgaatctatgtataaaatttatcggcctttctcatttacctgctctagtattattgtattgtgtgtgcgtgcgtgtgtgatgtcaggctgccacgtaaaacttcagagaaaaatcttaaaagcagaccatccttttttgcatgctctattctaagtagaatgttcaatgtaactgactaaaattgcatgttaaagatatttaggtttttttgttttctttatttttatttgttttcagtttcctgtatatttgcttactgtgccgttttagtggttttaggataaaaatgcactggtgaagcaaatgtagtgccaacagaaggtgattttccagttgtaaatgtcatgcagcatttgaagggactgtgttttcttaaaaaaaaatcacagttacttctaaaccagatttcatttcttttattgttttatgtgccaaaccacgaagtgcattgggcttcaatctctgaacactgtagacccattagaagactgttccgattgttacaaattgtagtgcctgaaaacactcttaagctgattgtcttaacaaaatgaaagttctccaaagacaaaacagaacaattattataacaaaataattatggttgaaatgtctgtggttccttggaaatgctgcgctctttgtgtttttccatcattagtgcagttggaatgaatgtgtataggtcagaggtcttcgtgttcacattttaaaattaggtaaatgacctcatctttcaagcttgaattcatttttaattttaattttattttatacaatgtgtagacagttccctgttctctgcatttagaagtatacacaatataaatctgttaattctgtaagtaatttttataattatgatgtaactctatcttatccttaaaacatttaaaataaaccctttatgtgcaactcctgactgtaaagtttgtgctgatgagcaacatgtgatgtgttaaacttgattctgaaaagttttttgggccaagtaaccttttcaccacatgtaaatgtcagatatgcatagaaagaaatagaatttttatttgataacattcaataatacctgaaagaagaggaggcagtcatcaatatcacacatatattaaatattgaagtttgcaatttgacattgagaaagtttaacttacaagatcttaaacttaaaaaaattcttttaaatataattaaataatgggtattttatacttttcacaagtattcttgctttgaatatttcttataatgcttttactcataaataataaacaatgggattctatagtgaaaaatcactatttctcaatgctaggatacaaaaaaatgaaagtaatataggctggtgcaaagtaatagcagttttgccactgcttttatggcaaaaaatgcaattactttttcaccaacctaatattaacacctatgtatgttttatctttcttgattattttaatcagtgaggtaaaaagtggaatttatggcatgctttaataagatttttttttttaatgtttcccagttcattttggcctaaggatctcatgcttaagtctgggatatttacctgcctttgggagaatggttgatacttggtgagggatgaatgcaaacttgggctttgggacgctgggcttctaggtttgtgtcagtgcagtgcctgtgctccaagtccatggaggttactgaggtggactgaaggcagggtctactccggcttaggtggaagaaggctgcagttcaaggaggaaatgagccattgggaagcacaggtgcctctcttgagtctgggttttctgaccttccttgctgaaggtagattattcgttgtctgtgttatctgtcatgggtacagctctgtaaatattgccccaaaagtataacaatgcaagtttagtctgaagtttgaaacttgataactagtatttgtaaactaatgaatcaactctcctatttaaagcagtcatcactctgttggagaatttttgttttttctcttggtacaattaaactctgtgatgacaaaagcatttggtactaataaagcattcataaatgcttaataagtaccttgccaagcactttccacactattttgtttagttcttaatggtcttttgaggaagaggcagagattgagtatctcacgcaggattataggggaatgaagactcggatctctattttgtgcccagactctgagctgctttatgaacacctcaattaaattacttcattggagtgatttgagtaatctatctatagtgtaatattttctatgaataattttctgtaaccttatttcataagttaatatctaaaaagtgtttatttccaaattgccaaataaaaggttttatattagtcattagaatgtaggcatctgtgtctctgtatgctaagaattataacccaaaattatttttgtgcttaaaaaataaatgatgtctccacgatggcacgcatatacttatgtaacaaacctgcacattctgcacatgtatcccggaacttaaaaaaattttttttccataact

SEQ ID NO: 7853 - protein, 131 aa, Homo sapiens; identical to SEQ ID NO: 7851

SEQ ID NO: 7854 - DNA, 5885 bp, Homo sapiens
ggagcgggggcggggaggcgccgtctggctcaggctggggccggcgggagcgcgaacgagcgacggcggaacccgtgggcctgtggactgcagcctcggcggtcagcaggccatgctggagtatctgccaacatgatgaagaagaggacatcccacaaaaaacatcggagcagtgtgggtccgagcaaacctgtttcccagccccggcggaacatcgtaggctgcaggattcagcatgggtggaaagaggggaatggccctgttacccagtggaaaggaaccgttctggaccaggtgcctgtaaatccttctttgtatcttataaaatacgatggatttgactgtgtttatggactagaacttaataaagatgaaagagtttctgcgcttgaagtcctccctgatagagttgcgacatctcgaatcagcgatgcacacttggcagacacaatgattggcaaagcagtggaacatatgtttgagacagaggatggttctaaagatgagtggaggggaatggtcttagcacgtgcacctgtcatgaacacatggttttacattacctatgagaaagaccctgtcttgtacatgtaccaactcttagatgattacaaagaaggcgaccttcgcattatgcctgattccaatgattcacctccagcagaaagggaaccaggagaagttgtggacagcctggtaggcaaacaagtggaatatgccaaagaagatggctcgaaaaggactggcatggtcattcatcaagtagaagccaagccctccgtctatttcatcaagtttgatgatgatttccatatttatgtctacgatttggtgaaaacatcctagatgtcatcacaaactctgccaaatttgtggaactatgaaatgtattatttgtagacataaagacttgattgctttccagtttaatgaaagcttaaatgtccctgcgaacccacaatctctgccagcagaactggttttgttctgaatagtacagattgatgtgaacacaaagcattttgtgtaaggagaacccctttcttttaaaagaagtctgtctatttcgaggggagttacaggcaagtttggtaaaagttaagctagtatcatagtcatttaaaattgtaatagatcttaaccattttccccctcaccctaactctcttattctgccgccacaatgcaagcatagtttgatgttttcgttattgccttttttgagatgtatgtatctgtatctacctatatctatatgtgtgtatacatatataatatatacacacagatacaagtgtacacacacacaccacacaccacacacaccccactggcagtctttgtggattaggatgggggtgacataattttcttgagtttaacaggagtgctttacccaagtcagtcatggatatgatatcactgctctttatttaaaagtaaactttgggcacaggaaccatatgggaacattcagcttgtttaaaaaaaaaaaatcagaagttcagagcaccttttcaatctggagcccttaaaccataagtccaaatatgaattatttgtgaacagttaatgacccatattagaattttacaatctggtgaacaatctgggtaaaaggctacctttaattctaagcttcatttttttttgggggggggttacattttaatcataaattcttttttgcaaagcccaggttcttgttccacacagtgtaatgtaggtgtattttggacagcacatatggtccattgtgtacaagtcagtaatctggatttcagtacatggatttaaaaggcaacaatccatcactggtttgtgtgtttttggttaagtttctggaagaatacaatgcttttatattggaagtataagttttgagtggcattgttgccttctaacaagctctctgggacttttaaagttttattactattattgctaatgtatgattatggtcagagactttcaacccaccccttcctgcctacccctggcttttcctcacaaagaatgtctagacaaacagcagcttagtctcctgacacctcttgtggggtgcatgttcctgctccaggtatgctgttcatgtggattcattccattcagtggccccttggggtttgcatgccagtgaagcgttaccatagaagagccagccgtttgtgttcgcttggtaggtgtaagtaatagcagcccttagccacggagtctttatgtggtttattcctgcaaggttgttttaaactgaaatagaactgctagtgtgattggttgatcagcaaaacagctgctctcattttgttttggaggaaccctggtggtttgacagccaggagaaaggccatatgtgaaaccagtctcttgtggagattggaaatcctccctgatatttgggcagagcctaaacgtgcatgcttgtcactcaaacaccagaagtttgaatcagaggtctgagtgacctcttttgtggctgttcttgatggtttccaggcctcgttatgcatggtttgcttgatgcccattttttgtgccttgtgctgttggatggtaacgaccactcaccatgtaaacacagtacctcagttttctgtccacagctgcagtcgctctgtccctcgtgcttcactgtgggcagccagggacaagcttctgaaagcagtgtgatacccaagtcataggtgcttctcgtatgtgaacaggtgtcattctacagatctgttatgtgttttcctgttgactcttaagagtccctgcatgtaaatctcaaagctgagcctggctcccagagtccagactgacattacagcgcaagagtttgcaagtgtgtccagcatgcaccaactgtgcagaacttggctcggtaactttgcgtggaaaaataaagtacattttgaagtatcttgagggttgggtcaattgagacatttctagcattacttaatgacttgcattgtggtttttctgcaagcaactttaatgactttttttataccacatggtctcccagtttctagatgaatgcaacatgatgatggtgatgatgacgatgagtttaatcattgttcatttattgcctttagggctgagggaaagggaaggtttgtttttttttctccccattttcccccattctgtctttcttttggtgacttacaccacatgtaatgacgctatgactaattctgctcccaagcccttgtatcttgggcttcattttaggctcatgtgtcagatctgcatgcattgcttgcatttttctggtatctgaatgttggttccttgttccaggaattcaacattaatttccaaaagtatcatgggacttgtgacaatacaagacatgaatctatgtataaaatttatcggcctttctcatttacctgctctagtattattgtattgtgtgtgcgtgcgtgtgtgatgtcaggctgccacgtaaaacttcagagaaaaatcttaaaagcagaccatccttttttgcatgctctattctaagtagaatgttcaatgtaactgactaaaattgcatgttaaagatatttaggtttttttgttttctttatttttatttgttttcagtttcctgtatatttgcttactgtgccgttttagtggttttaggataaaaatgcactggtgaagcaaatgtagtgccaacagaaggtgattttccagttgtaaatgtcatgcagcatttgaagggactgtgttttcttaaaaaaaaatcacagttacttctaaaccagatttcatttcttttattgttttatgtgccaaaccacgaagtgcattgggcttcaatctctgaacactgtagacccattagaagactgttccgattgttacaaattgtagtgcctgaaaacactcttaagctgattgtcttaacaaaatgaaagttctccaaagacaaaacagaacaattattataacaaaataattatggttgaaatgtctgtggttccttggaaatgctgcgctctttgtgtttttccatcattagtgcagttggaatgaatgtgtataggtcagaggtcttcgtgttcacattttaaaattaggtaaatgacctcatctttcaagcttgaattcatttttaattttaattttattttatacaatgtgtagacagttccctgttctctgcatttagaagtatacacaatataaatctgttaattctgtaagtaatttttataattatgatgtaactctatcttatccttaaaacatttaaaataaaccctttatgtgcaactcctgactgtaaagtttgtgctgatgagcaacatgtgatgtgttaaacttgattctgaaaagttttttgggccaagtaaccttttcaccacatgtaaatgtcagatatgcatagaaagaaatagaatttttatttgataacattcaataatacctgaaagaagaggaggcagtcatcaatatcacacatatattaaatattgaagtttgcaatttgacattgagaaagtttaacttacaagatcttaaacttaaaaaaattcttttaaatataattaaataatgggtattttatacttttcacaagtattcttgctttgaatatttcttataatgcttttactcataaataataaacaatgggattctatagtgaaaaatcactatttctcaatgctaggatacaaaaaaatgaaagtaatataggctggtgcaaagtaatagcagttttgccactgcttttatggcaaaaaatgcaattactttttcaccaacctaatattaacacctatgtatgttttatctttcttgattattttaatcagtgaggtaaaaagtggaatttatggcatgctttaataagatttttttttttaatgtttcccagttcattttggcctaaggatctcatgcttaagtctgggatatttacctgcctttgggagaatggttgatacttggtgagggatgaatgcaaacttgggctttgggacgctgggcttctaggtttgtgtcagtgcagtgcctgtgctccaagtccatggaggttactgaggtggactgaaggcagggtctactccggcttaggtggaagaaggctgcagttcaaggaggaaatgagccattgggaagcacaggtgcctctcttgagtctgggttttctgaccttccttgctgaaggtagattattcgttgtctgtgttatctgtcatgggtacagctctgtaaatattgccccaaaagtataacaatgcaagtttagtctgaagtttgaaacttgataactagtatttgtaaactaatgaatcaactctcctatttaaagcagtcatcactctgttggagaatttttgttttttctcttggtacaattaaactctgtgatgacaaaagcatttggtactaataaagcattcataaatgcttaataagtaccttgccaagcactttccacactattttgtttagttcttaatggtcttttgaggaagaggcagagattgagtatctcacgcaggattataggggaatgaagactcggatctctattttgtgcccagactctgagctgctttatgaacacctcaattaaattacttcattggagtgatttgagtaatctatctatagtgtaatattttctatgaataattttctgtaaccttatttcataagttaatatctaaaaagtgtttatttccaaattgccaaataaaaggttttatattagtcattagaatgtaggcatctgtgtctctgtatgctaagaattataacccaaaattatttttgtgcttaaaaaataaatgatgtctccacgatggcacgcatatacttatgtaacaaacctgcacattctgcacatgtatcccggaacttaaaaaaattttttttccataact

SEQ ID NO: 7855 - protein, 237 aa, Homo sapiens; identical to SEQ ID NO: 7849

SEQ ID NO: 7856 - DNA, 4868 bp, Homo sapiens
gagcgggggcggggaggcgccgtctggctcaggctggggccggcgggagcgcgaacgagcgacggcggaacccgtgggcctgtggactgcagcctcggcggtcagcagcaatgaggtcttactgtgtagcccaggctgctctggaactcctggactcaagtgatcttcctaccttggtcttccaaagtgttgggattacagatggagtttcgctcttgttgcccaggctggagtgtagtagcatgatctcggctcactgcaacctccgcctcctgagttcaagtgattctcctgcctcagcctcccgagtatctgggattacaggcattttatctcgacaatgctagttgcagtctgtgtgaccctgaccaagttattttaatgtctgtgctgcagtttttcagtttccaagatggaatagttatagtgcatatcttcctcatggttgtgaggagtgcatgacacatagcgagtgctcagtgaacagtcatttttctgagtgcttgtgatttcacgtatttttgctgaactcgtaaaagagacacttggatggtggattaaccagaacactaacattctgtgaaaagtttcaaattggagaatattgaattttcaccctagtccagcagctccgctgctcacttaaatacagatgaatgaagaccccattcggaaagacacctggccagcggtccagagctgatgcaggccatgctggagtatctgccaacatgatgaagaagaggacatcccacaaaaaacatcggagcagtgtgggtccgagcaaacctgtttcccagccccggcggaacatcgtaggctgcaggattcagcatgggtggaaagaggggaatggccctgttacccagtggaaaggaaccgttctggaccaggtgcctgtaaatccttctttgtatcttataaaatacgatggatttgactgtgtttatggactagaacttaataaagatgaaagagtttctgcgcttgaagtcctccctgatagagttgcgacatctcgaatcagcgatgcacacttggcagacacaatgattggcaaagcagtggaacatatgtttgagacagaggatggttctaaagatgagtggaggggaatggtcttagcacgtgcacctgtcatgaacacatggttttacattacctatgagaaagaccctgtcttgtacatgtaccaactcttagatgattacaaagaaggcgaccttcgcattatgcctgattccaatgattcacctccagcagaaagggaaccaggagaagttgtggacagcctggtaggcaaacaagtggaatatgccaaagaagatggctcgaaaaggactggcatggtcattcatcaagtagaagccaagccctccgtctatttcatcaagtttgatgatgatttccatatttatgtctacgatttggtgaaaacatcctagatgtcatcacaaactctgccaaatttgtggaactatgaaatgtattatttgtagacataaagacttgattgctttccagtttaatgaaagcttaaatgtccctgcgaacccacaatctctgccagcagaactggttttgttctgaatagtacagattgatgtgaacacaaagcattttgtgtaaggagaacccctttcttttaaaagaagtctgtctatttcgaggggagttacaggcaagtttggtaaaagttaagctagtatcatagtcatttaaaattgtaatagatcttaaccattttccccctcaccctaactctcttattctgccgccacaatgcaagcatagtttgatgttttcgttattgccttttttgagatgtatgtatctgtatctacctatatctatatgtgtgtatacatatataatatatacacacagatacaagtgtacacacacacaccacacaccacacacaccccactggcagtctttgtggattaggatgggggtgacataattttcttgagtttaacaggagtgctttacccaagtcagtcatggatatgatatcactgctctttatttaaaagtaaactttgggcacaggaaccatatgggaacattcagcttgtttaaaaaaaaaaaatcagaagttcagagcaccttttcaatctggagcccttaaaccataagtccaaatatgaattatttgtgaacagttaatgacccatattagaattttacaatctggtgaacaatctgggtaaaaggctacctttaattctaagcttcatttttttttgggggggggttacattttaatcataaattcttttttgcaaagcccaggttcttgttccacacagtgtaatgtaggtgtattttggacagcacatatggtccattgtgtacaagtcagtaatctggatttcagtacatggatttaaaaggcaacaatccatcactggtttgtgtgtttttggttaagtttctggaagaatacaatgcttttatattggaagtataagttttgagtggcattgttgccttctaacaagctctctgggacttttaaagttttattactattattgctaatgtatgattatggtcagagactttcaacccaccccttcctgcctacccctggcttttcctcacaaagaatgtctagacaaacagcagcttagtctcctgacacctcttgtggggtgcatgttcctgctccaggtatgctgttcatgtggattcattccattcagtggccccttggggtttgcatgccagtgaagcgttaccatagaagagccagccgtttgtgttcgcttggtaggtgtaagtaatagcagcccttagccacggagtctttatgtggtttattcctgcaaggttgttttaaactgaaatagaactgctagtgtgattggttgatcagcaaaacagctgctctcattttgttttggaggaaccctggtggtttgacagccaggagaaaggccatatgtgaaaccagtctcttgtggagattggaaatcctccctgatatttgggcagagcctaaacgtgcatgcttgtcactcaaacaccagaagtttgaatcagaggtctgagtgacctcttttgtggctgttcttgatggtttccaggcctcgttatgcatggtttgcttgatgcccattttttgtgccttgtgctgttggatggtaacgaccactcaccatgtaaacacagtacctcagttttctgtccacagctgcagtcgctctgtccctcgtgcttcactgtgggcagccagggacaagcttctgaaagcagtgtgatacccaagtcataggtgcttctcgtatgtgaacaggtgtcattctacagatctgttatgtgttttcctgttgactcttaagagtccctgcatgtaaatctcaaagctgagcctggctcccagagtccagactgacattacagcgcaagagtttgcaagtgtgtccagcatgcaccaactgtgcagaacttggctcggtaactttgcgtggaaaaataaagtacattttgaagtatcttgagggttgggtcaattgagacatttctagcattacttaatgacttgcattgtggtttttctgcaagcaactttaatgactttttttataccacatggtctcccagtttctagatgaatgcaacatgatgatggtgatgatgacgatgagtttaatcattgttcatttattgcctttagggctgagggaaagggaaggtttgtttttttttctccccattttcccccattctgtctttcttttggtgacttacaccacatgtaatgacgctatgactaattctgctcccaagcccttgtatcttgggcttcattttaggctcatgtgtcagatctgcatgcattgcttgcatttttctggtatctgaatgttggttccttgttccaggaattcaacattaatttccaaaagtatcatgggacttgtgacaatacaagacatgaatctatgtataaaatttatcggcctttctcatttacctgctctagtattattgtattgtgtgtgcgtgcgtgtgtgatgtcaggctgccacgtaaaacttcagagaaaaatcttaaaagcagaccatccttttttgcatgctctattctaagtagaatgttcaatgtaactgactaaaattgcatgttaaagatatttaggtttttttgttttctttatttttatttgttttcagtttcctgtatatttgcttactgtgccgttttagtggttttaggataaaaatgcactggtgaagcaaatgtagtgccaacagaaggtgattttccagttgtaaatgtcatgcagcatttgaagggactgtgttttcttaaaaaaaaatcacagttacttctaaaccagatttcatttcttttattgttttatgtgccaaaccacgaagtgcattgggcttcaatctctgaacactgtagacccattagaagactgttccgattgttacaaattgtagtgcctgaaaacactcttaagctgattgtcttaacaaaatgaaagttctccaaagacaaaacagaacaattattataacaaaataattatggttgaaatgtctgtggttccttggaaatgctgcgctctttgtgtttttccatcattagtgcagttggaatgaatgtgtataggtcagaggtcttcgtgttcacattttaaaattaggtaaatgacctcatctttcaagcttgaattcatttttaattttaattttattttatacaatgtgtagacagttccctgttctctgcatttagaagtatacacaatataaatctgttaattctgtaagtaatttttataattatgatgtaactctatcttatccttaaaacatttaaaataaaccctttatgtgcaactcctg

SEQ ID NO: 7857 - protein, 262 aa, Homo sapiens; identical to SEQ ID NO: 1098

SEQ ID NO: 7858 - DNA, 6484 bp, Homo sapiens
gagcgggggcggggaggcgccgtctggctcaggctggggccggcgggagcgcgaacgagcgacggcggaacccgtgggcctgtggactgcagcctcggcggtcagcagcaatgaggtcttactgtgtagcccaggctgctctggaactcctggactcaagtgatcttcctaccttggtcttccaaagtgttgggattacagatggagtttcgctcttgttgcccaggctggagtgtagtagcatgatctcggctcactgcaacctccgcctcctgagttcaagtgattctcctgcctcagcctcccgagtatctgggattacaggcattttatctcgacaatgctagttgcagtctgtgtgaccctgaccaagttattttaatgtctgtgctgcagtttttcagtttccaagatggaatagttatagtgcatatcttcctcatggttgtgaggagtgcatgacacatagcgagtgctcagtgaacagtcatttttctgagtgcttgtgatttcacgtatttttgctgaactcgtaaaagagacacttggatggtggattaaccagaacactaacattctgtgaaaagtttcaaattggagaatattgaattttcaccctagtccagcagctccgctgctcacttaaatacagatgaatgaagaccccattcggaaagacacctggccagcggtccagagctgatgcaggccatgctggagtatctgccaacatgatgaagaagaggacatcccacaaaaaacatcggagcagtgtgggtccgagcaaacctgtttcccagccccggcggaacatcgtaggctgcaggattcagcatgggtggaaagaggggaatggccctgttacccagtggaaaggaaccgttctggaccaggtgcctgtaaatccttctttgtatcttataaaatacgatggatttgactgtgtttatggactagaacttaataaagatgaaagagtttctgcgcttgaagtcctccctgatagagttgcgacatctcgaatcagcgatgcacacttggcagacacaatgattggcaaagcagtggaacatatgtttgagacagaggatggttctaaagatgagtggaggggaatggtcttagcacgtgcacctgtcatgaacacatggttttacattacctatgagaaagaccctgtcttgtacatgtaccaactcttagatgattacaaagaaggcgaccttcgcattatgcctgattccaatgattcacctccagcagaaagggaaccaggagaagttgtggacagcctggtaggcaaacaagtggaatatgccaaagaagatggctcgaaaaggactggcatggtcattcatcaagtagaagccaagccctccgtctatttcatcaagtttgatgatgatttccatatttatgtctacgatttggtgaaaacatcctagatgtcatcacaaactctgccaaatttgtggaactatgaaatgtattatttgtagacataaagacttgattgctttccagtttaatgaaagcttaaatgtccctgcgaacccacaatctctgccagcagaactggttttgttctgaatagtacagattgatgtgaacacaaagcattttgtgtaaggagaacccctttcttttaaaagaagtctgtctatttcgaggggagttacaggcaagtttggtaaaagttaagctagtatcatagtcatttaaaattgtaatagatcttaaccattttccccctcaccctaactctcttattctgccgccacaatgcaagcatagtttgatgttttcgttattgccttttttgagatgtatgtatctgtatctacctatatctatatgtgtgtatacatatataatatatacacacagatacaagtgtacacacacacaccacacaccacacacaccccactggcagtctttgtggattaggatgggggtgacataattttcttgagtttaacaggagtgctttacccaagtcagtcatggatatgatatcactgctctttatttaaaagtaaactttgggcacaggaaccatatgggaacattcagcttgtttaaaaaaaaaaaatcagaagttcagagcaccttttcaatctggagcccttaaaccataagtccaaatatgaattatttgtgaacagttaatgacccatattagaattttacaatctggtgaacaatctgggtaaaaggctacctttaattctaagcttcatttttttttgggggggggttacattttaatcataaattcttttttgcaaagcccaggttcttgttccacacagtgtaatgtaggtgtattttggacagcacatatggtccattgtgtacaagtcagtaatctggatttcagtacatggatttaaaaggcaacaatccatcactggtttgtgtgtttttggttaagtttctggaagaatacaatgcttttatattggaagtataagttttgagtggcattgttgccttctaacaagctctctgggacttttaaagttttattactattattgctaatgtatgattatggtcagagactttcaacccaccccttcctgcctacccctggcttttcctcacaaagaatgtctagacaaacagcagcttagtctcctgacacctcttgtggggtgcatgttcctgctccaggtatgctgttcatgtggattcattccattcagtggccccttggggtttgcatgccagtgaagcgttaccatagaagagccagccgtttgtgttcgcttggtaggtgtaagtaatagcagcccttagccacggagtctttatgtggtttattcctgcaaggttgttttaaactgaaatagaactgctagtgtgattggttgatcagcaaaacagctgctctcattttgttttggaggaaccctggtggtttgacagccaggagaaaggccatatgtgaaaccagtctcttgtggagattggaaatcctccctgatatttgggcagagcctaaacgtgcatgcttgtcactcaaacaccagaagtttgaatcagaggtctgagtgacctcttttgtggctgttcttgatggtttccaggcctcgttatgcatggtttgcttgatgcccattttttgtgccttgtgctgttggatggtaacgaccactcaccatgtaaacacagtacctcagttttctgtccacagctgcagtcgctctgtccctcgtgcttcactgtgggcagccagggacaagcttctgaaagcagtgtgatacccaagtcataggtgcttctcgtatgtgaacaggtgtcattctacagatctgttatgtgttttcctgttgactcttaagagtccctgcatgtaaatctcaaagctgagcctggctcccagagtccagactgacattacagcgcaagagtttgcaagtgtgtccagcatgcaccaactgtgcagaacttggctcggtaactttgcgtggaaaaataaagtacattttgaagtatcttgagggttgggtcaattgagacatttctagcattacttaatgacttgcattgtggtttttctgcaagcaactttaatgactttttttataccacatggtctcccagtttctagatgaatgcaacatgatgatggtgatgatgacgatgagtttaatcattgttcatttattgcctttagggctgagggaaagggaaggtttgtttttttttctccccattttcccccattctgtctttcttttggtgacttacaccacatgtaatgacgctatgactaattctgctcccaagcccttgtatcttgggcttcattttaggctcatgtgtcagatctgcatgcattgcttgcatttttctggtatctgaatgttggttccttgttccaggaattcaacattaatttccaaaagtatcatgggacttgtgacaatacaagacatgaatctatgtataaaatttatcggcctttctcatttacctgctctagtattattgtattgtgtgtgcgtgcgtgtgtgatgtcaggctgccacgtaaaacttcagagaaaaatcttaaaagcagaccatccttttttgcatgctctattctaagtagaatgttcaatgtaactgactaaaattgcatgttaaagatatttaggtttttttgttttctttatttttatttgttttcagtttcctgtatatttgcttactgtgccgttttagtggttttaggataaaaatgcactggtgaagcaaatgtagtgccaacagaaggtgattttccagttgtaaatgtcatgcagcatttgaagggactgtgttttcttaaaaaaaaatcacagttacttctaaaccagatttcatttcttttattgttttatgtgccaaaccacgaagtgcattgggcttcaatctctgaacactgtagacccattagaagactgttccgattgttacaaattgtagtgcctgaaaacactcttaagctgattgtcttaacaaaatgaaagttctccaaagacaaaacagaacaattattataacaaaataattatggttgaaatgtctgtggttccttggaaatgctgcgctctttgtgtttttccatcattagtgcagttggaatgaatgtgtataggtcagaggtcttcgtgttcacattttaaaattaggtaaatgacctcatctttcaagcttgaattcatttttaattttaattttattttatacaatgtgtagacagttccctgttctctgcatttagaagtatacacaatataaatctgttaattctgtaagtaatttttataattatgatgtaactctatcttatccttaaaacatttaaaataaaccctttatgtgcaactcctgactgtaaagtttgtgctgatgagcaacatgtgatgtgttaaacttgattctgaaaagttttttgggccaagtaaccttttcaccacatgtaaatgtcagatatgcatagaaagaaatagaatttttatttgataacattcaataatacctgaaagaagaggaggcagtcatcaatatcacacatatattaaatattgaagtttgcaatttgacattgagaaagtttaacttacaagatcttaaacttaaaaaaattcttttaaatataattaaataatgggtattttatacttttcacaagtattcttgctttgaatatttcttataatgcttttactcataaataataaacaatgggattctatagtgaaaaatcactatttctcaatgctaggatacaaaaaaatgaaagtaatataggctggtgcaaagtaatagcagttttgccactgcttttatggcaaaaaatgcaattactttttcaccaacctaatattaacacctatgtatgttttatctttcttgattattttaatcagtgaggtaaaaagtggaatttatggcatgctttaataagatttttttttttaatgtttcccagttcattttggcctaaggatctcatgcttaagtctgggatatttacctgcctttgggagaatggttgatacttggtgagggatgaatgcaaacttgggctttgggacgctgggcttctaggtttgtgtcagtgcagtgcctgtgctccaagtccatggaggttactgaggtggactgaaggcagggtctactccggcttaggtggaagaaggctgcagttcaaggaggaaatgagccattgggaagcacaggtgcctctcttgagtctgggttttctgaccttccttgctgaaggtagattattcgttgtctgtgttatctgtcatgggtacagctctgtaaatattgccccaaaagtataacaatgcaagtttagtctgaagtttgaaacttgataactagtatttgtaaactaatgaatcaactctcctatttaaagcagtcatcactctgttggagaatttttgttttttctcttggtacaattaaactctgtgatgacaaaagcatttggtactaataaagcattcataaatgcttaataagtaccttgccaagcactttccacactattttgtttagttcttaatggtcttttgaggaagaggcagagattgagtatctcacgcaggattataggggaatgaagactcggatctctattttgtgcccagactctgagctgctttatgaacacctcaattaaattacttcattggagtgatttgagtaatctatctatagtgtaatattttctatgaataattttctgtaaccttatttcataagttaatatctaaaaagtgtttatttccaaattgccaaataaaaggttttatattagtcattagaatgtaggcatctgtgtctctgtatgctaagaattataacccaaaattatttttgtgcttaaaaaataaatgatgtctccacgatggcacgcatatacttatgtaacaaacctgcacattctgcacatgtatcccggaacttaaaaaaattttttttccataact

SEQ ID NO: 7859 - protein, 262 aa, Homo sapiens; identical to SEQ ID NO: 1098

SEQ ID NO: 7860 - DNA, 4223 bp, Homo sapiens
agcgggggcggggaggcgccgtctggctcaggctggggccggcgggagcgcgaacgagcgacggcggaacccgtgggcctgtggactgcagcctcggcggtcagcagagtgcttgtgatttcacgtatttttgctgaactcgtaaaagagacacttggatggtggattaaccagaacactaacattctgtgaaaagtttcaaattggagaatattgaattttcaccctagtccagcagctccgctgctcacttaaatacagatgaatgaagaccccattcggaaagacacctggccagcggtccagagctgatgcaggccatgctggagtatctgccaacatgatgaagaagaggacatcccacaacgacatctcgaatcagcgatgcacacttggcagacacaatgattggcaaagcagtggaacatatgtttgagacagaggatggttctaaagatgagtggaggggaatggtcttagcacgtgcacctgtcatgaacacatggttttacattacctatgagaaagaccctgtcttgtacatgtaccaactcttagatgattacaaagaaggcgaccttcgcattatgcctgattccaatgattcacctccagcagaaagggaaccaggagaagttgtggacagcctggtaggcaaacaagtggaatatgccaaagaagatggctcgaaaaggactggcatggtcattcatcaagtagaagccaagccctccgtctatttcatcaagtttgatgatgatttccatatttatgtctacgatttggtgaaaacatcctagatgtcatcacaaactctgccaaatttgtggaactatgaaatgtattatttgtagacataaagacttgattgctttccagtttaatgaaagcttaaatgtccctgcgaacccacaatctctgccagcagaactggttttgttctgaatagtacagattgatgtgaacacaaagcattttgtgtaaggagaacccctttcttttaaaagaagtctgtctatttcgaggggagttacaggcaagtttggtaaaagttaagctagtatcatagtcatttaaaattgtaatagatcttaaccattttccccctcaccctaactctcttattctgccgccacaatgcaagcatagtttgatgttttcgttattgccttttttgagatgtatgtatctgtatctacctatatctatatgtgtgtatacatatataatatatacacacagatacaagtgtacacacacacaccacacaccacacacaccccactggcagtctttgtggattaggatgggggtgacataattttcttgagtttaacaggagtgctttacccaagtcagtcatggatatgatatcactgctctttatttaaaagtaaactttgggcacaggaaccatatgggaacattcagcttgtttaaaaaaaaaaaatcagaagttcagagcaccttttcaatctggagcccttaaaccataagtccaaatatgaattatttgtgaacagttaatgacccatattagaattttacaatctggtgaacaatctgggtaaaaggctacctttaattctaagcttcatttttttttgggggggggttacattttaatcataaattcttttttgcaaagcccaggttcttgttccacacagtgtaatgtaggtgtattttggacagcacatatggtccattgtgtacaagtcagtaatctggatttcagtacatggatttaaaaggcaacaatccatcactggtttgtgtgtttttggttaagtttctggaagaatacaatgcttttatattggaagtataagttttgagtggcattgttgccttctaacaagctctctgggacttttaaagttttattactattattgctaatgtatgattatggtcagagactttcaacccaccccttcctgcctacccctggcttttcctcacaaagaatgtctagacaaacagcagcttagtctcctgacacctcttgtggggtgcatgttcctgctccaggtatgctgttcatgtggattcattccattcagtggccccttggggtttgcatgccagtgaagcgttaccatagaagagccagccgtttgtgttcgcttggtaggtgtaagtaatagcagcccttagccacggagtctttatgtggtttattcctgcaaggttgttttaaactgaaatagaactgctagtgtgattggttgatcagcaaaacagctgctctcattttgttttggaggaaccctggtggtttgacagccaggagaaaggccatatgtgaaaccagtctcttgtggagattggaaatcctccctgatatttgggcagagcctaaacgtgcatgcttgtcactcaaacaccagaagtttgaatcagaggtctgagtgacctcttttgtggctgttcttgatggtttccaggcctcgttatgcatggtttgcttgatgcccattttttgtgccttgtgctgttggatggtaacgaccactcaccatgtaaacacagtacctcagttttctgtccacagctgcagtcgctctgtccctcgtgcttcactgtgggcagccagggacaagcttctgaaagcagtgtgatacccaagtcataggtgcttctcgtatgtgaacaggtgtcattctacagatctgttatgtgttttcctgttgactcttaagagtccctgcatgtaaatctcaaagctgagcctggctcccagagtccagactgacattacagcgcaagagtttgcaagtgtgtccagcatgcaccaactgtgcagaacttggctcggtaactttgcgtggaaaaataaagtacattttgaagtatcttgagggttgggtcaattgagacatttctagcattacttaatgacttgcattgtggtttttctgcaagcaactttaatgactttttttataccacatggtctcccagtttctagatgaatgcaacatgatgatggtgatgatgacgatgagtttaatcattgttcatttattgcctttagggctgagggaaagggaaggtttgtttttttttctccccattttcccccattctgtctttcttttggtgacttacaccacatgtaatgacgctatgactaattctgctcccaagcccttgtatcttgggcttcattttaggctcatgtgtcagatctgcatgcattgcttgcatttttctggtatctgaatgttggttccttgttccaggaattcaacattaatttccaaaagtatcatgggacttgtgacaatacaagacatgaatctatgtataaaatttatcggcctttctcatttacctgctctagtattattgtattgtgtgtgcgtgcgtgtgtgatgtcaggctgccacgtaaaacttcagagaaaaatcttaaaagcagaccatccttttttgcatgctctattctaagtagaatgttcaatgtaactgactaaaattgcatgttaaagatatttaggtttttttgttttctttatttttatttgttttcagtttcctgtatatttgcttactgtgccgttttagtggttttaggataaaaatgcactggtgaagcaaatgtagtgccaacagaaggtgattttccagttgtaaatgtcatgcagcatttgaagggactgtgttttcttaaaaaaaaatcacagttacttctaaaccagatttcatttcttttattgttttatgtgccaaaccacgaagtgcattgggcttcaatctctgaacactgtagacccattagaagactgttccgattgttacaaattgtagtgcctgaaaacactcttaagctgattgtcttaacaaaatgaaagttctccaaagacaaaacagaacaattattataacaaaataattatggttgaaatgtctgtggttccttggaaatgctgcgctctttgtgtttttccatcattagtgcagttggaatgaatgtgtataggtcagaggtcttcgtgttcacattttaaaattaggtaaatgacctcatctttcaagcttgaattcatttttaattttaattttattttatacaatgtgtagacagttccctgttctctgcatttagaagtatacacaatataaatctgttaattctgtaagtaatttttataattatgatgtaactctatcttatccttaaaacatttaaaataaaccctttatgtgcaactcctg

SEQ ID NO: 7861 - protein, 131 aa, Homo sapiens; identical to SEQ ID NO: 7851

SEQ ID NO: 7862 - DNA, 5839 bp, Homo sapiens
agcgggggcggggaggcgccgtctggctcaggctggggccggcgggagcgcgaacgagcgacggcggaacccgtgggcctgtggactgcagcctcggcggtcagcagagtgcttgtgatttcacgtatttttgctgaactcgtaaaagagacacttggatggtggattaaccagaacactaacattctgtgaaaagtttcaaattggagaatattgaattttcaccctagtccagcagctccgctgctcacttaaatacagatgaatgaagaccccattcggaaagacacctggccagcggtccagagctgatgcaggccatgctggagtatctgccaacatgatgaagaagaggacatcccacaacgacatctcgaatcagcgatgcacacttggcagacacaatgattggcaaagcagtggaacatatgtttgagacagaggatggttctaaagatgagtggaggggaatggtcttagcacgtgcacctgtcatgaacacatggttttacattacctatgagaaagaccctgtcttgtacatgtaccaactcttagatgattacaaagaaggcgaccttcgcattatgcctgattccaatgattcacctccagcagaaagggaaccaggagaagttgtggacagcctggtaggcaaacaagtggaatatgccaaagaagatggctcgaaaaggactggcatggtcattcatcaagtagaagccaagccctccgtctatttcatcaagtttgatgatgatttccatatttatgtctacgatttggtgaaaacatcctagatgtcatcacaaactctgccaaatttgtggaactatgaaatgtattatttgtagacataaagacttgattgctttccagtttaatgaaagcttaaatgtccctgcgaacccacaatctctgccagcagaactggttttgttctgaatagtacagattgatgtgaacacaaagcattttgtgtaaggagaacccctttcttttaaaagaagtctgtctatttcgaggggagttacaggcaagtttggtaaaagttaagctagtatcatagtcatttaaaattgtaatagatcttaaccattttccccctcaccctaactctcttattctgccgccacaatgcaagcatagtttgatgttttcgttattgccttttttgagatgtatgtatctgtatctacctatatctatatgtgtgtatacatatataatatatacacacagatacaagtgtacacacacacaccacacaccacacacaccccactggcagtctttgtggattaggatgggggtgacataattttcttgagtttaacaggagtgctttacccaagtcagtcatggatatgatatcactgctctttatttaaaagtaaactttgggcacaggaaccatatgggaacattcagcttgtttaaaaaaaaaaaatcagaagttcagagcaccttttcaatctggagcccttaaaccataagtccaaatatgaattatttgtgaacagttaatgacccatattagaattttacaatctggtgaacaatctgggtaaaaggctacctttaattctaagcttcatttttttttgggggggggttacattttaatcataaattcttttttgcaaagcccaggttcttgttccacacagtgtaatgtaggtgtattttggacagcacatatggtccattgtgtacaagtcagtaatctggatttcagtacatggatttaaaaggcaacaatccatcactggtttgtgtgtttttggttaagtttctggaagaatacaatgcttttatattggaagtataagttttgagtggcattgttgccttctaacaagctctctgggacttttaaagttttattactattattgctaatgtatgattatggtcagagactttcaacccaccccttcctgcctacccctggcttttcctcacaaagaatgtctagacaaacagcagcttagtctcctgacacctcttgtggggtgcatgttcctgctccaggtatgctgttcatgtggattcattccattcagtggccccttggggtttgcatgccagtgaagcgttaccatagaagagccagccgtttgtgttcgcttggtaggtgtaagtaatagcagcccttagccacggagtctttatgtggtttattcctgcaaggttgttttaaactgaaatagaactgctagtgtgattggttgatcagcaaaacagctgctctcattttgttttggaggaaccctggtggtttgacagccaggagaaaggccatatgtgaaaccagtctcttgtggagattggaaatcctccctgatatttgggcagagcctaaacgtgcatgcttgtcactcaaacaccagaagtttgaatcagaggtctgagtgacctcttttgtggctgttcttgatggtttccaggcctcgttatgcatggtttgcttgatgcccattttttgtgccttgtgctgttggatggtaacgaccactcaccatgtaaacacagtacctcagttttctgtccacagctgcagtcgctctgtccctcgtgcttcactgtgggcagccagggacaagcttctgaaagcagtgtgatacccaagtcataggtgcttctcgtatgtgaacaggtgtcattctacagatctgttatgtgttttcctgttgactcttaagagtccctgcatgtaaatctcaaagctgagcctggctcccagagtccagactgacattacagcgcaagagtttgcaagtgtgtccagcatgcaccaactgtgcagaacttggctcggtaactttgcgtggaaaaataaagtacattttgaagtatcttgagggttgggtcaattgagacatttctagcattacttaatgacttgcattgtggtttttctgcaagcaactttaatgactttttttataccacatggtctcccagtttctagatgaatgcaacatgatgatggtgatgatgacgatgagtttaatcattgttcatttattgcctttagggctgagggaaagggaaggtttgtttttttttctccccattttcccccattctgtctttcttttggtgacttacaccacatgtaatgacgctatgactaattctgctcccaagcccttgtatcttgggcttcattttaggctcatgtgtcagatctgcatgcattgcttgcatttttctggtatctgaatgttggttccttgttccaggaattcaacattaatttccaaaagtatcatgggacttgtgacaatacaagacatgaatctatgtataaaatttatcggcctttctcatttacctgctctagtattattgtattgtgtgtgcgtgcgtgtgtgatgtcaggctgccacgtaaaacttcagagaaaaatcttaaaagcagaccatccttttttgcatgctctattctaagtagaatgttcaatgtaactgactaaaattgcatgttaaagatatttaggtttttttgttttctttatttttatttgttttcagtttcctgtatatttgcttactgtgccgttttagtggttttaggataaaaatgcactggtgaagcaaatgtagtgccaacagaaggtgattttccagttgtaaatgtcatgcagcatttgaagggactgtgttttcttaaaaaaaaatcacagttacttctaaaccagatttcatttcttttattgttttatgtgccaaaccacgaagtgcattgggcttcaatctctgaacactgtagacccattagaagactgttccgattgttacaaattgtagtgcctgaaaacactcttaagctgattgtcttaacaaaatgaaagttctccaaagacaaaacagaacaattattataacaaaataattatggttgaaatgtctgtggttccttggaaatgctgcgctctttgtgtttttccatcattagtgcagttggaatgaatgtgtataggtcagaggtcttcgtgttcacattttaaaattaggtaaatgacctcatctttcaagcttgaattcatttttaattttaattttattttatacaatgtgtagacagttccctgttctctgcatttagaagtatacacaatataaatctgttaattctgtaagtaatttttataattatgatgtaactctatcttatccttaaaacatttaaaataaaccctttatgtgcaactcctgactgtaaagtttgtgctgatgagcaacatgtgatgtgttaaacttgattctgaaaagttttttgggccaagtaaccttttcaccacatgtaaatgtcagatatgcatagaaagaaatagaatttttatttgataacattcaataatacctgaaagaagaggaggcagtcatcaatatcacacatatattaaatattgaagtttgcaatttgacattgagaaagtttaacttacaagatcttaaacttaaaaaaattcttttaaatataattaaataatgggtattttatacttttcacaagtattcttgctttgaatatttcttataatgcttttactcataaataataaacaatgggattctatagtgaaaaatcactatttctcaatgctaggatacaaaaaaatgaaagtaatataggctggtgcaaagtaatagcagttttgccactgcttttatggcaaaaaatgcaattactttttcaccaacctaatattaacacctatgtatgttttatctttcttgattattttaatcagtgaggtaaaaagtggaatttatggcatgctttaataagatttttttttttaatgtttcccagttcattttggcctaaggatctcatgcttaagtctgggatatttacctgcctttgggagaatggttgatacttggtgagggatgaatgcaaacttgggctttgggacgctgggcttctaggtttgtgtcagtgcagtgcctgtgctccaagtccatggaggttactgaggtggactgaaggcagggtctactccggcttaggtggaagaaggctgcagttcaaggaggaaatgagccattgggaagcacaggtgcctctcttgagtctgggttttctgaccttccttgctgaaggtagattattcgttgtctgtgttatctgtcatgggtacagctctgtaaatattgccccaaaagtataacaatgcaagtttagtctgaagtttgaaacttgataactagtatttgtaaactaatgaatcaactctcctatttaaagcagtcatcactctgttggagaatttttgttttttctcttggtacaattaaactctgtgatgacaaaagcatttggtactaataaagcattcataaatgcttaataagtaccttgccaagcactttccacactattttgtttagttcttaatggtcttttgaggaagaggcagagattgagtatctcacgcaggattataggggaatgaagactcggatctctattttgtgcccagactctgagctgctttatgaacacctcaattaaattacttcattggagtgatttgagtaatctatctatagtgtaatattttctatgaataattttctgtaaccttatttcataagttaatatctaaaaagtgtttatttccaaattgccaaataaaaggttttatattagtcattagaatgtaggcatctgtgtctctgtatgctaagaattataacccaaaattatttttgtgcttaaaaaataaatgatgtctccacgatggcacgcatatacttatgtaacaaacctgcacattctgcacatgtatcccggaacttaaaaaaattttttttccataact

SEQ ID NO: 7863 - protein, 131 aa, Homo sapiens; identical to SEQ ID NO: 7851

SEQ ID NO: 7864 - DNA, 1009 bp, Homo sapiens
gcaggattggaagttgctctgggtgagtgagtggtgagtgaatgtgaaggcctaggacattattgtgcactattgtagactgtgtataaacactgtacagttaggctacactaaatttatagaaaaatttttcttcaataataacttaaccttagcttactctcccctaacccccaattcttcaatccagtcttggctgctacagtcagacagcgaagacacttttttcttgcatctgtattagaaaccgtgtagcttttttactttatgaagttcataatttttaaatttcttgactcttatagtacttagcttaaaacacaaacacattgtacagatgtatagaaatactttcttcctgttattttgtaagccttttctattttaaaaatttattacttttgtttttactttttaaactttttgttaaaaactaagataaggcttgagccactgtgcccagccagtatatactagaattttaaaaaatcttgtgtgtttcttatgattagagcatctgtctattggcatttgacaaagtaactgacgtttagtttcaatctgttaataagtactttctgcctatcaaacctgttttttaccttttcctgtcctttcttgccttcttttagatgcttattttttatgtttgttctgctgttctaacttggaagttacttaaacatgaatcttttactatcaaaatctaatattatttgatactttcctcctctcctggatactctgttgagctcatttttattcacattgtcattattgcattgttttaattctgtctgtattttatcttgacaggtttaatttgtattttcaatagccatttagatttacccacaaaatttatccttttcatttcctaactagatcctccatcttgtaacattttcttctgcccgaagaacaccctttatgcttcccaccttttgtgtaacttctagtagtgaatttcctatgttagtctagacatgcctcaaattgatcttccttt

SEQ ID NO: 7865 - protein, 34 aa, Homo sapiens
AFSILKIYYFCFYFLNFLLKTKIRLEPLCPASIY

SEQ ID NO: 7866 - DNA, 1257 bp, Homo sapiens
ggattacaggcttgagccactgtgcccagccagtatatactagaattttaaaaaatcttgtgtgtttcttatgattagagcatctgtctattggcatttgacaaagtaactgacgtttagtttcaatctgttaataagtactttctgcctatcaaacctgttttttaccttttcctgtcctttcttgccttcttttagatgcttattttttatgtttgttctgctgttctaacttggaagttacttaaacatgaatcttttactatcaaaatctaatattatttgatactttcctcctctcctggatactctgttgagctcatttttattcacattgtcattattgcattgttttaattctgtctgtattttatcttgacaggtttaatttgtattttcaatagccatttagatttacccacaaaatttatccttttcatttcctaactagatcctccatcttgtaacattttcttctgcccgaagaacaccctttatgcttcccaccttttgtgtaacttctagtagtgaatttcctatgttagtctagacatgcctcaaattgatcttcctttaaaaaaaaaaaaaaaaaaaaaagatggagtctcactctgttgcccaggtgcactccagcctgggcaacagatcgagactccgtctcaaaaaaaaaaaaaaagaaattgagctacatgtcttagagcctggcagcttcccttttccctccttcttaagttcagcaattcaggattccaactcgaagggaggtgagtttaccagtccccctgtaaccccctttggtattttccgaattttagttcttttctcctaatcttaccaagctgtcaagttctcagctggtccttaacacttggcaattgctctcagggaccaaagtggttataaatgtagggtgtccctctttagatcctgtctctctgataccttactatctttcaagttatttgatgctttcatgcatatatttagtgtgtgtgtgtgtgtgtgtgtgtgtgcaactttttttttttttaaagacatttattcagcatcatgatcagactattacatttagcaatcaacagcatgggtgcaaaaaaaatctacattaaaaccttttgttggaatgctttaaacaaaagaacagaaactaaaataacctgttatacaattagtcacaaatacagtcctcgagttttttgcccatatacatgagtatttgtctaaaacatgtcttctttgtagcatctaggccctgcc

SEQ ID NO: 7867 - protein, 76 aa, Homo sapiens
MESHSVAQVHSSLGNRSRLRLKKKKKEIELHVLEPGSFPFPSFLSSAIQDSNSKGGEFTSPPVTPFGIFRILVLFS

SEQ ID NO: 7868 - DNA, 3887 bp, Homo sapiens
acccagtggaaaggaaccgttctggaccagcgacatctcgaatcagcgatgcacacttggcagacacaatgattggcaaagcagtggaacatatgtttgagacagaggatggttctaaagatgagtggaggggaatggtcttagcacgtgcacctgtcatgaacacatggttttacattacctatgagaaagaccctgtcttgtacatgtaccaactcttagatgattacaaagaaggcgaccttcgcattatgcctgattccaatgattcacctccagcagaaagggaaccaggagaagttgtggacagcctggtaggcaaacaagtggaatatgccaaagaagatggctcgaaaaggactggcatggtcattcatcaagtagaagccaagccctccgtctatttcatcaagtttgatgatgatttccatatttatgtctacgatttggtgaaaacatcctagatgtcatcacaaactctgccaaatttgtggaactatgaaatgtattatttgtagacataaagacttgattgctttccagtttaatgaaagcttaaatgtccctgcgaacccacaatctctgccagcagaactggttttgttctgaatagtacagattgatgtgaacacaaagcattttgtgtaaggagaacccctttcttttaaaagaagtctgtctatttcgaggggagttacaggcaagtttggtaaaagttaagctagtatcatagtcatttaaaattgtaatagatcttaaccattttccccctcaccctaactctcttattctgccgccacaatgcaagcatagtttgatgttttcgttattgccttttttgagatgtatgtatctgtatctacctatatctatatgtgtgtatacatatataatatatacacacagatacaagtgtacacacacacaccacacaccacacacaccccactggcagtctttgtggattaggatgggggtgacataattttcttgagtttaacaggagtgctttacccaagtcagtcatggatatgatatcactgctctttatttaaaagtaaactttgggcacaggaaccatatgggaacattcagcttgtttaaaaaaaaaaaatcagaagttcagagcaccttttcaatctggagcccttaaaccataagtccaaatatgaattatttgtgaacagttaatgacccatattagaattttacaatctggtgaacaatctgggtaaaaggctacctttaattctaagcttcatttttttttgggggggggttacattttaatcataaattcttttttgcaaagcccaggttcttgttccacacagtgtaatgtaggtgtattttggacagcacatatggtccattgtgtacaagtcagtaatctggatttcagtacatggatttaaaaggcaacaatccatcactggtttgtgtgtttttggttaagtttctggaagaatacaatgcttttatattggaagtataagttttgagtggcattgttgccttctaacaagctctctgggacttttaaagttttattactattattgctaatgtatgattatggtcagagactttcaacccaccccttcctgcctacccctggcttttcctcacaaagaatgtctagacaaacagcagcttagtctcctgacacctcttgtggggtgcatgttcctgctccaggtatgctgttcatgtggattcattccattcagtggccccttggggtttgcatgccagtgaagcgttaccatagaagagccagccgtttgtgttcgcttggtaggtgtaagtaatagcagcccttagccacggagtctttatgtggtttattcctgcaaggttgttttaaactgaaatagaactgctagtgtgattggttgatcagcaaaacagctgctctcattttgttttggaggaaccctggtggtttgacagccaggagaaaggccatatgtgaaaccagtctcttgtggagattggaaatcctccctgatatttgggcagagcctaaacgtgcatgcttgtcactcaaacaccagaagtttgaatcagaggtctgagtgacctcttttgtggctgttcttgatggtttccaggcctcgttatgcatggtttgcttgatgcccattttttgtgccttgtgctgttggatggtaacgaccactcaccatgtaaacacagtacctcagttttctgtccacagctgcagtcgctctgtccctcgtgcttcactgtgggcagccagggacaagcttctgaaagcagtgtgatacccaagtcataggtgcttctcgtatgtgaacaggtgtcattctacagatctgttatgtgttttcctgttgactcttaagagtccctgcatgtaaatctcaaagctgagcctggctcccagagtccagactgacattacagcgcaagagtttgcaagtgtgtccagcatgcaccaactgtgcagaacttggctcggtaactttgcgtggaaaaataaagtacattttgaagtatcttgagggttgggtcaattgagacatttctagcattacttaatgacttgcattgtggtttttctgcaagcaactttaatgactttttttataccacatggtctcccagtttctagatgaatgcaacatgatgatggtgatgatgacgatgagtttaatcattgttcatttattgcctttagggctgagggaaagggaaggtttgtttttttttctccccattttcccccattctgtctttcttttggtgacttacaccacatgtaatgacgctatgactaattctgctcccaagcccttgtatcttgggcttcattttaggctcatgtgtcagatctgcatgcattgcttgcatttttctggtatctgaatgttggttccttgttccaggaattcaacattaatttccaaaagtatcatgggacttgtgacaatacaagacatgaatctatgtataaaatttatcggcctttctcatttacctgctctagtattattgtattgtgtgtgcgtgcgtgtgtgatgtcaggctgccacgtaaaacttcagagaaaaatcttaaaagcagaccatccttttttgcatgctctattctaagtagaatgttcaatgtaactgactaaaattgcatgttaaagatatttaggtttttttgttttctttatttttatttgttttcagtttcctgtatatttgcttactgtgccgttttagtggttttaggataaaaatgcactggtgaagcaaatgtagtgccaacagaaggtgattttccagttgtaaatgtcatgcagcatttgaagggactgtgttttcttaaaaaaaaatcacagttacttctaaaccagatttcatttcttttattgttttatgtgccaaaccacgaagtgcattgggcttcaatctctgaacactgtagacccattagaagactgttccgattgttacaaattgtagtgcctgaaaacactcttaagctgattgtcttaacaaaatgaaagttctccaaagacaaaacagaacaattattataacaaaataattatggttgaaatgtctgtggttccttggaaatgctgcgctctttgtgtttttccatcattagtgcagttggaatgaatgtgtataggtcagaggtcttcgtgttcacattttaaaattaggtaaatgacctcatctttcaagcttgaattcatttttaattttaattttattttatacaatgtgtagacagttccctgttctctgcatttagaagtatacacaatataaatctgttaattctgtaagtaatttttataattatgatgtaactctatcttatccttaaaacatttaaaataaaccctttatgtgcaactcctg

SEQ ID NO: 7869 - protein, 131 aa, Homo sapiens; identical to SEQ ID NO: 7851

SEQ ID NO: 7870 - DNA, 5503 bp, Homo sapiens
acccagtggaaaggaaccgttctggaccagcgacatctcgaatcagcgatgcacacttggcagacacaatgattggcaaagcagtggaacatatgtttgagacagaggatggttctaaagatgagtggaggggaatggtcttagcacgtgcacctgtcatgaacacatggttttacattacctatgagaaagaccctgtcttgtacatgtaccaactcttagatgattacaaagaaggcgaccttcgcattatgcctgattccaatgattcacctccagcagaaagggaaccaggagaagttgtggacagcctggtaggcaaacaagtggaatatgccaaagaagatggctcgaaaaggactggcatggtcattcatcaagtagaagccaagccctccgtctatttcatcaagtttgatgatgatttccatatttatgtctacgatttggtgaaaacatcctagatgtcatcacaaactctgccaaatttgtggaactatgaaatgtattatttgtagacataaagacttgattgctttccagtttaatgaaagcttaaatgtccctgcgaacccacaatctctgccagcagaactggttttgttctgaatagtacagattgatgtgaacacaaagcattttgtgtaaggagaacccctttcttttaaaagaagtctgtctatttcgaggggagttacaggcaagtttggtaaaagttaagctagtatcatagtcatttaaaattgtaatagatcttaaccattttccccctcaccctaactctcttattctgccgccacaatgcaagcatagtttgatgttttcgttattgccttttttgagatgtatgtatctgtatctacctatatctatatgtgtgtatacatatataatatatacacacagatacaagtgtacacacacacaccacacaccacacacaccccactggcagtctttgtggattaggatgggggtgacataattttcttgagtttaacaggagtgctttacccaagtcagtcatggatatgatatcactgctctttatttaaaagtaaactttgggcacaggaaccatatgggaacattcagcttgtttaaaaaaaaaaaatcagaagttcagagcaccttttcaatctggagcccttaaaccataagtccaaatatgaattatttgtgaacagttaatgacccatattagaattttacaatctggtgaacaatctgggtaaaaggctacctttaattctaagcttcatttttttttgggggggggttacattttaatcataaattcttttttgcaaagcccaggttcttgttccacacagtgtaatgtaggtgtattttggacagcacatatggtccattgtgtacaagtcagtaatctggatttcagtacatggatttaaaaggcaacaatccatcactggtttgtgtgtttttggttaagtttctggaagaatacaatgcttttatattggaagtataagttttgagtggcattgttgccttctaacaagctctctgggacttttaaagttttattactattattgctaatgtatgattatggtcagagactttcaacccaccccttcctgcctacccctggcttttcctcacaaagaatgtctagacaaacagcagcttagtctcctgacacctcttgtggggtgcatgttcctgctccaggtatgctgttcatgtggattcattccattcagtggccccttggggtttgcatgccagtgaagcgttaccatagaagagccagccgtttgtgttcgcttggtaggtgtaagtaatagcagcccttagccacggagtctttatgtggtttattcctgcaaggttgttttaaactgaaatagaactgctagtgtgattggttgatcagcaaaacagctgctctcattttgttttggaggaaccctggtggtttgacagccaggagaaaggccatatgtgaaaccagtctcttgtggagattggaaatcctccctgatatttgggcagagcctaaacgtgcatgcttgtcactcaaacaccagaagtttgaatcagaggtctgagtgacctcttttgtggctgttcttgatggtttccaggcctcgttatgcatggtttgcttgatgcccattttttgtgccttgtgctgttggatggtaacgaccactcaccatgtaaacacagtacctcagttttctgtccacagctgcagtcgctctgtccctcgtgcttcactgtgggcagccagggacaagcttctgaaagcagtgtgatacccaagtcataggtgcttctcgtatgtgaacaggtgtcattctacagatctgttatgtgttttcctgttgactcttaagagtccctgcatgtaaatctcaaagctgagcctggctcccagagtccagactgacattacagcgcaagagtttgcaagtgtgtccagcatgcaccaactgtgcagaacttggctcggtaactttgcgtggaaaaataaagtacattttgaagtatcttgagggttgggtcaattgagacatttctagcattacttaatgacttgcattgtggtttttctgcaagcaactttaatgactttttttataccacatggtctcccagtttctagatgaatgcaacatgatgatggtgatgatgacgatgagtttaatcattgttcatttattgcctttagggctgagggaaagggaaggtttgtttttttttctccccattttcccccattctgtctttcttttggtgacttacaccacatgtaatgacgctatgactaattctgctcccaagcccttgtatcttgggcttcattttaggctcatgtgtcagatctgcatgcattgcttgcatttttctggtatctgaatgttggttccttgttccaggaattcaacattaatttccaaaagtatcatgggacttgtgacaatacaagacatgaatctatgtataaaatttatcggcctttctcatttacctgctctagtattattgtattgtgtgtgcgtgcgtgtgtgatgtcaggctgccacgtaaaacttcagagaaaaatcttaaaagcagaccatccttttttgcatgctctattctaagtagaatgttcaatgtaactgactaaaattgcatgttaaagatatttaggtttttttgttttctttatttttatttgttttcagtttcctgtatatttgcttactgtgccgttttagtggttttaggataaaaatgcactggtgaagcaaatgtagtgccaacagaaggtgattttccagttgtaaatgtcatgcagcatttgaagggactgtgttttcttaaaaaaaaatcacagttacttctaaaccagatttcatttcttttattgttttatgtgccaaaccacgaagtgcattgggcttcaatctctgaacactgtagacccattagaagactgttccgattgttacaaattgtagtgcctgaaaacactcttaagctgattgtcttaacaaaatgaaagttctccaaagacaaaacagaacaattattataacaaaataattatggttgaaatgtctgtggttccttggaaatgctgcgctctttgtgtttttccatcattagtgcagttggaatgaatgtgtataggtcagaggtcttcgtgttcacattttaaaattaggtaaatgacctcatctttcaagcttgaattcatttttaattttaattttattttatacaatgtgtagacagttccctgttctctgcatttagaagtatacacaatataaatctgttaattctgtaagtaatttttataattatgatgtaactctatcttatccttaaaacatttaaaataaaccctttatgtgcaactcctgactgtaaagtttgtgctgatgagcaacatgtgatgtgttaaacttgattctgaaaagttttttgggccaagtaaccttttcaccacatgtaaatgtcagatatgcatagaaagaaatagaatttttatttgataacattcaataatacctgaaagaagaggaggcagtcatcaatatcacacatatattaaatattgaagtttgcaatttgacattgagaaagtttaacttacaagatcttaaacttaaaaaaattcttttaaatataattaaataatgggtattttatacttttcacaagtattcttgctttgaatatttcttataatgcttttactcataaataataaacaatgggattctatagtgaaaaatcactatttctcaatgctaggatacaaaaaaatgaaagtaatataggctggtgcaaagtaatagcagttttgccactgcttttatggcaaaaaatgcaattactttttcaccaacctaatattaacacctatgtatgttttatctttcttgattattttaatcagtgaggtaaaaagtggaatttatggcatgctttaataagatttttttttttaatgtttcccagttcattttggcctaaggatctcatgcttaagtctgggatatttacctgcctttgggagaatggttgatacttggtgagggatgaatgcaaacttgggctttgggacgctgggcttctaggtttgtgtcagtgcagtgcctgtgctccaagtccatggaggttactgaggtggactgaaggcagggtctactccggcttaggtggaagaaggctgcagttcaaggaggaaatgagccattgggaagcacaggtgcctctcttgagtctgggttttctgaccttccttgctgaaggtagattattcgttgtctgtgttatctgtcatgggtacagctctgtaaatattgccccaaaagtataacaatgcaagtttagtctgaagtttgaaacttgataactagtatttgtaaactaatgaatcaactctcctatttaaagcagtcatcactctgttggagaatttttgttttttctcttggtacaattaaactctgtgatgacaaaagcatttggtactaataaagcattcataaatgcttaataagtaccttgccaagcactttccacactattttgtttagttcttaatggtcttttgaggaagaggcagagattgagtatctcacgcaggattataggggaatgaagactcggatctctattttgtgcccagactctgagctgctttatgaacacctcaattaaattacttcattggagtgatttgagtaatctatctatagtgtaatattttctatgaataattttctgtaaccttatttcataagttaatatctaaaaagtgtttatttccaaattgccaaataaaaggttttatattagtcattagaatgtaggcatctgtgtctctgtatgctaagaattataacccaaaattatttttgtgcttaaaaaataaatgatgtctccacgatggcacgcatatacttatgtaacaaacctgcacattctgcacatgtatcccggaacttaaaaaaattttttttccataact

SEQ ID NO: 7871 - protein, 131 aa, Homo sapiens; identical to SEQ ID NO: 7851

SEQ ID NO: 7872 - DNA, 290 bp, Homo sapiens
tcattcctcttacctctgagttttaacgtaagtcaggggcctcctcatgcaagatttatactgctcacagttcctctcaattttttcctccgatttgtctatccattttccccagaggacagtgaatcggggctcttgacagcctgcttcacctaagagcgccaatcaatcctcccgcagggtttccactgagctttggctgctaagtacatttacgcaaccgagccgacgggctgtgcctgcaggcaaaagagcgagactccatctcaaccaaccaaccaaaccaaacc

SEQ ID NO: 7873 - protein, 30 aa, Homo sapiens
MQDLYCSQFLSIFSSDLSIHFPQRTVNRGS

SEQ ID NO: 7874 - DNA, 1460 bp, Homo sapiens
aggagtgtgggcggggcgcagttgggggagggtgcagagacctgagggcttgaggttgcctggctggccccgctcccagaggcgggtgccgcgctgtcgcccaggtatctggggtctctggtgtctgagtgtctcattgtcggcgcgaacacaattgctccagccacaggcgaggcctggccaaggtgtgggcgcatctggggcaggtcttgagaggtccagcgcccggtggtgcggacagaggcggggcaccgcggcgctcgccgccgcctccccgcaggtgatcatcctcctgcaggtgtcctcgggtctcaggtggctgcgtgtctgcgccatggttgacattctgggcgagcggcacctggtgacctgtaagggcgcgacggtggaggccgaggcggcgctgcagaacaaggtggtggcactgtacttcgcggcggcccggtgcgcgccgagccgcgacttcacgccgctgctctgcgacttctatacggcgctggtggccgaggcgcggcggcccgcgcccttcgaagtggtcttcgtgtcagccgacggcagctcccaggagatgctggacttcatgcgcgagctgcatggcgcctggctggcgctgcccttccacgacccctaccggcaacggagtctcgctctgttgcccaggctggagtgcagtggcgtgatcttagctcactgcaacctttgcctcctgggttcaagtgattctctagccttagcctcctgagcatctgggactacagccattgctgtgaattacgtgagggaaagatattgaagaggagttggacactccgagagtgcagctgttctccccccgcaccatccgtgtcctgcattctgcgagtctgtgctcattaacaatgtgctgtgaccatgtgactcagcaatcctgctgctgggtatatacccgaaagaaaggaaaaggaagccagtatattgaagaggtatctgcacccccatgtttattgcagcactgttcacaacagccaagatttggaagcaacctaagtgtccatcaacagatgaatggataaagaaaacgtggtacatatacacaatggagtactcttcagccattaaaaaaatgagattctgtcatttgcaataatatagatggaaaaggaggcccttatgtgaagtgaaataagccaggcacagaaagacaaacatcacatgttctcacttatttgtgggatctaatgatcaaaacaattgaactcttggacatagagagtagaaggttggttaccagaagctggaaaggaaagtggggttgggaggaaggtgggaatggttaataggtacaaaaaaatacaaagaataaataagacctaatatttgatagcacaacagtgtgactactgtcaataatcatttaattgtacatttaaaaataactataattgcattgtttgtaacacaaaagataaatgcttgagggg

SEQ ID NO: 7875 - protein, 135 aa, Homo sapiens
MVDILGERHLVTCKGATVEAEAALQNKVVALYFAAARCAPSRDFTPLLCDFYTALVAEARRPAPFEVVFVSADGSSQEMLDFMRELHGAWLALPFHDPYRQRSLALLPRLECSGVILAHCNLCLLGSSDSLALAS

SEQ ID NO: 7876 - DNA, 827 bp, Homo sapiens
gtgccgcgctgtcgcccaggtatctggggtctctggtgtctgagtgtctcattgtcggcgcgaacacaattgctccagccacaggcgaggcctggccaaggtgtgggcgcatctggggcaggtcttgagaggtccagcgcccggtggtgcggacagaggcggggcaccgcggcgctcgccgccgcctccccgcaggtgatcatcctcctgcaggtgtcctcgggtctcaggtggctgcgtgtctgcgccatggttgacattctgggcgagcggcacctggtgacctgtaagggcgcgacggtggaggccgaggcggcgctgcagaacaaggtggtggcactgtacttcgcggcggcccggtgcgcgccgagccgcgacttcacgccgctgctctgcgacttctatacggcgctggtggccgaggcgcggcggcccgcgcccttcgaagtggtcttcgtgtcagccgacggcagctcccaggagatgctggacttcatgcgcgagctgcatggcgcctggctggcgctgcccttccacgacccctaccggcacagccggagccaactaatacatgcggccaccttctctccatgcctgcactttctgttccaagccatctggtggaagcaatccaattgcctgcagaatcatccgaaagcatcactgggaagaagctggtggaactaagaagcaattctttagcctgacagccagtctgtttttagtatttctaaacatgaaatcatctcagaagaagccaagggctgtcgaggtgatttgcctgaggtcctacaactcatcactgactgtgtttggaggaaggaagt

SEQ ID NO: 7877 - protein, 145 aa, Homo sapiens
MVDILGERHLVTCKGATVEAEAALQNKVVALYFAAARCAPSRDFTPLLCDFYTALVAEARRPAPFEVVFVSADGSSQEMLDFMRELHGAWLALPFHDPYRHSRSQLIHAATFSPCLHFLFQAIWWKQSNCLQNHPKASLGRSWWN

SEQ ID NO: 7878 - DNA, 535 bp, Homo sapiens
tccccgcaggtgatcatcctcctgcaggtgtcctcgggtctcaggtggctgcgtgtctgcgccatggttgacattctgggcgagcggcacctggtgacctgtaagggcgcgacggtggaggccgaggcggcgctgcagaacaaggtggtggcactgtacttcgcggcggcccggtgcgcgccgagccgcgacttcacgccgctgctctgcgacttctatacggcgctggtggccgaggcgcggcggcccgcgcccttcgaagtggtcttcgtgtcagccgacggcagctcccaggagatgctggacttcatgcgcgagctgcatggcgcctggctggcgctgcccttccacgacccctaccggcaccattgctgtgaattacgtgagggaaagatattgaagaggagttggacactccgagagtgcagctgttctccccccgcaccatccgtgtcctgcattctgcgagtctgtgctcattaacaatgtgctgtgaccatgtgactcagcaatcctgctgctgggtatatacccg

SEQ ID NO: 7879 - protein, 139 aa, Homo sapiens
MVDILGERHLVTCKGATVEAEAALQNKVVALYFAAARCAPSRDFTPLLCDFYTALVAEARRPAPFEVVFVSADGSSQEMLDFMRELHGAWLALPFHDPYRHHCCELREGKILKRSWTLRECSCSPPAPSVSCILRVCAH

SEQ ID NO: 7880 - DNA, 1078 bp, Homo sapiens
cagcgtagtaggggcgcactcgctggtggtgggcgcgccgtgctgagctctggctgtcagtgtgttcgcccgcgtcccctccgcgctctccgcttgtggataactagctgctggttgatcgcactatgactctggaagaagtccgcggccaggacacagttccggaaagcacagccaggatgcagggtgccgggaaagcgctgcatgagttgctgctgtcggcgcagcgtcagggctgcctcactgccggcgtctacgagtcagccaaagtcttgaacgtggaccccgacaatgtgaccttctgtgtgctggctgcgggtgaggaggacgagggcgacatcgcgctgcagatccattttacgctgatccaggctttctgctgcgagaacgacatcgacatagtgcgcgtgggcgatgtgcagcggctggcggctatcgtgggcgccggcgaggaggcgggtgcgccgggcgacctgcactgcatcctcatttcgaaccccaacgaggacgcctggaaggatcccgccttggagaagctcagcctgttttgcgaggagagccgcagcgttaacgactgggtgcccagcatcaccctccccgagtgacagcccggcggggaccttggtctgatcgacgtggtgacgccccggggcgcctagagcgcggctggctctgtggaggggccctccgagggtgcccgagtgcggcgtggagactggcaggcggggggggcgcctggagagcgaggaggcgcggcctcccgaggaggggcccggtggcggcagggccaggctggtccgagctgaggactctgcaagtgtctggagcggctgctcgcccaggaaggcctaggctaggacgttggcctcagggccaggaaggacagactggccgggcaggcgtgactcagcagcctgcgctcggcaggaaggagcggcgccctggacttggtacagttgcaggagcgtgaaggacttagccgactgcgctgctttttcaaaacggatccgggcaatgcttcgttttctaaaggatgctgctgttgaagctttgaattttacaataaactttttgaaac

SEQ ID NO: 7881 - protein, 159 aa, Homo sapiens; identical to SEQ ID NO: 1102

SEQ ID NO: 7882 - DNA, 1214 bp, Homo sapiens
cagcgtagtaggggcgcactcgctggtggtgggcgcgccgtgctgagctctggctgtcagtgtgttcgcccgcgtcccctccgcgctctccgcttgtggataactagctgctggttgatcgcactatgactctggaagaagtccgcggccaggacacagttccggaaagcacagccaggatgcagggtgccgggaaagcgctgcatgagttgctgctgtcggcgcagcgtcagggctgcctcactgccggcgtctacgagtcagccaaagtcttgaacgtgtaagtgtagacgcggcccaggctgggagacaggggcgggggtgaatggcgaggagactggcggatgggaggggtggcggcgggagaactcggctagccggttctgacctaggtccccgccttgccctcgcagggaccccgacaatgtgaccttctgtgtgctggctgcgggtgaggaggacgagggcgacatcgcgctgcagatccattttacgctgatccaggctttctgctgcgagaacgacatcgacatagtgcgcgtgggcgatgtgcagcggctggcggctatcgtgggcgccggcgaggaggcgggtgcgccgggcgacctgcactgcatcctcatttcgaaccccaacgaggacgcctggaaggatcccgccttggagaagctcagcctgttttgcgaggagagccgcagcgttaacgactgggtgcccagcatcaccctccccgagtgacagcccggcggggaccttggtctgatcgacgtggtgacgccccggggcgcctagagcgcggctggctctgtggaggggccctccgagggtgcccgagtgcggcgtggagactggcaggcggggggggcgcctggagagcgaggaggcgcggcctcccgaggaggggcccggtggcggcagggccaggctggtccgagctgaggactctgcaagtgtctggagcggctgctcgcccaggaaggcctaggctaggacgttggcctcagggccaggaaggacagactggccgggcaggcgtgactcagcagcctgcgctcggcaggaaggagcggcgccctggacttggtacagttgcaggagcgtgaaggacttagccgactgcgctgctttttcaaaacggatccgggcaatgcttcgttttctaaaggatgctgctgttgaagctttgaattttacaataaactttttgaaacaaa

SEQ ID NO: 7883 - protein, 71 aa, Homo sapiens
MCSGWRLSWAPARRRVRRATCTASSFRTPTRTPGRIPPWRSSACFARRAAALTTGCPASPSPSDSPAGTLV

SEQ ID NO: 7884 - DNA, 1219 bp, Homo sapiens
cagcgtagtaggggcgcactcgctggtggtgggcgcgccgtgctgagctctggctgtcagtgtgttcgcccgcgtcccctccgcgctctccgcttgtggataactagctgctggttgatcgcactatgactctggaagaagtccgcggccaggacacagttccggaaagcacagccaggatgcagggtgccgggaaagcgctgcatgagttgctgctgtcggcgcagcgtcagggctgcctcactgccggcgtctacgagtcagccaaagtcttgaacgtggaccccgacaatgtgaccttctgtgtgctggctgcgggtgaggaggacgagggcgacatcgcgctgcagatccattttacgctgatccaggctttctgctgcgagaacgacatcgacatagtgcgcgtgggcgatgtgcagcggctggcggctatcgtgggcgccggcgaggaggcgggtgcgccgggcgacctgcactgcatcctcatttcgaaccccaacgaggacgcctggaaggatcccgccttggagaagctcagcctgttttgcgaggagagccgcagcgttaacgactgggtgcccagcatcaccctccccgagtgacagcccggcggggaccttggtctgatcgacgtggtgacgccccggggcgcctagagcgcggctggctctgtggaggggccctccgagggtgcccgagtgcggcgtggagactggcaggcggggggggcgcctggagagcgaggaggcgcggcctcccgaggaggggcccggtggcggcagggccaggctggtccgagctgaggactctgcaagtgtctggagcggctgctcgcccaggaaggcctaggctaggacgttggcctcagggccaggaaggacagactggccgggcaggcgtgactcagcagcctgcgctcggcaggaaggagcggcgccctggacttggtacagttgcaggagcgtgaaggacttagccgactgcgctgctttttcaaaacggatccgggcaatgcttcgttttctaaaggatgctgctgttgaagctttgaattttacaataaactttttgaaacaaacttatgctctttattgagggtaggggatctttgtgtcgggggaggtggcgtgcagggtttcagaggattgctggaactccgtggaactgatggcacctgttccgtcttcctgtcgggcaagaatgacaggctcctccc

SEQ ID NO: 7885 - protein, 159 aa, Homo sapiens; identical to SEQ ID NO: 1102

SEQ ID NO: 7886 - DNA, 975 bp, Homo sapiens
gcactcgctggtggtgggcgcgccgtgctgagctctggctgtcagtgtgttcgcccgcgtcccctccgcgctctccgcttgtggataactagctgctggttgatcgcactatgactctggaagaagtccgcggccaggacacagttccggaaagcacagccaggatgcagggtgccgggaaagcgctgcatgagttgctgctgtcggcgcagcgtcagggctgcctcactgccggcgtctacgagtcagccaaagtcttgaacgtgctttctgctgcgagaacgacatcgacatagtgcgcgtgggcgatgtgcagcggctggcggctatcgtgggcgccggcgaggaggcgggtgcgccgggcgacctgcactgcatcctcatttcgaaccccaacgaggacgcctggaaggatcccgccttggagaagctcagcctgttttgcgaggagagccgcagcgttaacgactgggtgcccagcatcaccctccccgagtgacagcccggcggggaccttggtctgatcgacgtggtgacgccccggggcgcctagagcgcggctggctctgtggaggggccctccgagggtgcccgagtgcggcgtggagactggcaggcggggggggcgcctggagagcgaggaggcgcggcctcccgaggaggggcccggtggcggcagggccaggctggtccgagctgaggactctgcaagtgtctggagcggctgctcgcccaggaaggcctaggctaggacgttggcctcagggccaggaaggacagactggccgggcaggcgtgactcagcagcctgcgctcggcaggaaggagcggcgccctggacttggtacagttgcaggagcgtgaaggacttagccgactgcgctgctttttcaaaacggatccgggcaatgcttcgttttctaaaggatgctgctgttgaagctttgaattttacaataaactttttgaaacaaa

SEQ ID NO: 7887 - protein, 71 aa, Homo sapiens; identical to SEQ ID NO: 7883

SEQ ID NO: 7888 - DNA, 1294 bp, Homo sapiens
gctgagctctggctgtcagtgtgttcgcccgcgtcccctccgcgctctccgcttgtggataactagctgctggttgatcgcactatgactctggaagaagtccgcggccaggacacagttccggaaagcacagccaggtgggtttcagggcgctgagaaagccgctggtcggtcggcgaccgtcagggttttccagggtgggaatccgcggggtaggaggggagcgcgggggtccgggcgccagatcccggttggagagccggggtgcaggcgctgagccgggattggagtgtggttggagttggggagccaagggtgtgtgccggtggccggggctggggtctccgccgcgccctccggccggctcccgctcactgcgctggctcctccgcaggatgcagggtgccgggaaagcgctgcatgagttgctgctgtcggcgcagcgtcagggctgcctcactgccggcgtctacgagtcagccaaagtcttgaacgtggaccccgacaatgtgaccttctgtgtgctggctgcgggtgaggaggacgagggcgacatcgcgctgcagatccattttacgctgatccaggctttctgctgcgagaacgacatcgacatagtgcgcgtgggcgatgtgcagcggctggcggctatcgtgggcgccggcgaggaggcgggtgcgccgggcgacctgcactgcatcctcatttcgaaccccaacgaggacgcctggaaggatcccgccttggagaagctcagcctgttttgcgaggagagccgcagcgttaacgactgggtgcccagcatcaccctccccgagtgacagcccggcggggaccttggtctgatcgacgtggtgacgccccggggcgcctagagcgcggctggctctgtggaggggccctccgagggtgcccgagtgcggcgtggagactggcaggcggggggggcgcctggagagcgaggaggcgcggcctcccgaggaggggcccggtggcggcagggccaggctggtccgagctgaggactctgcaagtgtctggagcggctgctcgcccaggaaggcctaggctaggacgttggcctcagggccaggaaggacagactggccgggcaggcgtgactcagcagcctgcgctcggcaggaaggagcggcgccctggacttggtacagttgcaggagcgtgaaggacttagccgactgcgctgctttttcaaaacggatccgggcaatgcttcgttttctaaaggatgctgctgttgaagctttgaattttacaataaactttttgaaac

SEQ ID NO: 7889 - protein, 141 aa, Homo sapiens
MQGAGKALHELLLSAQRQGCLTAGVYESAKVLNVDPDNVTFCVLAAGEEDEGDIALQIHFTLIQAFCCENDIDIVRVGDVQRLAAIVGAGEEAGAPGDLHCILISNPNEDAWKDPALEKLSLFCEESRSVNDWVPSITLPE

SEQ ID NO: 7890 - DNA, 1435 bp, Homo sapiens
gctgagctctggctgtcagtgtgttcgcccgcgtcccctccgcgctctccgcttgtggataactagctgctggttgatcgcactatgactctggaagaagtccgcggccaggacacagttccggaaagcacagccaggtgggtttcagggcgctgagaaagccgctggtcggtcggcgaccgtcagggttttccagggtgggaatccgcggggtaggaggggagcgcgggggtccgggcgccagatcccggttggagagccggggtgcaggcgctgagccgggattggagtgtggttggagttggggagccaagggtgtgtgccggtggccggggctggggtctccgccgcgccctccggccggctcccgctcactgcgctggctcctccgcaggatgcagggtgccgggaaagcgctgcatgagttgctgctgtcggcgcagcgtcagggctgcctcactgccggcgtctacgagtcagccaaagtcttgaacgtggaccccgacaatgtgaccttctgtgtgctggctgcgggtgaggaggacgagggcgacatcgcgctgcagatccattttacgctgatccaggctttctgctgcgagaacgacatcgacatagtgcgcgtgggcgatgtgcagcggctggcggctatcgtgggcgccggcgaggaggcgggtgcgccgggcgacctgcactgcatcctcatttcgaaccccaacgaggacgcctggaaggatcccgccttggagaagctcagcctgttttgcgaggagagccgcagcgttaacgactgggtgcccagcatcaccctccccgagtgacagcccggcggggaccttggtctgatcgacgtggtgacgccccggggcgcctagagcgcggctggctctgtggaggggccctccgagggtgcccgagtgcggcgtggagactggcaggcggggggggcgcctggagagcgaggaggcgcggcctcccgaggaggggcccggtggcggcagggccaggctggtccgagctgaggactctgcaagtgtctggagcggctgctcgcccaggaaggcctaggctaggacgttggcctcagggccaggaaggacagactggccgggcaggcgtgactcagcagcctgcgctcggcaggaaggagcggcgccctggacttggtacagttgcaggagcgtgaaggacttagccgactgcgctgctttttcaaaacggatccgggcaatgcttcgttttctaaaggatgctgctgttgaagctttgaattttacaataaactttttgaaacaaacttatgctctttattgagggtaggggatctttgtgtcgggggaggtggcgtgcagggtttcagaggattgctggaactccgtggaactgatggcacctgttccgtcttcctgtcgggcaagaatgacaggctcctccc

SEQ ID NO: 7891 - protein, 141 aa, Homo sapiens; identical to SEQ ID NO: 7889

SEQ ID NO: 7892 - DNA, 1152 bp, Homo sapiens
gtggataactagctgctggttgatcgcactatgactctggaagaagtccgcggccaggacacagttccggaaagcacagccaggtgggtttcagggcgctgagaaagccgctggtcggtcggcgaccgtcagggttttccagggtgggaatccgcggggtaggaggggagcgcgggggtccgggcgccagatcccggttggagagccggggtgcaggcgctgagccgggattggagtgtggttggagttggggagccaagggtgtgtgccggtggccggggctggggtctccgccgcgccctccggccggctcccgctcactgcgctggctcctccgcaggatgcagggtgccgggaaagcgctgcatgagttgctgctgtcggcgcagcgtcagggctgcctcactgccggcgtctacgagtcagccaaagtcttgaacgtgctttctgctgcgagaacgacatcgacatagtgcgcgtgggcgatgtgcagcggctggcggctatcgtgggcgccggcgaggaggcgggtgcgccgggcgacctgcactgcatcctcatttcgaaccccaacgaggacgcctggaaggatcccgccttggagaagctcagcctgttttgcgaggagagccgcagcgttaacgactgggtgcccagcatcaccctccccgagtgacagcccggcggggaccttggtctgatcgacgtggtgacgccccggggcgcctagagcgcggctggctctgtggaggggccctccgagggtgcccgagtgcggcgtggagactggcaggcggggggggcgcctggagagcgaggaggcgcggcctcccgaggaggggcccggtggcggcagggccaggctggtccgagctgaggactctgcaagtgtctggagcggctgctcgcccaggaaggcctaggctaggacgttggcctcagggccaggaaggacagactggccgggcaggcgtgactcagcagcctgcgctcggcaggaaggagcggcgccctggacttggtacagttgcaggagcgtgaaggacttagccgactgcgctgctttttcaaaacggatccgggcaatgcttcgttttctaaaggatgctgctgttgaagctttgaattttacaataaactttttgaaacaaa

SEQ ID NO: 7893 - protein, 71 aa, Homo sapiens; identical to SEQ ID NO: 7883

SEQ ID NO: 7894 - DNA, 2262 bp, Homo sapiens
atgaatccaagtcagtccagaaccatggcccatggacgggcagagcagctgctggtctccgcccctctgtctttcctttctcctcccggtggcttccctgttcctgtccctggctttcctggctttttggatccccatcctggctctggggggaaggaggatgggtctggagcacctgtgagacccgagcctgggcccaccacagcagaggatgcagcctcccaaccccaagagtcccagattggagtccctgagagaagctgggccccgtttaaccggacagaggatgactttcttctctggagtgctctgggtcacgcttggggacacatgaaggatacgccctccctttcaggctcccatcgcacgttgaacctggcttgtgaacacagccctctgggacactactaggaacaaagtgttccggatgctgcagaagctcagctgccacctggaaaacctgtttggccactttaggtccagatgacgggagccagtccggctcaggagaacagagctggcccagtaacacctcgcttcctccctgctgcagagacctgggagggccctgcccagcacagcacactggagtggccctgcggcagcatctgggctgctgtacccatggtgcctcccagcccgaggggctcccggcagctctggagactcctgctgtcacgtcacctggcccctcaccatcaccatcctcatctctcttgggaattaagacattgaaggaactgctgctgccagcaagagaggctgttgcaagaaagaaaggctgctgcaagaaacgcaagaaaggctgctgccagcattgcatttctgtcaagaagctgccccgcaaaatttatggatgtatcgctgtatgcacctaatagcaagctctactggatgaatggcttataaagatctcccctgaataaaattgtggtttttaactttagaagaacaatgtcaattctctctgcatcctttatgggagcctcagcatgtgttcagcactggtatttattctatatgactgcttgttaagcaacaggctgaattaaaatgggaaagctcaccgaggagttttcttgaaatactgcttttctagcaaggagaacatagaagatggtgaggcagccgcagctggagtgctgactgcccagaagcagaggggcaaaatgcactccagtatggattttggtcattgaggccttgctgagagcatgccccaggctgggttcacttttgcctgaaggggctgcagcagaatgaaaactcaactgtgcaaaacaaaacactcaaattttaaaaagcacaagattctgctgggatcatctggcagcaggggcagcaggaaagacgtaatagagatttcaaagcaggctgaggaggaggacagggcattccagcctctgtggttcagcaatctcaccactccacaaccgacggtggctttccagcacagatcttcacggattgcagcattcaggacctgagtccatgcccatgcagaggcccattgcagtgtttgcttagcatagctgcatttccagaatgtaggcaggagaagctgtaaaagattctcaccctgccatgcacactgatggctcacattctaaagagtcaggagtcattttggatttgggctgacctggtagacttctgaaagacagtgctctgggttcaagttgtcctcagggctggatgatccatagcaaatatcccctgatggataagcattgtgctgagagacttgcctccatcagctgtgtaaacctcaggatgacctgcacacaggtatactaaggcacacagagaccagctcgtagtcagtgacaagtaacttgccaagagctgtggtttaaaagcatgtctgcaaattcttggacactcttgtcatccagaaatagagtctaaccctcctcccttgaatacgggctggcttcagtggtggaaatgacaatgtgtgagtttgaggtttgattagaaaagatgacacagcctctgcctgactctcaaggcccttgttcttggacattagctgccatgctgggaggaagcccagcagccacacagagaggccacgacagccgaggtcccagccaagccagcatcaactgcccaacacgtcaatgagtgatcctgcagagcctcccatctcctagccaccgcagctgatgctctgagagcggaggcaagctgtccttgctgggcgctgcttaaactgcagatgtatgaacaaaataaaaatggtggttattttaagacact

SEQ ID NO: 7895 - protein, 136 aa, Homo sapiens
MNPSQSRTMAHGRAEQLLVSAPLSFLSPPGGFPVPVPGFPGFLDPHPGSGGKEDGSGAPVRPEPGPTTAEDAASQPQESQIGVPERSWAPFNRTEDDFLLWSALGHAWGHMKDTPSLSGSHRTLNLACEHSPLGHY

SEQ ID NO: 7896 - DNA, 838 bp, Homo sapiens
ctgcatggaggctgccggagttgcttcctgctccgtgctcccacaccgttcttcagctgaccaagtagtgacagcaggactccagggttctgtccctgtgcggcaaagcacacactttcagtgctgcggttgatgcttgagacgctcagtgggagccccgtttaaccggacagaggatgactttcttctctggagtgctctgggtcacgcttggggacacatgaaggatacgccctccctttcaggctcccatcgcacgttgaacctggcttgtgaacacagccctctgggacactactaggaacaaagtgttccggatgctgcagaagctcagctgccacctggaaaacctgtttggccactttaggtccagatgacgggagccagtccggctcaggagaacagagctggcccagtaacacctcgcttcctccctgctgcagagacctgggagggccctgcccagcacagcacactggagtggccctgcggcagcatctgggctgctgtacccatggtgcctcccagcccgaggggctcccggcagctctggagactcctgctgtcacgtcacctggcccctcaccatcaccatcctcatctctcttgggaattaagacattgaaggaactgctgctgccagcaagagaggctgttgcaagaaagaaaggctgctgcaagaaacgcaagaaaggctgctgccagcattgcatttctgtcaagaagctgccccgcaaaatttatggatgtatcgctgtatgcacctaatagcaagctctactggatgaatggcttataaagatctcccctgaataaaattgtggtttttaactttaga

SEQ ID NO: 7897 - protein, 83 aa, Homo sapiens
MTGASPAQENRAGPVTPRFLPAAETWEGPAQHSTLEWPCGSIWAAVPMVPPSPRGSRQLWRLLLSRHLAPHHHHPHLSWELRH

SEQ ID NO: 7898 - DNA, 823 bp, Homo sapiens
ggcagtctgagtccccagtgcctggcgtgggtgagctcagggctgctccgtatgggggcatccaggcctggctgctgatgccctgtggctgaggacacctccatctgcatgagccagtttggaagtccagcttgccccccaggcagtggaggccagtaagggcttctccccagattgaccactcagatcaaattgatccaggtgttgagacagaattggccccattttctgctaatttccattctctgattgtgctgcctgctacaggagtcattttggatttgggctgacctggtagacttctgaaagacagtgctctgggttcaagttgtcctcagggctggatgatccatagcaaatatcccctgatggataagcattgtgctgagagacttgcctccatcagctgtgtaaacctcaggatgacctgcacacaggtatactaaggcacacagagaccagctcgtagtcagtgacaagtaacttgccaagagctgtggtttaaaagcatgtctgcaaattcttggacactcttgtcatccagaaatagagtctaaccctcctcccttgaatacgggctggcttcagtggtggaaatgacaatgtgtgagtttgaggtttgattagaaaagatgacacagcctctgcctgactctcaaggcccttgttcttggacattagctgccatgctgggaggaagcccagcagccacacagagaggccacgacagccgaggtcccagccaagccagcatcaactgcccaacacgtcaatgagtgatcctgcagagcctcccatctcctagccaccgcagctgatgctc

SEQ ID NO: 7899 - protein, 47 aa, Homo sapiens
MTQPLPDSQGPCSWTLAAMLGGSPAATQRGHDSRGPSQASINCPTRQ

SEQ ID NO: 7900 - DNA, 916 bp, Homo sapiens
ctccctgaaaagcatggagcagaggtgtagacgtttgattaagtgcttcctaagcttgatggtcgagccttgtttcagctgctgaatttgctgtgtgcagcctggcattgttctcaggagggtctttcatatgtgtctgaggacataaggacagatgagaagcaggccaggggagaagtgatctctgcctccccacctcacacccacatggcacaggaggacagggttgactgcatcggtgtccctgtgggaagtgcttgctcccatcaacttgcttcttcttggaaagctagaatcctgcagctggattgaccagcacaaagacctttgtgctggctgaatagcaagggaccttcatgtgactggcaagtgacttgatttcccatgggttgcatcatgttttggggcacgaggactgtttgcagctcaggatgtttgccatcacaacggcagagccgcagttcacacccaggcacgttctccccaagacctgtggctgcaaccactgctatgcatggaatgtgagacggacggtgctcgcctagccaacagttgatgctgaatacatcttcatctgtgtattgaccatctacccttttcccatgatttgtttgtcaaaattccttgctaatttccttattaaaaatggtcagtattttaattctcctgattcatgataatttctttgacaaggaaattaatactttgttaaatgagtacaaatatttttaaacaatctgttttacttttaatctttgtttatggtgatattttgggcatacaaaggtctttaatatccatgttattaaattcacaaatatttccctttgtggattttgggtttcagtttataattctaaacatattctccactccatgattacaaaataaaaataaaacaacactggtattttaa

SEQ ID NO: 7901 - protein, 46 aa, Homo sapiens
MGCIMFWGTRTVCSSGCLPSQRQSRSSHPGTFSPRPVAATTAMHGM

SEQ ID NO: 7902 - DNA, 927 bp, Homo sapiens
agcaagcactgaaagtggaaacaggcagaagcttgtagtgagtattttcacacagggaagatggggctggagtgttttggatgccaagaacagggtgtactccccaccattcagaggcagagccaaaccgagaatgaaaaacagcatcccatcgtctggtcctgcccagcaacttcatcccaagctcagtgagatgctgtccccagagctgcagccggggagactcctccagtttcacaagcacaccctcttgtaatttccacctctttggagtagcaacttggataaattgaaaatggcacatgaaacatctctgtgcctttcaaagggagggagcatctctaatgagcttttgaaagaaagcacagcatcgcccagtggaaagaaatgtgtagtgaccacccaggcctgcagacgaggctctacgatcaagcgtggatgctaattcctgattccacccagtctcacattaattctcaggagtcagaagacctacaaatgtactcagggcatccagagagaggcagaatgctgctggattggacacaaaggacctggtctctaattctagtgccacttatttccttcttcccccaggtccgcgactctggctttgagacagctgctttcccaactctcattcatgggaaacccaccctagctgagcttcccacctcagagcaaactggagagaacccatgccaagtgcttcagcagtcgcggggatgagagtcctacgcaaatatgaaatgtggcatgcagtctcacagaagaacatgttctcaccaaggattgttacagagagctgccttgttcaaaggtccaaaacggctttggcaaagggtatctttctttccatatttggccagaaatatgagctgacagcaaatgctatgattttgaaatacatggcatattatttttgcg

SEQ ID NO: 7903 - protein, 43 aa, Homo sapiens
MGLECFGCQEQGVLPTIQRQSQTENEKQHPIVWSCPATSSQAQ

SEQ ID NO: 7904 - DNA, 1349 bp, Homo sapiens
gggccagcacagatttcttatcggcttccacactgcggagctgcagccctcagaagtaagcaaggtttcctgccgggagaaaaggatttgaagcattccagccaaaatgacggacagaagccccttcgaaaccgacatgctcaccctgacccgctacgttatggaaaaggggcgtcaggccaaagggactggggagctcacccagctgctgaactcaatgctgacggccatcaaagccatctcctcggctgtgcgcaaggccggtctggcccacctgtatggaatcgcaggaagcgttaacgtgacgggagatgaggtgaagaaactggatgtgctatccaattccctggtgatcaacatggtccaatcctcctatagtacctgcgtcctggtctcagaagagaataaggacgccatcatcaccgccaaggagaagcgggggaaatacgtggtctgctttgacccactggatggatcttccaatattgactgcctggcctccatcggaaccatctttgccatctatagaaagacctcagaggatgagccttctgaaaaggatgccctgcagtgtggccgcaatattgtggccgcaggttatgcgctgtacggtagtgcaaccctggtggctctctccacagggcaaggcgtggacctcttcatgcttgacccggctcttggtgaatttgtcctggtggaaaaagatgtcaagattaagaagaaaggaaagatttacagcctgaatgagggctatgccaagtattttgatgcggccaccactgaatatgtgcagaaaaagaaattccctgaggatggcagtgctccctatggggccaggtatgtgggctccatggtggctgacgtgcaccgcaccctggtctatggaggaatcttcctgtacccagccaaccagaagagccctaagggcaagctccggctcctgtatgaatgcaatcccgtggcctacatcattgagcaggcaggaggcttggcgaccacggggacccagcctgtactggacgtgaagcccgaggcaattcaccagcgagtccccctcattctggggtcaccagaggatgtgcaggaatatctcacctgtgtgcagaaaaatcaggcaggcagctagcgagtttgaccccacatgccctcttctgtttgtcttgcaccttgtctaaggaccctaaatgaacgataaacagagatggtagctatgagtatacaaaaggtaaatccacttaatcacatacagaagagcaacaacaaactgcttacgacaggtttggaagccacaggcgattctatggtcaatgtgaaggactagaaataaaaacccacatgtggaaagtgcg

SEQ ID NO: 7905 - protein, 339 aa, Homo sapiens; identical to SEQ ID NO: 1104

SEQ ID NO: 7906 - DNA, 1553 bp, Homo sapiens
gattcacccgccggcgcctggcctggcccagttgcaccacgagcgctgcggacactcggggcggcagtcggtctgtcagtcctcccgccaggtcccgcggcccgcacctgccgcccgcacctgcagctccgcacctgcggccagtgcctactgccctctcttgccgcccgcacctgcagccccgcacctgccgcttgcacctgcagccccgcgctctacccggttcaagcatggctgaccaggcgcccttcgacacggacgtcaacaccctgacccgcttcgtcatggaggagggcaggaaggcccgcggcacgggcgagttgacccagctgctcaactcgctctgcacagcagtcaaagccatctcttcggcggtgcgcaaggcgggcatcgcgcacctctatggcattgctggttctaccaacgtgacaggtgatcaagttaagaagctggacgtcctctccaacgacctggttatgaacatgttaaagtcatcctttgccacgtgtgttctcgtgtcagaagaagataaacacgccatcatagtggaaccggagaaaaggggtaaatatgtggtctgttttgatccccttgatggatcttccaacatcgattgccttgtgtccgttggaaccatttttggcatctatagaaagaaatcaactgatgagccttctgagaaggatgctctgcaaccaggccggaacctggtggcagccggctacgcactgtatggcagtgccaccatgctggtccttgccatggactgtggggtcaactgcttcatgctggacccggccatcggggagttcattttggtggacaaggatgtgaagataaaaaagaaaggtaaaatctacagccttaacgagggctacgccagggactttgaccctgccgtcactgagtacatccagaggaagaagttccccccagataattcagctccttatggggcccggtatgtgggctccatggtggctgatgttcatcgcactctggtctacggagggatatttctgtaccccgctaacaagaagagccccaatggaaagctgagactgctgtacgaatgcaaccccatggcctacgtcatggagaaggctgggggaatggccaccactgggaaggaggccgtgttagacgtcattcccacagacattcaccagagggcgccggtgatcttgggatcccccgacgacgtgctcgagttcctgaaggtgtatgagaagcactctgcccagtgagcacctgccctgcctgcatccggagaattgcctctacctggaccttttgtctcacacagcagtaccctgacctgctgtgcaccttacattcctagagagcagaaataaaaagcatgactatttccaccatcaaatgctgtagaatgcttggcactccctaaccaaatgctgtctccataatgccactggtgttaagatatattttgagtggatggaggagaaataaacttattcctccttaaaaaaaagtctcccttgctttgtgtcaaataataatgatgatgacaataataactgctgatgcat

SEQ ID NO: 7907 - protein, 338 aa, Homo sapiens [sequence omitted]

SEQ ID NO: 7908 - DNA, 935 bp, Homo sapiens
ggtaacaaactttctcagcctttaaggtgttactaaatggtacagtttctgtaatgcctgcctcagccccataaccagaatcaaccataccctcgttggggcttctgtgggcaatctgacctattgtgagatgatgagaggctgtctccatttttccattttctatttattgggaacaggattctcatcacattttttagcacagccccaaatacataccttgtaggtgctcggtgaatggatgtggaatcaaagaaacttaggagacaccaagaaaactctctttcttattttctgcaatcctaattcttgctggtcttaacttgcaggataattcagctccttatggggcccggtatgtgggctccatggtggctgatgttcatcgcactctggtctacggagggatatttctgtaccccgctaacaagaagagccccaatggaaagctgagactgctgtacgaatgcaaccccatggcctacgtcatggagaaggctgggggaatggccaccactgggaaggaggccgtgttagacgtcattcccacagacattcaccagagggcgccggtgatcttgggatcccccgacgacgtgctcgagttcctgaaggtgtatgagaagcactctgcccagtgagcacctgccctgcctgcatccggagaattgcctctacctggaccttttgtctcacacagcagtaccctgacctgctgtgcaccttacattcctagagagcagaaataaaaagcatgactatttccaccatcaaatgctgtagaatgcttggcactccctaaccaaatgctgtctccataatgccactggtgttaagatatattttgagtggatggaggagaaataaacttattcctccttaaaaaaaagtctcccttgctttgtgtcaaataataatgatgatgacaataataa

SEQ ID NO: 7909 - protein, 90 aa, Homo sapiens [sequence omitted]

SEQ ID NO: 7910 - DNA, 881 bp, Homo sapiens
ggtaacaaactttctcagcctttaaggtgttactaaatggtacagtttctgtaatgcctgcctcagccccataaccagaatcaaccataccctcgttggggcttctgtgggcaatctgacctattgtgagatgatgagaggctgtctccatttttccattttctatttattgggaacaggattctcatcacattttttagcacagccccaaatacataccttgtaggtgctcggtgaatggatgtggaatcaaagaaacttaggagacaccaagaaaactctctttcttattttctgcaatcctaattcttgctggtcttaacttgcaggataattcagctccttatggggcccggtatgtgggctccatggtggctgatgttcatcgcactctggtctacggagggatatttctgtaccccgctaacaagaagagccccaatggaaagctgagactgctgtacgaatgcaaccccatggcctacgtcatggagaaggctgggggaatggccaccactgggaaggaggccgtgttagacgtcattcccacagacattcaccagagggcgccggtgatcttgggatcccccgacgacgtgctcgagttcctgaaggtgtatgagaagcactctgcccagtgagcacctgccctgcctgcatccggagaattgcctctacctggaccttttgtctcacacagcagtaccctgacctgctgtgcaccttacattcctagagagcagaaataaaaagcatgactatttccaccatcaaatgctgtagaatgcttggcactccctaaccaaatgctgtctccataatgccactggtgttaagatatattttgagtggatggaggagaaataaacttattcctcctt

SEQ ID NO: 7911 - protein, 90 aa, Homo sapiens [sequence omitted]

SEQ ID NO: 7912 - DNA, 1487 bp, Homo sapiens
gattcacccgccggcgcctggcctggcccagttgcaccacgagcgctgcggacactcggggcggcagtcggtctgtcagtcctcccgccaggtcccgcggcccgcacctgccgcccgcacctgcagctccgcacctgcggccagtgcctactgccctctcttgccgcccgcacctgcagccccgcacctgccgcttgcacctgcagccccgcgctctacccggttcaagcatggctgaccaggcgcccttcgacacggacgtcaacaccctgacccgcttcgtcatggaggagggcaggaaggcccgcggcacgggcgagttgacccagctgctcaactcgctctgcacagcagtcaaagccatctcttcggcggtgcgcaaggcgggcatcgcgcacctctatggcattgctggttctaccaacgtgacaggtgatcaagttaagaagctggacgtcctctccaacgacctggttatgaacatgttaaagtcatcctttgccacgtgtgttctcgtgtcagaagaagataaacacgccatcatagtggaaccggagaaaaggggtaaatatgtggtctgttttgatccccttgatggatcttccaacatcgattgccttgtgtccgttggaaccatttttggcatctatagaaagaaatcaactgatgagccttctgagaaggatgctctgcaaccaggccggaacctggtggcagccggctacgcactgtatggcagtgccaccatgctggtccttgccatggactgtggggtcaactgcttcatgctggacccggccatcggggagttcattttggtggacaaggatgtgaagataaaaaagaaaggtaaaatctacagccttaacgagggctacgccagggactttgaccctgccgtcactgagtacatccagaggaagaagttccccccagataattcagctccttatggggcccggtatgtgggctccatggtggctgatgttcatcgcactctggtctacggagggatatttctgtaccccgctaacaagaagagccccaatggaaagctgagactgctgtacgaatgcaaccccatggcctacgtcatggagaaggctgggggaatggccaccactgggaaggaggccgtgttagacgtcattcccacagacattcaccagagggcgccggtgatcttgggatcccccgacgacgtgctcgagttcctgaaggtgtatgagaagcactctgcccagtgagcacctgccctgcctgcatccggagaattgcctctacctggaccttttgtctcacacagcagtaccctgacctgctgtgcaccttacattcctagagagcagaaataaaaagcatgactatttccaccatcaaatgctgtagaatgcttggcactccctaaccaaatgctgtctccataatgccactggtgttaagatatattttgagtggatggaggagaaataaacttattcctcctt

SEQ ID NO: 7913 - protein, 338 aa, Homo sapiens [sequence omitted]

SEQ ID NO: 7914 - DNA, 1378 bp, Homo sapiens
gattcacccgccggcgcctggcctggcccagttgcaccacgagcgctgcggacactcggggcggcagtcggtctgtcagtcctcccgccaggtcccgcggcccgcacctgccgcccgcacctgcagctccgcacctgcggccagtgcctactgccctctcttgccgcccgcacctgcagccccgcacctgccgcttgcacctgcagccccgcgctctacccggttcaagcatggctgaccaggcgcccttcgacacggacgtcaacaccctgacccgcttcgtcatggaggagggcaggaaggcccgcggcacgggcgagttgacccagctgctcaactcgctctgcacagcagtcaaagccatctcttcggcggtgcgcaaggcgggcatcgcgcacctctatggcattgctggttctaccaacgtgacaggtgatcaagttaagaagctggacgtcctctccaacgacctggttatgaacatgttaaagtcatcctttgccacgtgtgttctcgtgtcagaagaagataaacacgccatcatagtggaaccggagaaaaggggtaaatatgtggtctgttttgatccccttgatggatcttccaacatcgattgccttgtgtccgttggaaccatttttggcatctatagaaagaaatcaactgatgagccttctgagaaggatgctctgcaaccaggccggaacctggtggcagccggctacgcactgtatggcagtgccaccatgctggtccttgccatggactgtggggtcaactgcttcatgctggacccggccatcggggagttcattttggtggacaaggatgtgaagataaaaaagaaaggtaaaatctacagccttaacgagggctacgccagggactttgaccctgccgtcactgagtacatccagaggaagaagttccccccagataattcagctccttatggggcccggtatgtgggctccatggtggctgatgttcatcgcactctggtctacggagggatatttctgtaccccgctaacaagaagagccccaatggaaagctgagactgctgtacgaatgcaaccccatggcctacgtcatggagaaggctgggggaatggccaccactgggaaggaggccgtgttagacgtcattcccacagacattcaccagagggcgccggtgatcttgggatcccccgacgacgtgctcgagttcctgaaggtgtatgagaagcactctgcccagtgagcacctgccctgcctgcatccggagaattgcctctacctggaccttttgtctcacacagcagtaccctgacctgctgtgcaccttacattcctagagagcagaaataaaaagcatgactatttccaccatc

SEQ ID NO: 7915 - protein, 338 aa, Homo sapiens [sequence omitted]

SEQ ID NO: 7916 - DNA, 1771 bp, Homo sapiens
gcggccgccgagccgagcagcgccgcgcggggccgagtggagccgagcagctgccgcgccgcgtcgccggtttaagcgcagtgcaggccgcggccgggggcggcggtagtgagcccagcgctgcgctccagcccccttttccctccatggtttctctccgctcccgtgagtaacttggctccgggggctccgctcgcctgcccgcacgccgcccgccacccaggaccgcgccgccggcctccgccgctagcaaacccttccgacggccctcgctgcgcaagccgggacgcctctcccccctccgcccccgccgcggaaagttaagtttgaagaggggggaagaggggaacatggacatgaagaggaggatccacctggagctgaggaaccggaccccggcagctgttcgagaacttgtcttggacaattgcaaatcaaatgatggaaaaattgagggcttaacagctgaatttgtgaacttagagttcctcagtttaataaatgtaggcttgatctcagtttcaaatctccccaagctgcctaaattgaaaaagcttgaactcagtgaaaatagaatctttggaggtctggacatgttagctgaaaaacttccaaatctcacacatctaaacttaagtggaaataaactgaaagatatcagcaccttggaacctttgaaaaagttagaatgtctgaaaagcctggacctctttaactgtgaggttaccaacctgaatgactaccgagagagtgtcttcaagctcctgccccagcttacctacttggatggctatgaccgagaggaccaggaagcacctgactcagatgccgaggtggatggtgtggatgaagaggaggaggacgaaggtgagtaggctcagcatctggtgaacctgatgtctgcctttcaaagcctctgataaaagctattggatgttggccgggcgcagtggcacacaaccgtaatcccagcactttgggtggccgaggcagggggcattgcttgagcccaggagtttgagactagcctgggcaacatggcaataccttgtttctacagaaaatagaaaaaaaaaaaattagccaggtgtggtggcgcacacctggagtcttagctactcagaagactggaggccgaggtgggaggatcacttgaacctaggagtttgaggctacagtgagccatgattgttccccactgcactccgtctcagaagacagacagggtgtctcaaaaaaaaaagctactagatgttcttactattgaggaaaatagtgtgtgtttgtgtgcgtgcgcacgcgtgtattttttgaatgtaggcattccattaaatttatagctaaggcctatttcataagcacctggcctcaagggatcctcccacctcagcctccccaagtggtgggattacagggatgagacactgaacctggcccgggaagcatttcctgaagtctacaagctaagttaggatgctgtgcgtttaaactgtaaaccgcttgctcttacaggcttgccactctgctgttcttaagtcttcctacttcaggggtcttcaacccacaggccacagactggtactactccatgacctgttagaaaccaggccgcatgagcagtgaggaagcctcatctgtatttacagccactccccattgctcacattactgtctgggctccacctcctgtcagatcaatggtggtattagattctcataggaacgagaatcctattgtgaactgcacatgtgagggggctaggttgtgtgc

SEQ ID NO: 7917 - protein, 174 aa, Homo sapiens [sequence omitted]

SEQ ID NO: 7918 - DNA, 1177 bp, Homo sapiens
gcggccgccgagccgagcagcgccgcgcggggccgagtggagccgagcagctgccgcgccgcgtcgccggtttaagcgcagtgcaggccgcggccgggggcggcggtagtgagcccagcgctgcgctccagcccccttttccctccatggtttctctccgctcccgtgagtaacttggctccgggggctccgctcgcctgcccgcacgccgcccgccacccaggaccgcgccgccggcctccgccgctagcaaacccttccgacggccctcgctgcgcaagccgggacgcctctcccccctccgcccccgccgcggaaagttaagtttgaagaggggggaagaggggaacatggacatgaagaggaggatccacctggagctgaggaaccggaccccggcagctgttcgagaacttgtcttggacaattgcaaatcaaatgatggaaaaattgagggcttaacagctgaatttgtgaacttagagttcctcagtttaataaatgtaggcttgatctcagtttcaaatctccccaagctgcctaaattgaaaaagcttgaactcagtgaaaatagaatctttggaggtctggacatgttagctgaaaaacttccaaatctcacacatctaaacttaagtggaaataaactgaaagatatcagcaccttggaacctttgaaaaagttagaatgtctgaaaagcctggacctctttaactgtgaggttaccaacctgaatgactaccgagagagtgtcttcaagctcctgccccagcttacctacttggatggctatgaccgagaggaccaggaagcacctgactcagatgccgaggtggatggtgtggatgaagaggaggaggacgaagaaggagaagatgaggaagacgaggacgatgaggatggtgaagaagaggagtttgatgaagaagatgatgaagatgaagatgtagaaggggatgaggacgacgatgaagtcagtgaggaggaagaagaatttggacttgatgaagaagatgaagatgaggatgaggatgaagaggaggaagaaggtgggaaaggtgaaaagaggaagagagaaacagatgatgaaggagaagatgattaagaccccagatgacctgcagaaacagaactgttcagtattggttggactgctcatggattttgtagctgttt

SEQ ID NO: 7919 - protein, 251 aa, Homo sapiens; identical to SEQ ID NO: 1108

SEQ ID NO: 7920 - DNA, 1500 bp, Homo sapiens
gcggccgccgagccgagcagcgccgcgcggggccgagtggagccgagcagctgccgcgccgcgtcgccggtttaagcgcagtgcaggccgcggccgggggcggcggtagtgagcccagcgctgcgctccagcccccttttccctccatggtttctctccgctcccgtgagtaacttggctccgggggctccgctcgcctgcccgcacgccgcccgccacccaggaccgcgccgccggcctccgccgctagcaaacccttccgacggccctcgctgcgcaagccgggacgcctctcccccctccgcccccgccgcggaaagttaagtttgaagaggggggaagaggggaacatggacatgaagaggaggatccacctggagctgaggaaccggaccccggcagctgttcgagaacttgtcttggacaattgcaaatcaaatgatggaaaaattgagggcttaacagctgaatttgtgaacttagagttcctcagtttaataaatgtaggcttgatctcagtttcaaatctccccaagctgcctaaattgaaaaagcttgaactcagtgaaaatagaatctttggaggtctggacatgttagctgaaaaacttccaaatctcacacatctaaacttaagtggaaataaactgaaagatatcagcaccttggaacctttgaaaaagttagaatgtctgaaaagcctggacctctttaactgtgaggttaccaacctgaatgactaccgagagagtgtcttcaagctcctgccccagcttacctacttggatggctatgaccgagaggaccaggaagcacctgactcagatgccgaggtggatggtgtggatgaagaggaggaggacgaagaaggagaagatgaggaagacgaggacgatgaggatggtgaagaagaggagtttgatgaagaagatgatgaagatgaagatgtagaaggggatgaggacgacgatgaagtcagtgaggaggaagaagaatttggacttgatgaagaagatgaagatgaggatgaggatgaagaggaggaagaaggtgggaaaggtgaaaagaggaagagagaaacagatgatgaaggagaagatgattaagaccccagatgacctgcagaaacagaactgttcagtattggttggactgctcatggattttgtagctgtttaaaaaaaaaaaaaaggtagctgtgatacaaaccccaggacacccacccacccaaagagccaaagaatagttcctgtgacattccgccttccttccatgtagtccctcttggtaatctaccaccaagcttgtggacttcaccccaacaaaattgtaagcgttgttaggtttttgtgtaagattcttgctgtagcgtggatagctgtgattggtgagtcaaccgtctgtggctaccagttacactgagattgtaacagcatttttactttctgtacaacaaaaaagctttgtaaataaaatcttaacattttgggtctgtttttt

SEQ ID NO: 7921 - protein, 251 aa, Homo sapiens; identical to SEQ ID NO: 1108

SEQ ID NO: 7922 - DNA, 1450 bp, Homo sapiens
gcggccgccgagccgagcagcgccgcgcggggccgagtggagccgagcagctgccgcgccgcgtcgccggtttaagcgcagtgcaggccgcggccgggggcggcggtagtgagcccagcgctgcgctccagcccccttttccctccatggtttctctccgctcccgtgagtaacttggctccgggggctccgctcgcctgcccgcacgccgcccgccacccaggaccgcgccgccggcctccgccgctagcaaacccttccgacggccctcgctgcgcaagccgggacgcctctcccccctccgcccccgccgcggaaagttaagtttgaagaggggggaagaggggaacatggacatgaagaggaggatccacctggagctgaggaaccggaccccggcagctgttcgagaacttgtcttggacaattgcaaatcaaatgatggaaaaattgagggcttaacagctgaatttgtgaacttagagttcctcagtttaataaatgtaggcttgatctcagtttcaaatctccccaagctgcctaaattgaaaaagcttgaactcagtgaaaatagaatctttggaggtctggacatgttagctgaaaaacttccaaatctcacacatctaaacttaagtggaaataaactgaaagatatcagcaccttggaacctttgaaaaagttagaatgtctgaaaagcctggacctctttaactgtgaggttaccaacctgaatgactaccgagagagtgtcttcaagctcctgccccagcttacctacttggatggctatgaccgagaggaccaggaagcacctgactcagatgccgaggtggatggtgtggatgaagaggaggaggacgaagaaggagaagatgaggaagacgaggacgatgaggatggtgaagaagaggagtttgatgaagaagatgattaagaccccagatgacctgcagaaacagaactgttcagtattggttggactgctcatggattttgtagctgtttaaaaaaaaaaaaaaggtagctgtgatacaaaccccaggacacccacccacccaaagagccaaagaatagttcctgtgacattccgccttccttccatgtagtccctcttggtaatctaccaccaagcttgtggacttcaccccaacaaaattgtaagcgttgttaggtttttgtgtaagattcttgctgtagcgtggatagctgtgattggtgagtcaaccgtctgtggctaccagttacactgagattgtaacagcatttttactttctgtacaacaaaaaagctttgtaaataaaatcttaacattttgggtctgttttttcatgctttgctttttaattattattattattttttttacattaggacattttatgtgacaactgccaaaaaagtatttttaagaatttaagcgaaataaacagttactctttggtaaa

SEQ ID NO: 7923 - protein, 195 aa, Homo sapiens
MDMKRRIHLELRNRTPAAVRELVLDNCKSNDGKIEGLTAEFVNLEFLSLINVGLISVSNLPKLPKLKKLELSENRIFGGLDMLAEKLPNLTHLNLSGNKLKDISTLEPLKKLECLKSLDLFNCEVTNLNDYRESVFKLLPQLTYLDGYDREDQEAPDSDAEVDGVDEEEEDEEGEDEEDEDDEDGEEEEFDEEDD

SEQ ID NO: 7924 - DNA, 1622 bp, Homo sapiens
gcggccgccgagccgagcagcgccgcgcggggccgagtggagccgagcagctgccgcgccgcgtcgccggtttaagcgcagtgcaggccgcggccgggggcggcggtagtgagcccagcgctgcgctccagcccccttttccctccatggtttctctccgctcccgtgagtaacttggctccgggggctccgctcgcctgcccgcacgccgcccgccacccaggaccgcgccgccggcctccgccgctagcaaacccttccgacggccctcgctgcgcaagccgggacgcctctcccccctccgcccccgccgcggaaagttaagtttgaagaggggggaagaggggaacatggacatgaagaggaggatccacctggagctgaggaaccggaccccggcagctgttcgagaacttgtcttggacaattgcaaatcaaatgatggaaaaattgagggcttaacagctgaatttgtgaacttagagttcctcagtttaataaatgtaggcttgatctcagtttcaaatctccccaagctgcctaaattgaaaaagcttgaactcagtgaaaatagaatctttggaggtctggacatgttagctgaaaaacttccaaatctcacacatctaaacttaagtggaaataaactgaaagatatcagcaccttggaacctttgaaaaagttagaatgtctgaaaagcctggacctctttaactgtgaggttaccaacctgaatgactaccgagagagtgtcttcaagctcctgccccagcttacctacttggatggctatgaccgagaggaccaggaagcacctgactcagatgccgaggtggatggtgtggatgaagaggaggaggacgaagaaggagaagatgaggaagacgaggacgatgaggatggtgaagaagaggagtttgatgaagaagatgatgaagatgaagatgtagaaggggatgaggacgacgatgaagtcagtgaggaggaagaagaatttggacttgatgaagaagatgaagatgaggatgaggatgaagaggaggaagaaggtgggaaaggtgaaaagaggaagagagaaacagatgatgaaggagaagatgattaagaccccagatgacctgcagaaacagaactgttcagtattggttggactgctcatggattttgtagctgtttaaaaaaaaaaaaaaggtagctgtgatacaaaccccaggacacccacccacccaaagagccaaagaatagttcctgtgacattccgccttccttccatgtagtccctcttggtaatctaccaccaagcttgtggacttcaccccaacaaaattgtaagcgttgttaggtttttgtgtaagattcttgctgtagcgtggatagctgtgattggtgagtcaaccgtctgtggctaccagttacactgagattgtaacagcatttttactttctgtacaacaaaaaagctttgtaaataaaatcttaacattttgggtctgttttttcatgctttgctttttaattattattattattttttttacattaggacattttatgtgacaactgccaaaaaagtatttttaagaatttaagcgaaataaacagttactctttggtaaagcct

SEQ ID NO: 7925 - protein, 251 aa, Homo sapiens; identical to SEQ ID NO: 1108

SEQ ID NO: 7926 - DNA, 2772 bp, Homo sapiens
gcggccgccgagccgagcagcgccgcgcggggccgagtggagccgagcagctgccgcgccgcgtcgccggtttaagcgcagtgcaggccgcggccgggggcggcggtagtgagcccagcgctgcgctccagcccccttttccctccatggtttctctccgctcccgtgagtaacttggctccgggggctccgctcgcctgcccgcacgccgcccgccacccaggaccgcgccgccggcctccgccgctagcaaacccttccgacggccctcgctgcgcaagccgggacgcctctcccccctccgcccccgccgcggaaagttaagtttgaagaggggggaagaggggaacatggacatgaagaggaggatccacctggagctgaggaaccggaccccggcagctgttcgagaacttgtcttggacaattgcaaatcaaatgatggaaaaattgagggcttaacagctgaatttgtgaacttagagttcctcagtttaataaatgtaggcttgatctcagtttcaaatctccccaagctgcctaaattgaaaaagcttgaactcagtgaaaatagaatctttggaggtctggacatgttagctgaaaaacttccaaatctcacacatctaaacttaagtggaaataaactgaaagatatcagcaccttggaacctttgaaaaagttagaatgtctgaaaagcctggacctctttaactgtgaggttaccaacctgaatgactaccgagagagtgtcttcaagctcctgccccagcttacctacttggatggctatgaccgagaggaccaggaagcacctgactcagatgccgaggtggatggtgtggatgaagaggaggaggacgaagaaggagaagatgaggaagacgaggacgatgaggatggtgaagaagaggagtttgatgaagaagatgatgaagatgaagatgtagaaggggatgaggacgacgatgaagtcagtgaggaggaagaagaatttggacttgatgaagaagatgaagatgaggatgaggatgaagaggaggaagaaggtgggaaaggtgaaaagaggaagagagaaacagatgatgaaggagaagatgattaagaccccagatgacctgcagaaacagaactgttcagtattggttggactgctcatggattttgtagctgtttaaaaaaaaaaaaaaggtagctgtgatacaaaccccaggacacccacccacccaaagagccaaagaatagttcctgtgacattccgccttccttccatgtagtccctcttggtaatctaccaccaagcttgtggacttcaccccaacaaaattgtaagcgttgttaggtttttgtgtaagattcttgctgtagcgtggatagctgtgattggtgagtcaaccgtctgtggctaccagttacactgagattgtaacagcatttttactttctgtacaacaaaaaagctttgtaaataaaatcttaacattttgggtctgttttttcatgctttgctttttaattattattattattttttttacattaggacattttatgtgacaactgccaaaaaagtatttttaagaatttaagcgaaataaacagttactctttggtaaagcctagttgtatgcttacatttttaaattatactctcattgtaagctcatgttaaaacaccaaagaactggtttatttggcatttttatattagtagttgttgaggggaattgcacaagtgtgtaggatctttgagcatttagatcaaatcctcattgataactgggagtaaatgaagcatactttaaaaaataacgttcaaaatggaatactctggggccctgaaaaccagtaaaatgttaggttcaagtattatgtgaattaagggaaagaagatagtgtaaagcaaaaggccttcaccagaatcccaagagatctgaattctagttctggctctgccactgattttctgtgtgaccttgtgttgactctgggtcaccacccagtctggaaaattgaaggggtgtgaccaaatggcttctgaagtcacttgtagcactgatgttctgtgacccttgctgacaggaaggtctgaagagaaaaatgggctttccactagtctgaagcatgtagggtttgactgatgggtgaacacagtatggtttgttgccaagacaggcgtgaaaagggggaatgacatgtgaaaagcctcaccaagcagtgggtaggcactgcctgaggtcaactcaggttttccataagatggaaattttctctattcttacagatcttaaagggatttgagaaaggaggatattctgtctgtattcagtgattaaccgtttagcgaaaatagatgtatgactgcattatcaatacagttttttatagtggaagatttaaggattgtttcagtaaattttagcttatagctgctggaatgagtgaggtttttgatgcatgtaaatgcaatatgtaaaattggaatctaatttgaatttataacaagtcacagtctctatggagcccccaaatactgtactttaaaatcaaaatctcccatagactttaaaatggagtttcttttttgcaaagaaaatccaagaaaatttgatttctgattttacaggtattacacatcattttccccaaccataaggccattttggcaaaccttcaatacattgtaaaatggtttcttctgtagcctaagtgtgtccttaaggttttgcttatttgtcaaatatcaaacacagtaactttgagtgattatt

SEQ ID NO: 7927 - protein, 251 aa, Homo sapiens; identical to SEQ ID NO: 1108

SEQ ID NO: 7928 - DNA, 843 bp, Homo sapiens
gcgctgcgctccagcccccttttccctccatggtttctctccgctcccgtgagtaacttggctccgggggctccgctcgcctgcccgcacgccgcccgccacccaggaccgcgccgccggcctccgccgctagcaaacccttccgacggccctcgctgcgcaagccgggacgcctctcccccctccgcccccgccgcggaaagttaagtttgaagaggggggaagaggggaacatggacatgaagaggaggatccacctggagctgaggaaccggaccccggcagctgttcgagaacttgtcttggacaattgcaaatcaaatgatggaaaaattgagggcttaacagctgaatttgtgaacttagagttcctcagtttaataaatgtaggcttgatctcagtttcaaatctccccaagctgcctaaattgaaaaagcttgaactcagtgaaaatagaatctttggaggtctggacatgttagctgaaaaacttccaaatctcacacatctaaacttaagtggaaataaactgaaagatatcagcaccttggaacctttgaaaaagttagaatgtctgaaaagcctggacctctttaactgtgaggttaccaacctgaatgactaccgagagagtgtcttcaagctcctaccaccaagcttgtggacttcaccccaacaaaattgtaagcgttgttaggtttttgtgtaagattcttgctgtagcgtggatagctgtgattggtgagtcaaccgtctgtggctaccagttacactgagattgtaacagcatttttactttctgtacaacaaaaaagctttgtaaataaaatcttaacattttg

SEQ ID NO: 7929 - protein, 154 aa, Homo sapiens
MDMKRRIHLELRNRTPAAVRELVLDNCKSNDGKIEGLTAEFVNLEFLSLINVGLISVSNLPKLPKLKKLELSENRIFGGLDMLAEKLPNLTHLNLSGNKLKDISTLEPLKKLECLKSLDLFNCEVTNLNDYRESVFKLLPPSLWTSPQQNCKRC

SEQ ID NO: 7930 - DNA, 973 bp, Homo sapiens
gcgctgcgctccagcccccttttccctccatggtttctctccgctcccgtgagtaacttggctccgggggctccgctcgcctgcccgcacgccgcccgccacccaggaccgcgccgccggcctccgccgctagcaaacccttccgacggccctcgctgcgcaagccgggacgcctctcccccctccgcccccgccgcggaaagttaagtttgaagaggggggaagaggggaacatggacatgaagaggaggatccacctggagctgaggaaccggaccccggcagctgttcgagaacttgtcttggacaattgcaaatcaaatgatggaaaaattgagggcttaacagctgaatttgtgaacttagagttcctcagtttaataaatgtaggcttgatctcagtttcaaatctccccaagctgcctaaattgaaaaagcttgaactcagtgaaaatagaatctttggaggtctggacatgttagctgaaaaacttccaaatctcacacatctaaacttaagtggaaataaactgaaagatatcagcaccttggaacctttgaaaaagttagaatgtctgaaaagcctggacctctttaactgtgaggttaccaacctgaatgactaccgagagagtgtcttcaagctcctaccaccaagcttgtggacttcaccccaacaaaattgtaagcgttgttaggtttttgtgtaagattcttgctgtagcgtggatagctgtgattggtgagtcaaccgtctgtggctaccagttacactgagattgtaacagcatttttactttctgtacaacaaaaaagctttgtaaataaaatcttaacattttgggtctgttttttcatgctttgctttttaattattattattattttttttacattaggacattttatgtgacaactgccaaaaaagtatttttaagaatttaagcgaaataaacagttactctttggtaaa

SEQ ID NO: 7931 - protein, 154 aa, Homo sapiens; identical to SEQ ID NO: 7929

SEQ ID NO: 7932 - DNA, 2127 bp, Homo sapiens
gcgctgcgctccagcccccttttccctccatggtttctctccgctcccgtgagtaacttggctccgggggctccgctcgcctgcccgcacgccgcccgccacccaggaccgcgccgccggcctccgccgctagcaaacccttccgacggccctcgctgcgcaagccgggacgcctctcccccctccgcccccgccgcggaaagttaagtttgaagaggggggaagaggggaacatggacatgaagaggaggatccacctggagctgaggaaccggaccccggcagctgttcgagaacttgtcttggacaattgcaaatcaaatgatggaaaaattgagggcttaacagctgaatttgtgaacttagagttcctcagtttaataaatgtaggcttgatctcagtttcaaatctccccaagctgcctaaattgaaaaagcttgaactcagtgaaaatagaatctttggaggtctggacatgttagctgaaaaacttccaaatctcacacatctaaacttaagtggaaataaactgaaagatatcagcaccttggaacctttgaaaaagttagaatgtctgaaaagcctggacctctttaactgtgaggttaccaacctgaatgactaccgagagagtgtcttcaagctcctaccaccaagcttgtggacttcaccccaacaaaattgtaagcgttgttaggtttttgtgtaagattcttgctgtagcgtggatagctgtgattggtgagtcaaccgtctgtggctaccagttacactgagattgtaacagcatttttactttctgtacaacaaaaaagctttgtaaataaaatcttaacattttgggtctgttttttcatgctttgctttttaattattattattattttttttacattaggacattttatgtgacaactgccaaaaaagtatttttaagaatttaagcgaaataaacagttactctttggtaaagcctagttgtatgcttacatttttaaattatactctcattgtaagctcatgttaaaacaccaaagaactggtttatttggcatttttatattagtagttgttgaggggaattgcacaagtgtgtaggatctttgagcatttagatcaaatcctcattgataactgggagtaaatgaagcatactttaaaaaataacgttcaaaatggaatactctggggccctgaaaaccagtaaaatgttaggttcaagtattatgtgaattaagggaaagaagatagtgtaaagcaaaaggccttcaccagaatcccaagagatctgaattctagttctggctctgccactgattttctgtgtgaccttgtgttgactctgggtcaccacccagtctggaaaattgaaggggtgtgaccaaatggcttctgaagtcacttgtagcactgatgttctgtgacccttgctgacaggaaggtctgaagagaaaaatgggctttccactagtctgaagcatgtagggtttgactgatgggtgaacacagtatggtttgttgccaagacaggcgtgaaaagggggaatgacatgtgaaaagcctcaccaagcagtgggtaggcactgcctgaggtcaactcaggttttccataagatggaaattttctctattcttacagatcttaaagggatttgagaaaggaggatattctgtctgtattcagtgattaaccgtttagcgaaaatagatgtatgactgcattatcaatacagttttttatagtggaagatttaaggattgtttcagtaaattttagcttatagctgctggaatgagtgaggtttttgatgcatgtaaatgcaatatgtaaaattggaatctaatttgaatttataacaagtcacagtctctatggagcccccaaatactgtactttaaaatcaaaatctcccatagactttaaaatggagtttcttttttgcaaagaaaatccaagaaaatttgatttctgattttacaggtattacacatcattttccccaaccataaggccattttggcaaaccttcaatacattgtaaaatggtttcttctgtagcctaagtgtgtccttaaggttttgcttatttgtcaaatatcaaacacagtaactttgagtgattatt

SEQ ID NO: 7933 - protein, 154 aa, Homo sapiens; identical to SEQ ID NO: 7929

SEQ ID NO: 7934 - DNA, 1609 bp, Homo sapiens
tgcccgtctccctgcgcctggtgagccggcccacgagcttggccttgcccgcccgccctcggcgctggctggcggccgcctcttcccgcgccgagccctcggttcgagaacttgtcttggacaattgcaaatcaaatgatggaaaaattgagggcttaacagctgaatttgtgaacttagagttcctcagtttaataaatgtaggcttgatctcagtttcaaatctccccaagctgcctaaattgaaaaagcttgaactcagtgaaaatagaatctttggaggtctggacatgttagctgaaaaacttccaaatctcacacatctaaacttaagtggaaataaactgaaagatatcagcaccttggaacctttgggacattaatcgagagacaaagaaggcatcaattcaaacttccttggacaccttttttaagagacctgggccatccaaaccatcccccaaagcccttctaaattctaagaaggagttgtggtttttgatccttttcttcagaaaaagttagaatgtctgaaaagcctggacctctttaactgtgaggttaccaacctgaatgactaccgagagagtgtcttcaagctcctgccccagcttacctacttggatggctatgaccgagaggaccaggaagcacctgactcagatgccgaggtggatggtgtggatgaagaggaggaggacgaaggtgagtaggctcagcatctggtgaacctgatgtctgcctttcaaagcctctgataaaagctattggatgttggccgggcgcagtggcacacaaccgtaatcccagcactttgggtggccgaggcagggggcattgcttgagcccaggagtttgagactagcctgggcaacatggcaataccttgtttctacagaaaatagaaaaaaaaaaaattagccaggtgtggtggcgcacacctggagtcttagctactcagaagactggaggccgaggtgggaggatcacttgaacctaggagtttgaggctacagtgagccatgattgttccccactgcactccgtctcagaagacagacagggtgtctcaaaaaaaaaagctactagatgttcttactattgaggaaaatagtgtgtgtttgtgtgcgtgcgcacgcgtgtattttttgaatgtaggcattccattaaatttatagctaaggcctatttcataagcacctggcctcaagggatcctcccacctcagcctccccaagtggtgggattacagggatgagacactgaacctggcccgggaagcatttcctgaagtctacaagctaagttaggatgctgtgcgtttaaactgtaaaccgcttgctcttacaggcttgccactctgctgttcttaagtcttcctacttcaggggtcttcaacccacaggccacagactggtactactccatgacctgttagaaaccaggccgcatgagcagtgaggaagcctcatctgtatttacagccactccccattgctcacattactgtctgggctccacctcctgtcagatcaatggtggtattagattctcataggaacgagaatcctattgtgaactgcacatgtgagggggctaggttgtgtgc

SEQ ID NO: 7935 - protein, 30 aa, Homo sapiens
MLAEKLPNLTHLNLSGNKLKDISTLEPLGH

SEQ ID NO: 7936 - DNA, 462 bp, Homo sapiens
cacagctgcagaactattcaagtcttttgaacgattacatatcaggaaaactgaattggtcattttgtgtcgtatatgcacagatggagcggctgccatggctggacggctttctggtttcactactcgagtcagagaggtcgcttctggataaggagaagatgaggaagacgaggacgatgaggatggtgaagaagaggagtttgatgaagaagatgatgaagatgaagatgtagaaggggatgaggacgacgatgaagtcagtgaggaggaagaagaatttggacttgatgaagaagatgaagatgaggatgaggatgaagaggaggaagaaggtgggaaaggtgaaaagaggaagagagaaacagatgatgaaggagaagatgattaagaccccagatgacctgcagaaacagaactgttcagtattggttggactgctcatggattttgtagctgttt

SEQ ID NO: 7937 - protein, 72 aa, Homo sapiens
MRTTMKSVRRKKNLDLMKKMKMRMRMKRRKKVGKVKRGREKQMMKEKMIKTPDDLQKQNCSVLVGLLMDFVA

SEQ ID NO: 7938 - DNA, 785 bp, Homo sapiens
cacagctgcagaactattcaagtcttttgaacgattacatatcaggaaaactgaattggtcattttgtgtcgtatatgcacagatggagcggctgccatggctggacggctttctggtttcactactcgagtcagagaggtcgcttctggataaggagaagatgaggaagacgaggacgatgaggatggtgaagaagaggagtttgatgaagaagatgatgaagatgaagatgtagaaggggatgaggacgacgatgaagtcagtgaggaggaagaagaatttggacttgatgaagaagatgaagatgaggatgaggatgaagaggaggaagaaggtgggaaaggtgaaaagaggaagagagaaacagatgatgaaggagaagatgattaagaccccagatgacctgcagaaacagaactgttcagtattggttggactgctcatggattttgtagctgtttaaaaaaaaaaaaaaggtagctgtgatacaaaccccaggacacccacccacccaaagagccaaagaatagttcctgtgacattccgccttccttccatgtagtccctcttggtaatctaccaccaagcttgtggacttcaccccaacaaaattgtaagcgttgttaggtttttgtgtaagattcttgctgtagcgtggatagctgtgattggtgagtcaaccgtctgtggctaccagttacactgagattgtaacagcatttttactttctgtacaacaaaaaagctttgtaaataaaatcttaacattttgggtctgtttttt

SEQ ID NO: 7939 - protein, 73 aa, Homo sapiens [sequence omitted]

SEQ ID NO: 7940 - DNA, 907 bp, Homo sapiens
cacagctgcagaactattcaagtcttttgaacgattacatatcaggaaaactgaattggtcattttgtgtcgtatatgcacagatggagcggctgccatggctggacggctttctggtttcactactcgagtcagagaggtcgcttctggataaggagaagatgaggaagacgaggacgatgaggatggtgaagaagaggagtttgatgaagaagatgatgaagatgaagatgtagaaggggatgaggacgacgatgaagtcagtgaggaggaagaagaatttggacttgatgaagaagatgaagatgaggatgaggatgaagaggaggaagaaggtgggaaaggtgaaaagaggaagagagaaacagatgatgaaggagaagatgattaagaccccagatgacctgcagaaacagaactgttcagtattggttggactgctcatggattttgtagctgtttaaaaaaaaaaaaaaggtagctgtgatacaaaccccaggacacccacccacccaaagagccaaagaatagttcctgtgacattccgccttccttccatgtagtccctcttggtaatctaccaccaagcttgtggacttcaccccaacaaaattgtaagcgttgttaggtttttgtgtaagattcttgctgtagcgtggatagctgtgattggtgagtcaaccgtctgtggctaccagttacactgagattgtaacagcatttttactttctgtacaacaaaaaagctttgtaaataaaatcttaacattttgggtctgttttttcatgctttgctttttaattattattattattttttttacattaggacattttatgtgacaactgccaaaaaagtatttttaagaatttaagcgaaataaacagttactctttggtaaagcct

SEQ ID NO: 7941 - protein, 73 aa, Homo sapiens [sequence omitted]

SEQ ID NO: 7942 - DNA, 2057 bp, Homo sapiens
cacagctgcagaactattcaagtcttttgaacgattacatatcaggaaaactgaattggtcattttgtgtcgtatatgcacagatggagcggctgccatggctggacggctttctggtttcactactcgagtcagagaggtcgcttctggataaggagaagatgaggaagacgaggacgatgaggatggtgaagaagaggagtttgatgaagaagatgatgaagatgaagatgtagaaggggatgaggacgacgatgaagtcagtgaggaggaagaagaatttggacttgatgaagaagatgaagatgaggatgaggatgaagaggaggaagaaggtgggaaaggtgaaaagaggaagagagaaacagatgatgaaggagaagatgattaagaccccagatgacctgcagaaacagaactgttcagtattggttggactgctcatggattttgtagctgtttaaaaaaaaaaaaaaggtagctgtgatacaaaccccaggacacccacccacccaaagagccaaagaatagttcctgtgacattccgccttccttccatgtagtccctcttggtaatctaccaccaagcttgtggacttcaccccaacaaaattgtaagcgttgttaggtttttgtgtaagattcttgctgtagcgtggatagctgtgattggtgagtcaaccgtctgtggctaccagttacactgagattgtaacagcatttttactttctgtacaacaaaaaagctttgtaaataaaatcttaacattttgggtctgttttttcatgctttgctttttaattattattattattttttttacattaggacattttatgtgacaactgccaaaaaagtatttttaagaatttaagcgaaataaacagttactctttggtaaagcctagttgtatgcttacatttttaaattatactctcattgtaagctcatgttaaaacaccaaagaactggtttatttggcatttttatattagtagttgttgaggggaattgcacaagtgtgtaggatctttgagcatttagatcaaatcctcattgataactgggagtaaatgaagcatactttaaaaaataacgttcaaaatggaatactctggggccctgaaaaccagtaaaatgttaggttcaagtattatgtgaattaagggaaagaagatagtgtaaagcaaaaggccttcaccagaatcccaagagatctgaattctagttctggctctgccactgattttctgtgtgaccttgtgttgactctgggtcaccacccagtctggaaaattgaaggggtgtgaccaaatggcttctgaagtcacttgtagcactgatgttctgtgacccttgctgacaggaaggtctgaagagaaaaatgggctttccactagtctgaagcatgtagggtttgactgatgggtgaacacagtatggtttgttgccaagacaggcgtgaaaagggggaatgacatgtgaaaagcctcaccaagcagtgggtaggcactgcctgaggtcaactcaggttttccataagatggaaattttctctattcttacagatcttaaagggatttgagaaaggaggatattctgtctgtattcagtgattaaccgtttagcgaaaatagatgtatgactgcattatcaatacagttttttatagtggaagatttaaggattgtttcagtaaattttagcttatagctgctggaatgagtgaggtttttgatgcatgtaaatgcaatatgtaaaattggaatctaatttgaatttataacaagtcacagtctctatggagcccccaaatactgtactttaaaatcaaaatctcccatagactttaaaatggagtttcttttttgcaaagaaaatccaagaaaatttgatttctgattttacaggtattacacatcattttccccaaccataaggccattttggcaaaccttcaatacattgtaaaatggtttcttctgtagcctaagtgtgtccttaaggttttgcttatttgtcaaatatcaaacacagtaactttgagtgattatt

SEQ ID NO: 7943 - protein, 73 aa, Homo sapiens [sequence omitted]

SEQ ID NO: 7944 - DNA, 1753 bp, Homo sapiens
agtttctgagcctagcctggctcaaaaggctccccagttcatggattgttcatttctcaactaaactcctttaaatttaattcagctgaagttttgctttcatcagatggggtcagaaacaggatctgaagtagagcttcttctaatgacccccaggggtgctgagtgatcaagcaaggtacctgcaggacccatttgtgtccattgatctcttggagcagctggggatcatgggcgcgctctccccatgctcctgagagcaggacatagactatgccctgcgcaggcagccgtccgcctcctgcagggaatgcttgctcctgggtgcacgcacggataccgcgatggtccgagaccacgctctgggacagcaagcctcaagcctcgcacaggagagggccgcggagcttcctcgacccgccccgccgcccttcccgcgggaggccccgcccccgccccccgccccgattggctgtcgggagagaggcggggcctaggggattggctgcccggcgaccgcgggctgacgtggcggggctggcgtgtgggtctcgcagcgttgctcacagaacagagtagaggcggcggcggcggcggccggacccagactggtagtgaggctttggaccccgagccgctgcaatgccgctggagctggagctgtgtcccgggcgctgggtgggcgggcaacacccgtgcttcatcattgccgagatcggccagaaccaccagggcgacctggacgtagccaagcgcatgatccgcatggccaaggagtgtggggctgattgtgctaagttccagaagagtgagctagaattcaagtttaatcggaaagccttggagaggccatacacctcgaagcattcctgggggaagacgtacggggagcacaaacgacatctggagttcagccatgaccagtacagggagctgcagaggtacgccgaggaggttgggatcttcttcactgcctctggcatggatgagatggcagttgaattcctgcatgaactgaatgttccatttttcaaagttggatctggagacactaataattttccttatctggaaaagacagccaaaaaaggtcgcccaatggtgatctccagtgggatgcagtcaatggacaccatgaagcaagtttatcagatcgtgaagcccctcaaccccaacttctgcttcttgcagtgtaccagcgcatacccgctccagcctgaggacgtcaacctgcgggtcatctcggaatatcagaagctctttcctgacattcccatagggtattctgggcatgaaacaggcatagcgatatctgtggccgcagtggctctgggggccaaggtgttggaacgtcacataactttggacaagacctggaaggggagtgaccactcggcctcgctggagcctggagaactggccgagctggtgcggtcagtgcgtcttgtggagcgtgccctgggctccccaaccaagcagctgctgccctgtgagatggcctgcaatgagaagctgggcaagtctgtggtggccaaagtgaaaattccggaaggcaccattctaacaatggacatgctcaccgtgaaggtgggtgagcccaaaggctatcctcctgaagacatctttaatctagtgggcaagaaggtcctggtcactgttgaagaggatgacaccatcatggaagaattggtagataatcatggcaaaaaaatcaagtcttaaaaataaagtgccattctctgaattctcagtt

SEQ ID NO: 7945 - protein, 359 aa, Homo sapiens; identical to SEQ ID NO: 1110

SEQ ID NO: 7946 - DNA, 671 bp, Homo sapiens
gcggcggcggcggcggccggacccagactggtagtgaggctttggaccccgagccgctgcaatgccgctggagctggagctgtgtcccgggcgctgggtgggcgggcaacacccgtgcttcatcattgccgagatcggccagaaccaccagggcgacctggacgtagccaagcgcatgatccgcatggccaaggagtgtggggctgattgtgctaagttccagaagagtgagctagaattcaagtttaatcggaaagccttggagaggccatacacctcgaagcattcctgggggaagacgtacggggagcacaaacgacatctggagttcagccatgaccagtacagggagctgcagaggtacgccgaggaggttgggatcttcttcactgcctctggcatggatgaggtgagtcctctgctgctctgtcatttgtcactttagcagaccaagggtcagcaggcagcctggtgacttccggcttagggccacctccagcccttgctcatcctttctgttcccagctactggagaggctagcaggcgccaaagcccagtgagaatctgtgggaaggatgccattgttttaaaaacacattgtctctggccgggcttgatggctcacacctgtaatcccggcactttgggagactgagggggatggatcacc

SEQ ID NO: 7947 - protein, 127 aa, Homo sapiens
MPLELELCPGRWVGGQHPCFIIAEIGQNHQGDLDVAKRMIRMAKECGADCAKFQKSELEFKFNRKALERPYTSKHSWGKTYGEHKRHLEFSHDQYRELQRYAEEVGIFFTASGMDEVSPLLLCHLSL

SEQ ID NO: 7948 - DNA, 1877 bp, Homo sapiens
ggcgggctgtcatcctcctaggggtcggccggccggcctggagccgccccgcccacggccgaggtttcggtttcccttgggagccccgccctgtgtcccggggagccggaggaggtggagatgaatggcgggcgcggcgaccgggagccggacccctgggaggtcggagcttgtcgagggatgcggctggcgctgcccggagcatggcgaccgcgtggctgagctcttctgtcgccgctgccgccgctgcgtgtgcgcgctttgcccggtgctgggcgcgcaccgtggccaccctgtgggcctggcgctggaggcagcggtgcacgtgcagaaactcagccaagaatgtttaaagcagctggcaatcaagaagcagcagcacattgacaacataacccagatagaagatgccaccgagaagctcaaggctaatgcagagtcaagtaaaacctggctgaaggggaaattcactgaactcagattactacttgacgaagaggaagcgctggccaagaaattcattgataaaaacacgcagcttaccctccaggtgtacagggaacaagctgactcttgcagagagcaacttgacatcatgaatgatctctccaacagggtctggagtatcagccaggagcccgatcctgtccagaggcttcaggcatacacggccaccgagcaggagatgcagcagcagatgagcctcggggagctgtgccatcccgtgcccctctcctttgagcccgtcaagagcttctttaagggcctcgtggaagccgtggagagtacattacagacgccattggacattcgccttaaggaaagcataaactgccagctctcagacccttccagcaccaagccaggtaccttgttgaaaaccagcccctcaccagagcgatcgctattgctgaaatacgcgcgcacgcccacgctggatcctgacacgatgcacgcgcgcctgcgcctgtccgccgatcgcctgacggtgcgctgcggcctgctgggcagcctggggcccgtgcccgtgctgcggttcgacgcgctctggcaagtgctggctcgtgactgcttcgccaccggccgccactactgggaggttgacgtgcaggaggcgggcgccggctggtgggtgggcgcggcctacgcctcccttcggcgccgcggggcctcggccgccgcccgcctgggctgcaaccgccagtcctggtgcctcaagcgctacgaccttgagtactgggccttccacgacggccagcgcagccgcctgcggccccgcgacgacctcgaccggctcggcgtcttcctggactacgaggccggcgtcctcgccttctacgacgtgacgggcggcatgagccacctgcataccttccgcgccacgttccaggagccgctctacccggccctgcggctctgggagggggccatcagcatcccccggctgccctaggggccaggaccggcgtgacagcctccagaatgtcatggaagcagaatcgtacagtatgttcccttctgcatatgctgctttctcactcagcatcatttccttgagatgcatccaggctgctgcacgcatcaatagttcattcctggctgggcgcggtggctcacgcctgtaatcccagcgctttgggaggccgatgtgggtggatcacaaggtcaggagtttgagactagcctggccaagatggtgaaaccccatctctgcaaaaaatacaaaaattagccgggcaccatggcatgtgcctgtaatccctgctactcaggaggctgaggaaggagaatcacttgaacccgggcagcggaggttgcagtgagccgagatcacaccactgcactccagcctgggcaatagagtgagactccgtttc

SEQ ID NO: 7949 - protein, 442 aa, Homo sapiens; identical to SEQ ID NO: 1112

SEQ ID NO: 7950 - DNA, 900 bp, Homo sapiens
cgcgcgcctgcgcctgtccgccgatcgcctgacggtgcgctgcggcctgctgggcagcctggggcccgtgcccgtgctgcggttcgacgcgctctggcaagtgctggctcgtgactgcttcgccaccggccgccactactgggaggttgacgtgcaggaggcgggcgccggctggtgggtgggcgcggcctacgcctcccttcggcgccgcggggcctcggccgccgcccgcctgggctgcaaccgccagtcctggtgcctcaagcgctacgaccttgagtactgggccttccacgacggccagcgcagccgcctgcggccccgcgacgacctcgaccggctcggcgtcttcctggactacgaggccggcgtcctcgccttctacgacgtgacgggcggcatgagccacctgcataccttccgcgccacgttccaggagccgctctacccggccctgcggctctgggagggggccatcagcatcccccggctgccctaggggccaggaccggcgtgacagcctccagaatgtcatggaagcagaatcgtacagtatgttcccttctgcatatgctgctttctcactcagcatcatttccttgagatgcatccaggctgctgcacgcatcaatagttcattcctggctgggcgcggtggctcacgcctgtaatcccagcgctttgggaggccgatgtgggtggatcacaaggtcaggagtttgagactagcctggccaagatggtgaaaccccatctctgcaaaaaatacaaaaattagccgggcaccatggcatgtgcctgtaatccctgctactcaggaggctgaggaaggagaatcacttgaacccgggcagcggaggttgcagtgagccgagatcacaccactgcactccagcctgg

SEQ ID NO: 7951 - protein, 45 aa, Homo sapiens
MEAESYSMFPSAYAAFSLSIISLRCIQAAARINSSFLAGRGGSRL

SEQ ID NO: 7952 - DNA, 3038 bp, Homo sapiens
cttgaaaattacagaattccatgcagattttacagcctctgtaggtaagctttcacaaggtgtttttctgcacttgtcccccctccttgccccgatcgctctgcccctctcttgggggggtttctgcttctgtttatgccctggtgggccacaccacactcccacaagatgaacattatacaaaagaaaactcagtggaaggttccttctttaaacagaaagcactctcttcatctgccaaatgaagtgagaagggtaggaaaattagattttattgaaaaaatatatttaaaactgatgttttttcagttctgtcttagggctagttagcagtgttatgagacacaaacaggaaggagtgaggtggaaaggtatggaaggtactgggcatggcagctgaagcttgcaaccccagcactgtgggaggccagggtgggacaactgcttgaggtcaggagtttgagaacagcccgggcaacatagcaagaccccatctccacagcaaattaaaaaaaaaaaaaaattagccacatgtggtggcacgtgcttgtggtcccagctacttgggagactgaggcaggaggattgcttgaccccaggagtttgagaccagtctgggcaacatagcaagaccccgtctctaccacaaaagaaaagaaaaagatggaaggggaaaagagaagagttaaaaataaagcagaggaagagcagtgagaaaggtgaaggaagggaggaaaggaaggaaacggtgggagggagggaggaaggaaagggagagagggagggaaggaaagggaggaaggaaagggaggaaagggagggagggaggaaggaagggagggagggaaggagacaggaagggaggtaggttggttggtccgtcggtccgtcggtcctagaccaatcagagtttgcatttcatttcagcaacttccctgggagagggaaagatttgtgcccatgtgatcaagtgtgagcaactcactaagccctaacttatttctgagtcaccattcagagacattgattttttcgacttttgatttccaacttcaaaacaaaacaaagggactcaagaaaacttttgaaggtgatgtgtatgtttattactcttgtgctgatggtagcagtagtgtatacttaagtcccaactcaccaaattacattatgtgcagtttttagtatatcaattacaccttactgaagctggaaagaaatgataataaaaagtttttgagttcttataatttgacagcaaactgagattttactcttataacttgtgatccactgattccttcagcaagcatttgctgacatttaccaatttcctgagtcttgttgatgaatactagagaaggatgttgaagagcactaaataggtaacctcaagcagtgacgttatatctgaaaaaagtgactgaggttcacttttaagtaggcagcgtgctttgaggcctgaaagggctcgggttgaatgggccctgccagccatggatccttatgtagaggctgggcaaaaaaatgctccattttccccctttcgccaagaattgaaatagccccttttcctgctcgtttggccgagtagaagggaaagcctttgaggctattcatgttttcactgcctggttttctgggtcaggattaggtcatgaccgtttcatgtttgttcatttggccttgggcccctggggcaggtagggtctggccaggggaaaggttcttttccagattcttttttttttttgagatggagtctcgctctgtggcccaggctggagtgcagtggcatgatctcagctcactgcaacctccgcctcccaggttcaagtgattctcctgcctcagccttctgagtagctgggatcacaggtgcccgccaccacacccggctaatttttatatttttagtagagacggggtttcaccatgttggtcaggctagtctcaaactcctgacctcaggtgatctgcccgcctcggcctcccaaagtgcaggcatgagccaccacgcccagcccttttccagattcctgtagccagcaaagaccagcaccaaacgtttgttgggctaatggatgggtggatgcaaatgaatgtttgcatttgaatgaaatgactgagaacaaatctttgcctgctttcaagttgctgagcgtccctctactgcctaagatgaggggtttttctacttgtatgttattccttgcctgtcataacaacagtgtttttggacaatggtgaaaaggagctccctctttgatttttgtagatggcagttgaattcctgcatgaactgaatgttccatttttcaaagttggatctggagacactaataattttccttatctggaaaagacagccaaaaaaggtcgcccaatggtgatctccagtgggatgcagtcaatggacaccatgaagcaagtttatcagatcgtgaagcccctcaaccccaacttctgcttcttgcagtgtaccagcgcatacccgctccagcctgaggacgtcaacctgcgggtcatctcggaatatcagaagctctttcctgacattcccatagggtattctgggcatgaaacaggcatagcgatatctgtggccgcagtggctctgggggccaaggtgttggaacgtcacataactttggacaagacctggaaggggagtgaccactcggcctcgctggagcctggagaactggccgagctggtgcggtcagtgcgtcttgtggagcgtgccctgggctccccaaccaagcagctgctgccctgtgagatggcctgcaatgagaagctgggcaagtctgtggtggccaaagtgaaaattccggaaggcaccattctaacaatggacatgctcaccgtgaaggtgggtgagcccaaaggctatcctcctgaagacatctttaatctagtgggcaagaaggtcctggtcactgttgaagaggatgacaccatcatggaagaattggtagataatcatggcaaaaaaatcaagtcttaaaaataaagtgccattctctgaattctcagtt

SEQ ID NO: 7953 - protein, 243 aa, Homo sapiens
MAVEFLHELNVPFFKVGSGDTNNFPYLEKTAKKGRPMVISSGMQSMDTMKQVYQIVKPLNPNFCFLQCTSAYPLQPEDVNLRVISEYQKLFPDIPIGYSGHETGIAISVAAVALGAKVLERHITLDKTWKGSDHSASLEPGELAELVRSVRLVERALGSPTKQLLPCEMACNEKLGKSVVAKVKIPEGTILTMDMLTVKVGEPKGYPPEDIFNLVGKKVLVTVEEDDTIMEELVDNHGKKIKS

SEQ ID NO: 7954 - DNA, 2392 bp, Homo sapiens
ataacggccgaggagggggcgtgcctggccgtggccagtggcgggttacaacctggaaaccaaaggtgccccagagggcgtctaagcggtcgaccgaaagttcagagcgggagcctgagacccaaggaagggcaaaggcgagccaaagccatcagttgagcttcagaaaagtcccacttgaaaggctggaaaagcaagtcacaggcaagacttgtcctagataaagtaaagtgtgaggaaggggtgcaaatcaagattagaggcatacctgatgtggacctccgaggatcagagatgtcctagtcccagctcatccaccaacttgccatatgactttgggcaagttacctcaccttcagatgcctccattggaaaagaatacaagggaagcgctggccaagaaattcattgataaaaacacgcagcttaccctccaggtgtacagggaacaagctgactcttgcagagagcaacttgacatcatgaatgatctctccaacagggtctggagtatcagccaggagcccgatcctgtccagaggcttcaggcatacacggccaccgagcaggagatgcagcagcagatgagcctcggggagctgtgccatcccgtgcccctctcctttgagcccgtcaagagcttctttaagggcctcgtggaagccgtggagagtacattacagacgccattggacattcgccttaaggaaagcataaactgccagctctcagacccttccagcaccaagccaggtaccttgttgaaaaccagcccctcaccagagcgatcgctattgctgaaatcggcctgctgggcagcctggggcccgtgcccgtgctgcggttcgacgcgctctggcaagtgctggctcgtgactgcttcgccaccggccgccactactgggaggttgacgtgcaggaggcgggcgccggctggtgggtgggcgcggcctacgcctcccttcggcgccgcggggcctcggccgccgcccgcctgggctgcaaccgccagtcctggtgcctcaagcgctacgaccttgagtactgggccttccacgacggccagcgcagccgcctgcggccccgcgacgacctcgaccggctcggcgtcttcctggactacgaggccggcgtcctcgccttctacgacgtgacgggcggcatgagccacctgcataccttccgcgccacgttccaggagccgctctacccggccctgcggctctgggagggggccatcagcatcccccggctgccctaggggccaggaccggcgtgacagcctccagataaggaaaattattagtgtctccagatccaactttgaaaaatggaacattcagttcatgcaggaattcaactgccatctacaaaaatcaaagagggagctccttttcaccattgtccaaaaacactgttgttatgacaggcaaggaataacatacaagtagaaaaacccctcatcttaggcagtagagggacgctcagcaacttgaaagcaggcaaagatttgttctcagtcatttcattcaaatgcaaacattcatttgcatccacccatccattagcccaacaaacgtttggtgctggtctttgctggctacaggaatctggaaaagggctgggcgtggtggctcatgcctgcactttgggaggccgaggcgggcagatcacctgaggtcaggagtttgagactagcctgaccaacatggtgaaaccccgtctctactaaaaatataaaaattagccgggtgtggtggcgggcacctgtgatcccagctactcagaaggctgaggcaggagaatcacttgaacctgggaggcggaggttgcagtgagctgagatcatgccactgcactccagcctgggccacagagcgagactccatctcaaaaaaaaaaaagaatctggaaaagaacctttcccctggccagaccctacctgccccaggggcccaaggccaaatgaacaaacatgaaacggtcatgacctaatcctgacccagaaaaccaggcagtgaaaacatgaatagcctcaaaggctttcccttctactcggccaaacgagcaggaaaaggggctatttcaattcttggcgaaagggggaaaatggagcatttttttgcccagcctctacataaggatccatggctggcagggcccattcaacccgagccctttcaggcctcaaagcacgctgcctacttaaaagtgaacctcagtcacttttttcagatataacgtcactgcttgaggttacctatttagtgctcttcaacatccttctctagtattcatcaacaagactcaggaaattggtaaatgtcagcaaatgcttgctgaaggaatcagtggatcacaagttataagagtaaaatctcagtttgctgtc

SEQ ID NO: 7955 - protein, 274 aa, Homo sapiens
MTLGKLPHLQMPPLEKNTREALAKKFIDKNTQLTLQVYREQADSCREQLDIMNDLSNRVWSISQEPDPVQRLQAYTATEQEMQQQMSLGELCHPVPLSFEPVKSFFKGLVEAVESTLQTPLDIRLKESINCQLSDPSSTKPGTLLKTSPSPERSLLLKSACWAAWGPCPCCGSTRSGKCWLVTASPPAATTGRLTCRRRAPAGGWARPTPPFGAAGPRPPPAWAATASPGASSATTLSTGPSTTASAAACGPATTSTGSASSWTTRPASSPSTT

SEQ ID NO: 7956 - DNA, 983 bp, Homo sapiens
tttttctacttgtatgttattccttgcctgtcataacaacagtgtttttggacaatggtgaaaaggagctccctctttgatttttgtagatggcagttgaattcctgcatgaactgaatgttccatttttcaaagttggatctggagacactaataattttccttatctggaaaagacagccaaaaaaggggctggcacagtgttttaagagatgtctgtggagttcagttgaatgatgagaccagcagttgggatgtgttggggagagtcagaacctctaaagagaaagtgctgatggtgttggtgctggattactcaggtcgcccaatggtgatctccagtgggatgcagtcaatggacaccatgaagcaagtttatcagatcgtgaagcccctcaaccccaacttctgcttcttgcagtgtaccagcgcatacccgctccagcctgaggacgtcaacctgcgggtcatctcggaatatcagaagctctttcctgacattcccatagggtattctgggcatgaaacaggcatagcgatatctgtggccgcagtggctctgggggccaaggtgttggaacgtcacataactttggacaagacctggaaggggagtgaccactcggcctcgctggagcctggagaactggccgagctggtgcggtcagtgcgtcttgtggagcgtgccctgggctccccaaccaagcagctgctgccctgtgagatggcctgcaatgagaagctgggcaagtctgtggtggccaaagtgaaaattccggaaggcaccattctaacaatggacatgctcaccgtgaaggtgggtgagcccaaaggctatcctcctgaagacatctttaatctagtgggcaagaaggtcctggtcactgttgaagaggatgacaccatcatggaagaattggtagataatcatggcaaaaaaatcaagtcttaaaaataaagtgccattctctgaattctcagtt

SEQ ID NO: 7957 - protein, 218 aa, Homo sapiens
MVLVLDYSGRPMVISSGMQSMDTMKQVYQIVKPLNPNFCFLQCTSAYPLQPEDVNLRVISEYQKLFPDIPIGYSGHETGIAISVAAVALGAKVLERHITLDKTWKGSDHSASLEPGELAELVRSVRLVERALGSPTKQLLPCEMACNEKLGKSVVAKVKIPEGTILTMDMLTVKVGEPKGYPPEDIFNLVGKKVLVTVEEDDTIMEELVDNHGKKIKS

SEQ ID NO: 7958 - DNA, 284 bp, Homo sapiens
gtggctctgggggccaaggtgttggaacgtcacataactttggacaagacctggaaggggagtgaccactcggcctcgctggagcctggagaactggccgagctggtgcggtcagtgcgtcttgtggagccccaaaggctatcctcctgaagacatctttaatctagtgggcaagaaggtcctggtcactgttgaagaggatgacaccatcatggaagaattggtagataatcatggcaaaaaaatcaagtcttaaaaataaagtgccattctctgaattctca

SEQ ID NO: 7959 - protein, 49 aa, Homo sapiens
VALGAKVLERHITLDKTWKGSDHSASLEPGELAELVRSVRLVEPQRLSS

SEQ ID NO: 7960 - DNA, 3496 bp, Homo sapiens
ggcagacagaaccttgcaaacaccttaacttctaaccaaagactttaaaactctggctggacagagttttaagcactatgctgcaggaatcctgagaaaaaggggaaattaattctattaggaatggcccaaactgaattgtgacaggcagagggtgttcctgacagagggaagatgaatacacttgaccccaacatttctgcccatccctgatgaccaagacctcttcccagacccacagctgcaggggccaagtaataacagctcttaatagtttataatgcactgttttaatgctttacgactaaactcatctgatcctttcatcagccctagagggtagaaagttttcccaattctacacatggcaaaatggagacccagagtcacttgcccaaggtcgcacagctagtggtggagctggagtctgggcccaggctgtgagttccaggtctgtgctcatggccaccaggccctactgctcagggtgaatgcagctggtctctggccagtgcctggtgctctggcccctctcgtggagctactgcccatgatgtgcactccagcctggggacagagcaagactcttgtctcaaaaaaaacaaaaaaaacatatatactgctgtatcatgccaggatttatcagcattcccaagggagcttgcacggtactgaccgagtgctgagactactggtattcccagctgccatgtggcagcagcaggagctactagaatattctcagcacaggaatgaggcttccttggtttccatgtctgtaagggttactgatcacttaccttcttctctttcagacttgaatctgtagacatttctttattgatatggcaaattgcttgcagatatttttaaatgacagcaattttctaatatttggtttaataaaatgtgaataatgtcccttttaaccatggtcttcactgggagttcatgttgcttcaagtccctagcacccagtgatacccccacaggtaagccctcagcatcctgaatacatcatccgcagcctgggaaccttctccctcgtacagcacaggaacctgacacatagtaggcacacagtaaacatttgtgaatgaatgggagtcatccagtcctgactcttctgtctcttgaggtcccttgaatcttccgcttcctccccaccgatttcagcgtgtccacatcacagctccctccagttcatgttgcttcaagtccctagcacccagacccagaagggcctttactcatatcttattccttacgcagccttctggtagtagtcagctgctccctgattaactatctccagggatggggcattcactgcttctgaagataactcattaaagttctcacttacgtgtaaacaaaccctgactcccacctgttcccatccaagatcgtattatagcttgaactcctggtctcaagcaatcctcccacctcagcctcctaagtagttgggattacaggctcacacaagcacgcctggctcacataccaccttctaacatattgtgtgactgaatcactatgctatggatttttatgcatctgcccccatctgaatggaagttctctgaggaagggattggggcttgttcatggccatatactctgtgcctaaagcagtgcctggcacaaagatggccctcaatatttgttcagagaaggaacacatgccatttccctctctttgctctgaaaggagtgctttcagcattttctgcctacaagatcctttgaccagtcctttctctgatgtggagtgactgctatacaatgccaactaaacacagaggccaagggcaggaaagggataaagacaatggagaagtaaagggctgtaaggaagtgagaatgaaggcttaaaggaaaggacatgtgcagccagctctcacccctctctgcagccacccagcaactggaggatatggactttgtttggaaccaccccttcttctggtgctctgtttataatgcactgttggccagtgcactaagctggccaacttgaaggagagattgcatcactggatctttttctgtctccagtgggctgacacagggcctagcccagaaacatctgctgtctaaggagcaggtggaggtggatgacagccaggtccctggagaccgccattcctgccctcgcctcactcaaacacacctgacagcatcagcaagggaactgagaattcagagaatggcactttatttttaagacttgatttttttgccatgattatctaccaattcttccatgatggtgtcatcctcttcaacagtgaccaggaccttcttgcccactagattaaagatgtcttcaggaggatagcctttgggctcacccaccttcacggtgagcatgtccattgttagaatggtgccttccggaattttcactttggccaccacagacttgcccagctgtggacaaaatgaacattcagtgccagcttcacagaagtaactagtgcacactactttactttacactcaaggtccctgatcagtcttccccaggcagtaccttgggagcaggcactctgttgccccctacactgctcagaatatctcatacatggcaggaattcaaccagtatagattgaattcagagactcagaggaggagcctttacaacaaagtgcaaaggaaagggctgaggctatgtaggcggagccaggttcaaatcccagtctgtggggtataggccacgttttagtttctctgtcaaatggaaacttatcctgtcagatgactgtaaggattggtgatattacagaatgtacgtggaacatagaatgctctcaatacatgcaaactctgattcttttggttaccattcagctcagtatctcattgtaaacatggggaaactgaggcccatacagggtgggtgacttggccagggttgcagacagccaagatgaaacataacatagggatgagattcttaactcctgacacaccgttctccagggcacacaccttaccgccactttgtttggtaaaatagaaatatgaaggactcataagatggtgaatgtggctgttatgcagatggcaagaaaaggagcccccgaggaaggggcagataatacaggcagatgagggaatgaagggtacctgaagctcatgaccagtgtttgtcttctctataaatgctttcaaataaattacgtgttttattactctatatcctccacgtaagagtacaaggaatcaattctgcttggaatgtggtgccaggaaaaaatgtcaagtgataatcatgcatcctgttatgttttactgtctgctcagagagccaaattaagtgctcagctgttataaatcttactctggtttctggtctaattctctcctgtttcctctataaagaaactatttctttttactttattttaatttcctggtatagatgcatctttgatttggggaagcaggtaggccccactagaataaaaggtgacaacagtcccaggc

SEQ ID NO: 7961 - protein, 92 aa, Homo sapiens
MMCTPAWGQSKTLVSKKTKKTYILLYHARIYQHSQGSLHGTDRVLRLLVFPAAMWQQQELLEYSQHRNEASLVSMSVRVTDHLPSSLSDLNL

SEQ ID NO: 7962 - DNA, 2309 bp, Homo sapiens
cgcgcgcctgcgcctgtccgccgatcgcctgacggtgcgctgcggcctgctgggcagcctggggcccgtgcccgtgctgcggttcgacgcgctctggcaagtgctggctcgtgactgcttcgccaccggccgccactactgggaggttgacgtgcaggaggcgggcgccggctggtgggtgggcgcggcctacgcctcccttcggcgccgcggggcctcggccgccgcccgcctgggctgcaaccgccagtcctggtgcctcaagcgctacgaccttgagtactgggccttccacgacggccagcgcagccgcctgcggccccgcgacgacctcgaccggctcggcgtcttcctggactacgaggccggcgtcctcgccttctacgacgtgacgggcggcatgagccacctgcataccttccgcgccacgttccaggagccgctctacccggccctgcggctctgggagggggccatcagcatcccccggctgccctaggggccaggaccggcgtgacagcctccaggagtgctttcagcattttctgcctacaagatcctttgaccagtcctttctctgatgtggagtgactgctatacaatgccaactaaacacagaggccaagggcaggaaagggataaagacaatggagaagtaaagggctgtaaggaagtgagaatgaaggcttaaaggaaaggacatgtgcagccagctctcacccctctctgcagccacccagcaactggaggatatggactttgtttggaaccaccccttcttctggtgctctgtttataatgcactgttggccagtgcactaagctggccaacttgaaggagagattgcatcactggatctttttctgtctccagtgggctgacacagggcctagcccagaaacatctgctgtctaaggagcaggtggaggtggatgacagccaggtccctggagaccgccattcctgccctcgcctcactcaaacacacctgacagcatcagcaagggaactgagaattcagagaatggcactttatttttaagacttgatttttttgccatgattatctaccaattcttccatgatggtgtcatcctcttcaacagtgaccaggaccttcttgcccactagattaaagatgtcttcaggaggatagcctttgggctcacccaccttcacggtgagcatgtccattgttagaatggtgccttccggaattttcactttggccaccacagacttgcccagctgtggacaaaatgaacattcagtgccagcttcacagaagtaactagtgcacactactttactttacactcaaggtccctgatcagtcttccccaggcagtaccttgggagcaggcactctgttgccccctacactgctcagaatatctcatacatggcaggaattcaaccagtatagattgaattcagagactcagaggaggagcctttacaacaaagtgcaaaggaaagggctgaggctatgtaggcggagccaggttcaaatcccagtctgtggggtataggccacgttttagtttctctgtcaaatggaaacttatcctgtcagatgactgtaaggattggtgatattacagaatgtacgtggaacatagaatgctctcaatacatgcaaactctgattcttttggttaccattcagctcagtatctcattgtaaacatggggaaactgaggcccatacagggtgggtgacttggccagggttgcagacagccaagatgaaacataacatagggatgagattcttaactcctgacacaccgttctccagggcacacaccttaccgccactttgtttggtaaaatagaaatatgaaggactcataagatggtgaatgtggctgttatgcagatggcaagaaaaggagcccccgaggaaggggcagataatacaggcagatgagggaatgaagggtacctgaagctcatgaccagtgtttgtcttctctataaatgctttcaaataaattacgtgttttattactctatatcctccacgtaagagtacaaggaatcaattctgcttggaatgtggtgccaggaaaaaatgtcaagtgataatcatgcatcctgttatgttttactgtctgctcagagagccaaattaagtgctcagctgttataaatcttactctggtttctggtctaattctctcctgtttcctctataaagaaactatttctttttactttattttaatttcctggtatagatgcatctttgatttggggaagcaggtaggccccactagaataaaaggtgacaacagtcccaggc

SEQ ID NO: 7963 - protein, 44 aa, Homo sapiens
MCSQLSPLSAATQQLEDMDFVWNHPFFWCSVYNALLASALSWPT

SEQ ID NO: 7964 - DNA, 4162 bp, Homo sapiens
ggcgggctgtcatcctcctaggggtcggccggccggcctggagccgccccgcccacggccgaggtttcggtttcccttgggagccccgccctgtgtcccggggagccggaggaggtggagatgaatggcgggcgcggcgaccgggagccggacccctgggaggtcggagcttgtcgagggatgcggctggcgctgcccggagcatggcgaccgcgtggctgagctcttctgtcgccgctgccgccgctgcgtgtgcgcgctttgcccggtgctgggcgcgcaccgtggccaccctgtgggcctggcgctggaggcagcggtgcacgtgcagaaactcagccaagaatgtttaaagcagctggcaatcaagaagcagcagcacattgacaacataacccagatagaagatgccaccgagaagctcaaggctaatgcagagtcaagtaaaacctggctgaaggggaaattcactgaactcagattactacttgacgaagaggaagcgctggccaagaaattcattgataaaaacacgcagcttaccctccaggtgtacagggaacaagctgactcttgcagagagcaacttgacatcatgaatgatctctccaacagggtctggagtatcagccaggagcccgatcctgtccagaggcttcaggcatacacggccaccgagcaggagatgcagcagcagatgagcctcggggagctgtgccatcccgtgcccctctcctttgagcccgtcaagagcttctttaagggcctcgtggaagccgtggagagtacattacagacgccattggacattcgccttaaggaaagcataaactgccagctctcagacccttccagcaccaagccaggtaccttgttgaaaaccagcccctcaccagagcgatcgctattgctgaaatacgcgcgcacgcccacgctggatcctgacacgatgcacgcgcgcctgcgcctgtccgccgatcgcctgacggtgcgctgcggcctgctgggcagcctggggcccgtgcccgtgctgcggttcgacgcgctctggcaagtgctggctcgtgactgcttcgccaccggccgccactactgggaggttgacgtgcaggaggcgggcgccggctggtgggtgggcgcggcctacgcctcccttcggcgccgcggggcctcggccgccgcccgcctgggctgcaaccgccagtcctggtgcctcaagcgctacgaccttgagtactgggccttccacgacggccagcgcagccgcctgcggccccgcgacgacctcgaccggctcggcgtcttcctggactacgaggccggcgtcctcgccttctacgacgtgacgggcggcatgagccacctgcataccttccgcgccacgttccaggagccgctctacccggccctgcggctctgggagggggccatcagcatcccccggctgccctaggggccaggaccggcgtgacagcctccagacttgaatctgtagacatttctttattgatatggcaaattgcttgcagatatttttaaatgacagcaattttctaatatttggtttaataaaatgtgaataatgtcccttttaaccatggtcttcactgggagttcatgttgcttcaagtccctagcacccagtgatacccccacaggtaagccctcagcatcctgaatacatcatccgcagcctgggaaccttctccctcgtacagcacaggaacctgacacatagtaggcacacagtaaacatttgtgaatgaatgggagtcatccagtcctgactcttctgtctcttgaggtcccttgaatcttccgcttcctccccaccgatttcagcgtgtccacatcacagctccctccagttcatgttgcttcaagtccctagcacccagacccagaagggcctttactcatatcttattccttacgcagccttctggtagtagtcagctgctccctgattaactatctccagggatggggcattcactgcttctgaagataactcattaaagttctcacttacgtgtaaacaaaccctgactcccacctgttcccatccaagatcgtattatagcttgaactcctggtctcaagcaatcctcccacctcagcctcctaagtagttgggattacaggctcacacaagcacgcctggctcacataccaccttctaacatattgtgtgactgaatcactatgctatggatttttatgcatctgcccccatctgaatggaagttctctgaggaagggattggggcttgttcatggccatatactctgtgcctaaagcagtgcctggcacaaagatggccctcaatatttgttcagagaaggaacacatgccatttccctctctttgctctgaaaggagtgctttcagcattttctgcctacaagatcctttgaccagtcctttctctgatgtggagtgactgctatacaatgccaactaaacacagaggccaagggcaggaaagggataaagacaatggagaagtaaagggctgtaaggaagtgagaatgaaggcttaaaggaaaggacatgtgcagccagctctcacccctctctgcagccacccagcaactggaggatatggactttgtttggaaccaccccttcttctggtgctctgtttataatgcactgttggccagtgcactaagctggccaacttgaaggagagattgcatcactggatctttttctgtctccagtgggctgacacagggcctagcccagaaacatctgctgtctaaggagcaggtggaggtggatgacagccaggtccctggagaccgccattcctgccctcgcctcactcaaacacacctgacagcatcagcaagggaactgagaattcagagaatggcactttatttttaagacttgatttttttgccatgattatctaccaattcttccatgatggtgtcatcctcttcaacagtgaccaggaccttcttgcccactagattaaagatgtcttcaggaggatagcctttgggctcacccaccttcacggtgagcatgtccattgttagaatggtgccttccggaattttcactttggccaccacagacttgcccagctgtggacaaaatgaacattcagtgccagcttcacagaagtaactagtgcacactactttactttacactcaaggtccctgatcagtcttccccaggcagtaccttgggagcaggcactctgttgccccctacactgctcagaatatctcatacatggcaggaattcaaccagtatagattgaattcagagactcagaggaggagcctttacaacaaagtgcaaaggaaagggctgaggctatgtaggcggagccaggttcaaatcccagtctgtggggtataggccacgttttagtttctctgtcaaatggaaacttatcctgtcagatgactgtaaggattggtgatattacagaatgtacgtggaacatagaatgctctcaatacatgcaaactctgattcttttggttaccattcagctcagtatctcattgtaaacatggggaaactgaggcccatacagggtgggtgacttggccagggttgcagacagccaagatgaaacataacatagggatgagattcttaactcctgacacaccgttctccagggcacacaccttaccgccactttgtttggtaaaatagaaatatgaaggactcataagatggtgaatgtggctgttatgcagatggcaagaaaaggagcccccgaggaaggggcagataatacaggcagatgagggaatgaagggtacctgaagctcatgaccagtgtttgtcttctctataaatgctttcaaataaattacgtgttttattactctatatcctccacgtaagagtacaaggaatcaattctgcttggaatgtggtgccaggaaaaaatgtcaagtgataatcatgcatcctgttatgttttactgtctgctcagagagccaaattaagtgctcagctgttataaatcttactctggtttctggtctaattctctcctgtttcctctataaagaaactatttctttttactttattttaatttcctggtatagatgcatctttgatttggggaagcaggtaggccccactagaataaaaggtgacaacagtcccaggc

SEQ ID NO: 7965 - protein, 442 aa, Homo sapiens; identical to SEQ ID NO: 1112

SEQ ID NO: 7966 - DNA, 7137 bp, Homo sapiens
ggcgggctgtcatcctcctaggggtcggccggccggcctggagccgccccgcccacggccgaggtttcggtttcccttgggagccccgccctgtgtcccggggagccggaggaggtggagatgaatggcgggcgcggcgaccgggagccggacccctgggaggtcggagcttgtcgagggatgcggctggcgctgcccggagcatggcgaccgcgtggctgagctcttctgtcgccgctgccgccgctgcgtgtgcgcgctttgcccggtgctgggcgcgcaccgtggccaccctgtgggcctggcgctggaggcagcggtgcacgtgcagaaactcagccaagaatgtttaaagcagctggcaatcaagaagcagcagcacattgacaacataacccagatagaagatgccaccgagaagctcaaggctaatgcagagtcaagtaaaacctggctgaaggggaaattcactgaactcagattactacttgacgaagaggaagcgctggccaagaaattcattgataaaaacacgcagcttaccctccaggtgtacagggaacaagctgactcttgcagagagcaacttgacatcatgaatgatctctccaacagggtctggagtatcagccaggagcccgatcctgtccagaggcttcaggcatacacggccaccgagcaggagatgcagcagcagatgagcctcggggagctgtgccatcccgtgcccctctcctttgagcccgtcaagagcttctttaagggcctcgtggaagccgtggagagtacattacagacgccattggacattcgccttaaggaaagcataaactgccagctctcagacccttccagcaccaagccaggtaccttgttgaaaaccagcccctcaccagagcgatcgctattgctgaaatacgcgcgcacgcccacgctggatcctgacacgatgcacgcgcgcctgcgcctgtccgccgatcgcctgacggtgcgctgcggcctgctgggcagcctggggcccgtgcccgtgctgcggttcgacgcgctctggcaagtgctggctcgtgactgcttcgccaccggccgccactactgggaggttgacgtgcaggaggcgggcgccggctggtgggtgggcgcggcctacgcctcccttcggcgccgcggggcctcggccgccgcccgcctgggctgcaaccgccagtcctggtgcctcaagcgctacgaccttgagtactgggccttccacgacggccagcgcagccgcctgcggccccgcgacgacctcgaccggctcggcgtcttcctggactacgaggccggcgtcctcgccttctacgacgtgacgggcggcatgagccacctgcataccttccgcgccacgttccaggagccgctctacccggccctgcggctctgggagggggccatcagcatcccccggctgccctaggggccaggaccggcgtgacagcctccaggtacgccgcagctgcccagtctcgcctaatctacctagatcagcgtggctggtccccttactgcctgcttcttagggccctctccctgccccagctttccccgaccaatcacgcctacagtgctttgaaggtttcctctcctaggctagtttcaaacaggccctaaacaagtctgctgctgccctctcatcagacctccgcaccctcaccccaccatcacttacactactttaatccagttccttcaaagtgatacccccacaggtaagccctcagcatcctgaatacatcatccgcagcctgggaaccttctccctcgtacagcacaggaacctgacacatagtaggcacacagtaaacgtttgtgaatgaatgggagtcatccagtcctgactcttctgtctcttgaggtcccttgaatcttccgcttcctccccaccgatttcagcgtgtccacatcacagctccctccagaagctgcaagagcttcttagcagttcctggtctgaaccctctcccagtcctcatcttccaccctaaaactagagtgatcttcctaaaacttcacttaacccctcagctatgaaaaggcttccaggagtttccatgaaataacaaaaaaaaatacaagcgcctcaccttagcattcaaggcttgtctagtctgcccaaaattacttatcctcacctagctcctaccactcttcttagagactctccagtcagaaatgtgtcgcatagttccacctccacacctctctgctgccagcacattcatgcagaaaagtcttttcacctgtctcagtcttccgcaggcttacctgcgccaggaagtctaaccaaggaacaagaatctcactatcagagccacaaatctgggacctgtctttccaactaaattggaggctttggaagggcagctttgtcctatactctctccaccctgaaaagttcccagaaagccccttccctcccaagcagtgaattaataaccagcaggtgcctatcactgagtaacagaagagctgagttaggcgggcctcacaggtcacccagccagatctcatctggggagtctgaggtcctgaaagaaagcagagctgcgtaaagttaccccggggtgatataggggggccagacgtgtgccccgttcacccacccccaggcaagcatctgacctgtcccctggcccagcccttaggcccagctttcaacctgcttactcatttctcaggggattttgggaaggaatcagcaggtgacagttgctaagcaaccaaagggggtggtgtttcccaactgtcttgggacaaaaagggtaagagcacccttagatccagatgttgccaaggaaacccagagtgcccagctgtctggaatgaagtgacagaggtagaaaacagtaggccctcacaggaggccaccttcgctagcagggagtgggaggcttctttccagggatttgtgtctccgttctgaaggttctgcgtcctgttttgtcaattccctagacggttttgaagttatattctgttaaagcatcttcataggtgcttggtgggaggccaaggtcgccgaatcctcgtggtttaaatagactttcagtgcattagtttgaaccatataaaactgacaattttcaatagtttttgagttaaaaatggcacttttgatatgagacaatgtagcagaataccaggcagacagaaccttgcaaacaccttaacttctaaccaaagactttaaaactctggctggacagagttttaagcactatgctgcaggaatcctgagaaaaaggggaaattaattctattaggaatggcccaaactgaattgtgacaggcagagggtgttcctgacagagggaagatgaatacacttgaccccaacatttctgcccatccctgatgaccaagacctcttcccagacccacagctgcaggggccaagtaataacagctcttaatagtttataatgcactgttttaatgctttacgactaaactcatctgatcctttcatcagccctagagggtagaaagttttcccaattctacacatggcaaaatggagacccagagtcacttgcccaaggtcgcacagctagtggtggagctggagtctgggcccaggctgtgagttccaggtctgtgctcatggccaccaggccctactgctcagggtgaatgcagctggtctctggccagtgcctggtgctctggcccctctcgtggagctactgcccatgatgctttcctagtgcctggttactctgcgagacttgagtctacctttggactgccttccttgggggtctgagatgaggccttatggcccagaggggaacttgattcaaaaatttgggattcatgtagcagagacagagctagactgtaaaggtcacaaactagctgtgtcaaggcccgtgatagccagaaagcggcagtttcagtccatatcaattgtgtgaccagggctagtcactttttacttctcagtgccatctataaaatggggataatagcactacctaccaagtgctgtgaggctcaaatgagccaaaggttataaacttgccttaaaactatagtcctatacaaaaattagctgggcgtggtggtgcatgcctgtaatcccagctactagggaggctgaggcaagagagttgcttgaacccaggaggcggagattgcagtgagctgagattgcaccactgcactccagcctggggacagagcaagactcttgtctcaaaaaaaacaaaaaaaacatatatactgctgtatcatgccaggatttatcagcattcccaagggagcttgcacggtactgaccgagtgctgagactactggtattcccagctgccatgtggcagcagcaggagctactagaatattctcagcacaggaatgaggcttccttggtttccatgtctgtaagggttactgatcacttaccttcttctctttcagacttgaatctgtagacatttctttattgatatggcaaattgcttgcagatatttttaaatgacagcaattttctaatatttggtttaataaaatgtgaataatgtcccttttaaccatggtcttcactgggagttcatgttgcttcaagtccctagcacccagtgatacccccacaggtaagccctcagcatcctgaatacatcatccgcagcctgggaaccttctccctcgtacagcacaggaacctgacacatagtaggcacacagtaaacatttgtgaatgaatgggagtcatccagtcctgactcttctgtctcttgaggtcccttgaatcttccgcttcctccccaccgatttcagcgtgtccacatcacagctccctccagttcatgttgcttcaagtccctagcacccagacccagaagggcctttactcatatcttattccttacgcagccttctggtagtagtcagctgctccctgattaactatctccagggatggggcattcactgcttctgaagataactcattaaagttctcacttacgtgtaaacaaaccctgactcccacctgttcccatccaagatcgtattatagcttgaactcctggtctcaagcaatcctcccacctcagcctcctaagtagttgggattacaggctcacacaagcacgcctggctcacataccaccttctaacatattgtgtgactgaatcactatgctatggatttttatgcatctgcccccatctgaatggaagttctctgaggaagggattggggcttgttcatggccatatactctgtgcctaaagcagtgcctggcacaaagatggccctcaatatttgttcagagaaggaacacatgccatttccctctctttgctctgaaaggagtgctttcagcattttctgcctacaagatcctttgaccagtcctttctctgatgtggagtgactgctatacaatgccaactaaacacagaggccaagggcaggaaagggataaagacaatggagaagtaaagggctgtaaggaagtgagaatgaaggcttaaaggaaaggacatgtgcagccagctctcacccctctctgcagccacccagcaactggaggatatggactttgtttggaaccaccccttcttctggtgctctgtttataatgcactgttggccagtgcactaagctggccaacttgaaggagagattgcatcactggatctttttctgtctccagtgggctgacacagggcctagcccagaaacatctgctgtctaaggagcaggtggaggtggatgacagccaggtccctggagaccgccattcctgccctcgcctcactcaaacacacctgacagcatcagcaagggaactgagaattcagagaatggcactttatttttaagacttgatttttttgccatgattatctaccaattcttccatgatggtgtcatcctcttcaacagtgaccaggaccttcttgcccactagattaaagatgtcttcaggaggatagcctttgggctcacccaccttcacggtgagcatgtccattgttagaatggtgccttccggaattttcactttggccaccacagacttgcccagctgtggacaaaatgaacattcagtgccagcttcacagaagtaactagtgcacactactttactttacactcaaggtccctgatcagtcttccccaggcagtaccttgggagcaggcactctgttgccccctacactgctcagaatatctcatacatggcaggaattcaaccagtatagattgaattcagagactcagaggaggagcctttacaacaaagtgcaaaggaaagggctgaggctatgtaggcggagccaggttcaaatcccagtctgtggggtataggccacgttttagtttctctgtcaaatggaaacttatcctgtcagatgactgtaaggattggtgatattacagaatgtacgtggaacatagaatgctctcaatacatgcaaactctgattcttttggttaccattcagctcagtatctcattgtaaacatggggaaactgaggcccatacagggtgggtgacttggccagggttgcagacagccaagatgaaacataacatagggatgagattcttaactcctgacacaccgttctccagggcacacaccttaccgccactttgtttggtaaaatagaaatatgaaggactcataagatggtgaatgtggctgttatgcagatggcaagaaaaggagcccccgaggaaggggcagataatacaggcagatgagggaatgaagggtacctgaagctcatgaccagtgtttgtcttctctataaatgctttcaaataaattacgtgttttattactctatatcctccacgtaagagtacaaggaatcaattctgcttggaatgtggtgccaggaaaaaatgtcaagtgataatcatgcatcctgttatgttttactgtctgctcagagagccaaattaagtgctcagctgttataaatcttactctggtttctggtctaattctctcctgtttcctctataaagaaactatttctttttactttattttaatttcctggtatagatgcatctttgatttggggaagcaggtaggccccactagaataaaaggtgacaacagtcccaggc

SEQ ID NO: 7967 - protein, 442 aa, Homo sapiens; identical to SEQ ID NO: 1112

SEQ ID NO: 7968 - DNA, 927 bp, Homo sapiens
ggcagacagaaccttgcaaacaccttaacttctaaccaaagactttaaaactctggctggacagagttttaagcactatgctgcaggaatcctgagaaaaaggggaaattaattctattaggaatggcccaaactgaattgtgacaggcagagggtgttcctgacagagggaagatgaatacacttgaccccaacatttctgcccatccctgatgaccaagacctcttcccagacccacagctgcaggggccaagtaataacagctcttaatagtttataatgcactgttttaatgctttacgactaaactcatctgatcctttcatcagccctagagggtagaaagttttcccaattctacacatggcaaaatggagacccagagtcacttgcccaaggtcgcacagctagtggtggagctggagtctgggcccaggctgtgagttccaggtctgtgctcatggccaccaggccctactgctcagggtgaatgcagctggtctctggccagtgcctggtgctctggcccctctcgtggagctactgcccatgatgtgcactccagcctggggacagagcaagactcttgtctcaaaaaaaacaaaaaaaacatatatactgctgtatcatgccaggatttatcagcattcccaagggagcttgcacggtactgaccgagtgctgagactactggtattcccagctgccatgtggcagcagcaggagctactagaatattctcagcacaggaatgaggcttccttggtttccatgtctgtaagggttactgatcacttaccttcttctctttcagacttgaatctgtagacatttctttattgatatggcaaattgcttgcagatatttttaaatgacagcaattttctaatatttggtttaataaaatgtgaataatgtccctttt

SEQ ID NO: 7969 - protein, 92 aa, Homo sapiens; identical to SEQ ID NO: 7961

SEQ ID NO: 7970 - DNA, 639 bp, Homo sapiens
cgcgcgcctgcgcctgtccgccgatcgcctgacggtgcgctgcggcctgctgggcagcctggggcccgtgcccgtgctgcggttcgacgcgctctggcaagtgctggctcgtgactgcttcgccaccggccgccactactgggaggttgacgtgcaggaggcgggcgccggctggtgggtgggcgcggcctacgcctcccttcggcgccgcggggcctcggccgccgcccgcctgggctgcaaccgccagtcctggtgcctcaagcgctacgaccttgagtactgggccttccacgacggccagcgcagccgcctgcggccccgcgacgacctcgaccggctcggcgtcttcctggactacgaggccggcgtcctcgccttctacgacgtgacgggcggcatgagccacctgcataccttccgcgccacgttccaggagccgctctacccggccctgcggctctgggagggggccatcagcatcccccggctgccctaggggccaggaccggcgtgacagcctccagacttgaatctgtagacatttctttattgatatggcaaattgcttgcagatatttttaaatgacagcaattttctaatatttggtttaataaaatgtgaataatgtccctttt

SEQ ID NO: 7971 - protein, 32 aa, Homo sapiens
MSHLHTFRATFQEPLYPALRLWEGAISIPRLP

SEQ ID NO: 7972 - DNA, 4568 bp, Homo sapiens
ggcgggctgtcatcctcctaggggtcggccggccggcctggagccgccccgcccacggccgaggtttcggtttcccttgggagccccgccctgtgtcccggggagccggaggaggtggagatgaatggcgggcgcggcgaccgggagccggacccctgggaggtcggagcttgtcgagggatgcggctggcgctgcccggagcatggcgaccgcgtggctgagctcttctgtcgccgctgccgccgctgcgtgtgcgcgctttgcccggtgctgggcgcgcaccgtggccaccctgtgggcctggcgctggaggcagcggtgcacgtgcagaaactcagccaagaatgtttaaagcagctggcaatcaagaagcagcagcacattgacaacataacccagatagaagatgccaccgagaagctcaaggctaatgcagagtcaagtaaaacctggctgaaggggaaattcactgaactcagattactacttgacgaagaggaagcgctggccaagaaattcattgataaaaacacgcagcttaccctccaggtgtacagggaacaagctgactcttgcagagagcaacttgacatcatgaatgatctctccaacagggtctggagtatcagccaggagcccgatcctgtccagaggcttcaggcatacacggccaccgagcaggagatgcagcagcagatgagcctcggggagctgtgccatcccgtgcccctctcctttgagcccgtcaagagcttctttaagggcctcgtggaagccgtggagagtacattacagacgccattggacattcgccttaaggaaagcataaactgccagctctcagacccttccagcaccaagccaggtaccttgttgaaaaccagcccctcaccagagcgatcgctattgctgaaatacgcgcgcacgcccacgctggatcctgacacgatgcacgcgcgcctgcgcctgtccgccgatcgcctgacggtgcgctgcggcctgctgggcagcctggggcccgtgcccgtgctgcggttcgacgcgctctggcaagtgctggctcgtgactgcttcgccaccggccgccactactgggaggttgacgtgcaggaggcgggcgccggctggtgggtgggcgcggcctacgcctcccttcggcgccgcggggcctcggccgccgcccgcctgggctgcaaccgccagtcctggtgcctcaagcgctacgaccttgagtactgggccttccacgacggccagcgcagccgcctgcggccccgcgacgacctcgaccggctcggcgtcttcctggactacgaggccggcgtcctcgccttctacgacgtgacgggcggcatgagccacctgcataccttccgcgccacgttccaggagccgctctacccggccctgcggctctgggagggggccatcagcatcccccggctgccctaggggccaggaccggcgtgacagcctccaggtacgccgcagctgcccagtctcgcctaatctacctagatcagcgtggctggtccccttactgcctgcttcttagggccctctccctgccccagctttccccgaccaatcacgcctacagtgctttgaaggtttcctctcctaggctagtttcaaacaggccctaaacaagtctgctgctgccctctcatcagacctccgcaccctcaccccaccatcacttacactactttaatccagttccttcaaagtgatacccccacaggtaagccctcagcatcctgaatacatcatccgcagcctgggaaccttctccctcgtacagcacaggaacctgacacatagtaggcacacagtaaacgtttgtgaatgaatgggagtcatccagtcctgactcttctgtctcttgaggtcccttgaatcttccgcttcctccccaccgatttcagcgtgtccacatcacagctccctccagaagctgcaagagcttcttagcagttcctggtctgaaccctctcccagtcctcatcttccaccctaaaactagagtgatcttcctaaaacttcacttaacccctcagctatgaaaaggcttccaggagtttccatgaaataacaaaaaaaaatacaagcgcctcaccttagcattcaaggcttgtctagtctgcccaaaattacttatcctcacctagctcctaccactcttcttagagactctccagtcagaaatgtgtcgcatagttccacctccacacctctctgctgccagcacattcatgcagaaaagtcttttcacctgtctcagtcttccgcaggcttacctgcgccaggaagtctaaccaaggaacaagaatctcactatcagagccacaaatctgggacctgtctttccaactaaattggaggctttggaagggcagctttgtcctatactctctccaccctgaaaagttcccagaaagccccttccctcccaagcagtgaattaataaccagcaggtgcctatcactgagtaacagaagagctgagttaggcgggcctcacaggtcacccagccagatctcatctggggagtctgaggtcctgaaagaaagcagagctgcgtaaagttaccccggggtgatataggggggccagacgtgtgccccgttcacccacccccaggcaagcatctgacctgtcccctggcccagcccttaggcccagctttcaacctgcttactcatttctcaggggattttgggaaggaatcagcaggtgacagttgctaagcaaccaaagggggtggtgtttcccaactgtcttgggacaaaaagggtaagagcacccttagatccagatgttgccaaggaaacccagagtgcccagctgtctggaatgaagtgacagaggtagaaaacagtaggccctcacaggaggccaccttcgctagcagggagtgggaggcttctttccagggatttgtgtctccgttctgaaggttctgcgtcctgttttgtcaattccctagacggttttgaagttatattctgttaaagcatcttcataggtgcttggtgggaggccaaggtcgccgaatcctcgtggtttaaatagactttcagtgcattagtttgaaccatataaaactgacaattttcaatagtttttgagttaaaaatggcacttttgatatgagacaatgtagcagaataccaggcagacagaaccttgcaaacaccttaacttctaaccaaagactttaaaactctggctggacagagttttaagcactatgctgcaggaatcctgagaaaaaggggaaattaattctattaggaatggcccaaactgaattgtgacaggcagagggtgttcctgacagagggaagatgaatacacttgaccccaacatttctgcccatccctgatgaccaagacctcttcccagacccacagctgcaggggccaagtaataacagctcttaatagtttataatgcactgttttaatgctttacgactaaactcatctgatcctttcatcagccctagagggtagaaagttttcccaattctacacatggcaaaatggagacccagagtcacttgcccaaggtcgcacagctagtggtggagctggagtctgggcccaggctgtgagttccaggtctgtgctcatggccaccaggccctactgctcagggtgaatgcagctggtctctggccagtgcctggtgctctggcccctctcgtggagctactgcccatgatgctttcctagtgcctggttactctgcgagacttgagtctacctttggactgccttccttgggggtctgagatgaggccttatggcccagaggggaacttgattcaaaaatttgggattcatgtagcagagacagagctagactgtaaaggtcacaaactagctgtgtcaaggcccgtgatagccagaaagcggcagtttcagtccatatcaattgtgtgaccagggctagtcactttttacttctcagtgccatctataaaatggggataatagcactacctaccaagtgctgtgaggctcaaatgagccaaaggttataaacttgccttaaaactatagtcctatacaaaaattagctgggcgtggtggtgcatgcctgtaatcccagctactagggaggctgaggcaagagagttgcttgaacccaggaggcggagattgcagtgagctgagattgcaccactgcactccagcctggggacagagcaagactcttgtctcaaaaaaaacaaaaaaaacatatatactgctgtatcatgccaggatttatcagcattcccaagggagcttgcacggtactgaccgagtgctgagactactggtattcccagctgccatgtggcagcagcaggagctactagaatattctcagcacaggaatgaggcttccttggtttccatgtctgtaagggttactgatcacttaccttcttctctttcagacttgaatctgtagacatttctttattgatatggcaaattgcttgcagatatttttaaatgacagcaattttctaatatttggtttaataaaatgtgaataatgtccctttt

SEQ ID NO: 7973 - protein, 442 aa, Homo sapiens; identical to SEQ ID NO: 1112

SEQ ID NO: 7974 - DNA, 726 bp, Homo sapiens
aagacaggaaagtgacaaggaggaggagctgttttatataagcagttgggatggcctctgagaaggggacactcaaggtggcccaaaggaagcattcattctgcaggttctgtgggtctgaagggccagagagcacagtggtcataggcacggcctctggagctaggcctcctgggttcctatccgaggtctaccacttggaaccctgctgaaccctgccatcttagacacggctcctcccttttccatgcctctgtttctgcatctgtaaagtggagaccataatgcagtcgcctctcctgggctgctgtgaggattaaatgagcttcttgggcgagattatgcgaatctccagttgtgtggtatttttagcacgtcttatttgtctgcttgcataagctccgggcgctcatttctcaacaattccttacaggcataaactgccagctctcagacccttccagcaccaagccaggtaccttgttgaaaaccagcccctcaccagagcgatcgctattgctgaaatgtaagacccccgggagtggggatagggtggagacggtggagatggtgggatgttgggtggaggaggatcatggaaatggaggtccctctttttttctcattagaatttatttatttatttattttaagaacttgttttttaaaaaatgtttattattaaaggcaataaaacaatacatgttcattgtagaaaaattagaa

SEQ ID NO: 7975 - protein, 53 aa, Homo sapiens
MASEKGTLKVAQRKHSFCRFCGSEGPESTVVIGTASGARPPGFLSEVYHLEPC

SEQ ID NO: 7976 - DNA, 474 bp, Homo sapiens
gaagatcaggctccctgtctgcaaatgcctgagcagatatggtttgagggcccccaagaattaggacccatgtggagggtctagtcttccccaggccacactggaagaattgtcttgggccacacataaaatacactaacactaacaatagctgatgagctaaagaaaaaaaaaatatccaaaaaactcatgatgttttaagaaagtttacaaatttgtgttgtgccacattcaaagctgtgctgggccacatgcggcccacaggctgcaggttggataagcttggcctgagggatggcctggggtaggtttcagcttaatctaagccatggttctctttctcttgaccctttccccaactaactttttaactttttatagatttagaggaagttgcaaaaatagtagagttttgtgtaccttgacctagtttgccccaagggttacttgttacataactatagcacacaatcc

SEQ ID NO: 7977 - protein, 33 aa, Homo sapiens
MVLFLLTLSPTNFLTFYRFRGSCKNSRVLCTLT

SEQ ID NO: 7978 - DNA, 4661 bp, Homo sapiens
agtcctagttttggataaccttaagtaggttttgctccctgggcctcagtttcctcatctgtagccatgatgccagcctcccctgctttctggaggtggtgagagaactaatgaacttggtagatggtggggtgcagtgtgggtgggactgtccttacaaagcaagggcaaggtctcatgtgagtttgaagtgtttgggggctgcttcagtgcacgcaccgtgctgttcctacaaaccaagcttcactctgagggtggcacacgtgggtatttgtatctgttagccctgctctgtgggtttgggcctgtccacaggtagctgtatttcccacacatgttgcatgggtctgcatggctctgagtgtctctgcatgcctgcctgtgtcattggtgccccatatgcccatcttcccgtgggcaccccgtcctcacatggctctgcttcccttccagacccaatcctggtgtcccttaggcctggctctgagctgctgagaccccacccactgcctgcagagagacctatcttcaattccatggccccagcctcaccccggctcttgaatcagacagaaaagctggctgcagaagatggctggaggtcttcctccctgttggaggagaagatgccaaggtgggcagcagaacacaggctggaggagaagaaaacctggctgacaaatggctttgacgttttcgaatgccccccaccaaagacagagaatgagttgctgcagatgttctaccggcaacaggaggagatccgaaggctccgggagctgttgacccagcgagaggtccaggccaaacagttggaactggagatcaaaaacttgcggatgggctcagagcagctctgagcagagacctctgccctcctcaccctcagggacaccactcggctccatggggaggtttagaaccaaaccacaagtcccctcaaggacaaccactatttctatattttttaccagaaaacaaaactctccatcgctgaaagagattccagtgggacatggtgccgtttttctgtttgccttcttgcaacaacagtttctgaattgactttgttttcagatgatgccttctgttgaattctgttattaagggcccatgatgagctgtaacttctcaagaggaaagaacacagtagaaaactagagctggaaggatctaggttgacctgtctgtgattttcaaactgtggtccagagaataggggaagactgggccagacgcagtggctcatgcctgtaatcccagcactctgggaggctgaggtgggcggattgcttgaggtcgggagtttgaaaccagtctcaccaggcgcagtggctcacgcctgtaattccagcatgttgggaggccgaggctggtggatcacgaggtcagcagttcgagaccagcctgaccaacatggtgaaaccccatctctactaaaaatacaaaaaaattagctgggcgtggtggcaggcgcctgtaattccagcgacttgggaggctgaggcaggagaattgcttgaaaccggaaggcgggggttgcagtgagctgagattgtgccactgcactctaacctgggcaataagagcaaaagtctgtctcaaaaaaaaaaaaaaaagaaagaaaccagcctggccaacatggtgaaaccccgtctctactaaaaatacaaaaattaggcagggcgtggtggttcacgcctataatcccagaactttgggaggccaagctgggcggatcttctgaggtcaggagttcaagaccagcctggccaacatggtgaaaccccgtctccactaaaaataaaaaattaaccaggcatggtggtgcatgcctgtaatcccagctatttgggaggctgaggcaggagaatcgcttgagcctgggaggcggaggttgcagtgaaccaagatcatgccacttcactccagcctgggtgacagagtgagactccgtctcaaaaaaaaaaagttggccagccgtggtggtgagcgtctgtagtccctgctattcgggaggctgagataggagaattgcttgaacctgggaggtggaggttgctatgagccacgattgcggactgcactgcagcctgggtgacagagcgagactccatctccaaaaaaaaaaaaaaaaagagagagagaataggggaagactaagcaggaaggctgtgtctcccttccccacactgtattccaaccagacagctcccttctattttatatgttgggctagtatgaaaaacaattctgctaggaaaaaaaaatttttttagaagtttgaaagctagtgatttgacccaagttcctcattttacagctggggaaactaaggcctagagagaggcaagtgatatttgtttcatggcagggctgggctgagatcctgcttttctgggtctgtctttttgctcttttgggtctgatgcagttctcagcccaaagagtagaaatctgttgcttctggcctcagctgtgccccagcttactcagtgacctcttgcaagtcctgccctctctggtctcagtttcttcatctgaaccaggggtaccctggaacaagctgctctctgcaggatctgccacctgaaaccttgacctaagagaaaactacctgtggggtgatctgggtttgctacagaaactaacggacactggcaaggggtcagaggcattcaacccaattctacaacacaggcaggtggtcaaaaccaacctttccaaccagaatcagcctgatatggatagatgctgtcccttatggagggacgcagacttcagaactgtgcccatgactgctgactgccaccaccaaggccctcaggtacacagcctgcctcctgcaggatgatgtgggcagatttcagccctagttaacagaagagtcccccaggaggtagggggcccccatcactggagacatgccagcagagcctctggccacctaaccaggaggtcttctgaaatgactatacgaggtaaagaagtagtaccagatggtcccaaagttcccttttagcctgaaagcttttctttgtccctccttagtgaatctgtgttccgagccctactctaaagttcagtggtcaatacaatagtccaccaagagactgggaatgattagaagtgaaattggtccctccttaccaaggaggggcagatgatctccattgcacagggcgattagattctggagctgaggtggggactgcaggaggccacctagtctggtaggtttcaacccaagctgtgtacattagaattcccttgggagcgtgcaggaaatacagatgcccatgccacattccagaccaactgaagctgaatctccagagtagggcctgtatggtcatataagctccacaggtgatctgcagtacagtgaagatggaagactgcatgtgtacctatttgcaataaagatgaagaggacagcaagctccagacaggagctgggactcaacccagatctcttaagtcctgcctggtggctccttaaaagtccagaagtgttgccccaagccctccctcaacatctctgggaaccgcagctgcagcacgatgggggttcagtgcccctgtttgccccttacccagctgtggtttattctgcttgtatgtctgcacaggccggatgctcgtgttccttgtcttattctccatttactcagtcactggggctcactcccgtctgatgcactagccaagattgccttagtgtgctccagaaaagaaggccaaatcccaggcattgtcagggcagcagagctctacaggataggcttacctttcccacctgtgtggctagcacttcacagtttacaaattcctcccacctccactcagtgacacatgctgttctaacacaggtcaggcaggcattacagtccccatgttcagaatcaaagacctagcctcagagaagtgaagaaacatcatgccaaggtcattgactgccaagcggtagaggtggggttgcatccagagagcttcccggtatgcctctgcacaatgccattccttggccagctccctccaccccaagggacccagactgcacacttaacaaacaggacacaggtgtctttgaacaaacttttttgtattattatttttacatctagaataaattatttaaattatttcacagcaagggagagggataggtaatttttatcagatatttttttaaaccatctgttttttaaattacatttttgtttatgttcttgagctgatgtagtggaacttgcctagcacattcaggtcccagccagttggcagagcatgctctcatctccttattccataccctgggcgtcccctttctgttgactcaggaactttctgagaatgaggacagcactaggagatgagctttggcaggtatccaccttaacgctacaataattgtgcttcctgaaacaaaacttgagattgtatcatagaaggaaacaggaagtcagaaatcaaatctatgcttttaattgaaaccgtgcctgaaacagtttgaatgattgttttaatgttgtttctgaaattccttgtacctttgtgaaaaataatgataataaataaaagtgaaaataaatagatgtggaatatgcaatggaaataatgtaacaaaataataaacatctggccattttactacaagg

SEQ ID NO: 7979 - protein, 172 aa, Homo sapiens
MGLHGSECLCMPACVIGAPYAHLPVGTPSSHGSASLPDPILVSLRPGSELLRPHPLPAERPIFNSMAPASPRLLNQTEKLAAEDGWRSSSLLEEKMPRWAAEHRLEEKKTWLTNGFDVFECPPPKTENELLQMFYRQQEEIRRLRELLTQREVQAKQLELEIKNLRMGSEQL

SEQ ID NO: 7980 - DNA, 2422 bp, Homo sapiens
cacaggggcactgacatctttgctggactcttttaatcctcataaacccaggctgctggcacttgaaatttgagaagggcaatcagtctggcctcctgcctttctggcctgcaggcccagcctggacaaacaatttaggtggagctcctggaggctggaagcagagaggaggtacctcaccatcctctcctgccagctgttgcagactctgcctggggaactgattaagggtgagcagaggcatttatctccatgttaacaagcagatgtcatggcacccccagtaccggagctccaagttccgtcatgtctttggcaaaccagccagcaaggagaactgctacgactccgtgcctatcacccgcagcgttcacgacaaccacttctgtgccgtgaacccccacttcattgcagttgtgactgagtgtgctggtggaggggccttcctcgtcatccccctgcaccagacagggaagttggacccccactacccaaaagtctgcgggcacagaggcaacgttttggatgtcaagtggaacccttttgatgattttgagatcgcctcctgttctgaagatgccacaattaagatctggagcatccccaagcagctgctgaccaggaacctcacggcctacaggaaggaactcgtgggccacgcgcgcagagtaggcctggtggagtggcaccccacggccgccaacatcctcttcagtgctggctatgactacaaggtgatgatctggaacctggatacaaaggagtctgtcatcacaagccccatgagtacgattagctgtcaccaagatgtgatcctctccatgtccttcaacaccaacggcagcctgttggccaccacctgcaaagaccgcaagattcgggttattgacccccgagcagggaccgtcctccaggaggccagctacaaagggcaccgggccagcaaagtgctgtttctggggaacctgaagaagctgatgtccacaggcacatcccgatggaacaaccggcaggtggccttgtgggaccaggataacctctctgtgcctctgatggaggaggacctggacggctcctcgggcgtgctgtttcccttctatgacgcggacaccagcatgctctacgtggtggggaagggagatggcaacatccgctactacgaggtgagcgccgacaagcctcacctgagctacctgactgagtaccgctcctataacccacagaaggggatcggtgtcatgccaaagagaggactcgacgtgtcctcctgcgagatcttccgcttctacaagctgatcacaaccaaaagcctcatcgagcccatctccatgattgtgccccggcggtcagaatcctaccaagaggacatataccctccaacagcaggggcccagccctccctgacggcccaggagtggctcagcgggatgaatcgagacccaatcctggtgtcccttaggcctggctctgagctgctgagaccccacccactgcctgcagagagacctatcttcaattccatggccccagcctcaccccggctcttgaatcagacagaaaagctggctgcagaagatggctggaggtcttcctccctgttggaggagaagatgccaaggtgggcagcagaacacaggctggaggagaagaaaacctggctgacaaatggctttgacgttttcgaatgccccccaccaaagacagagaatgagttgctgcagatgttctaccggcaacaggaggagatccgaaggctccgggagctgttgacccagcgagaggtccaggccaaacagttggaactggagatcaaaaacttgcggatgggctcagagcagctctgagcagagacctctgccctcctcaccctcagggacaccactcggctccatggggaggtttagaaccaaaccacaagtcccctcaaggacaaccactatttctatattttttaccagaaaacaaaactctccatcgctgaaagagattccagtgggacatggtgccgtttttctgtttgccttcttgcaacaacagtttctgaattgactttgttttcagatgatgccttctgttgaattctgttattaagggcccatgatgagctgtaacttctcaagaggaaagaacacagtagaaaactagagctggaaggatctaggttgacctgtctgtgattttcaaactgtggtccagagaataggggaagactgggccagacgcagtggctcatgcctgtaatcccagcactctgggaggctgaggtgggcggattgcttgaggtcgggagtttgaaaccagtctcaccaggcgcagtggctcacgcctgtaattccagcatgttgggaggccgaggctggtggatcacgaggtcagcagttcgagaccagcctgaccaacatggtgaaaccccatctctact

SEQ ID NO: 7981 - protein, 525 aa, Homo sapiens; identical to SEQ ID NO: 1122

SEQ ID NO: 7982 - DNA, 2253 bp, Homo sapiens
ggcggctctgggcgccgggagtcggcgggcggcgaggagcgcggagccggagctggacgccgccgccgccaccgccacctgcgcggcagtcatcaagatgtcatggcacccccagtaccggagctccaagttccgtcatgtctttggcaaaccagccagcaaggagaactgctacgactccgtgcctatcacccgcagcgttcacgacaaccacttctgtgccgtgaacccccacttcattgcagttgtgactgagtgtgctggtggaggggccttcctcgtcatccccctgcaccagacagggaagttggacccccactacccaaaagtctgcgggcacagaggcaacgttttggatgtcaagtggaacccttttgatgattttgagatcgcctcctgttctgaagatgccacaattaagatctggagcatccccaagcagctgctgaccaggaacctcacggcctacaggaaggaactcgtgggccacgcgcgcagagtaggcctggtggagtggcaccccacggccgccaacatcctcttcagtgctggctatgactacaaggtgatgatctggaacctggatacaaaggagtctgtcatcacaagccccatgagtacgattagctgtcaccaagatgtgatcctctccatgtccttcaacaccaacggcagcctgttggccaccacctgcaaagaccgcaagattcgggttattgacccccgagcagggaccgtcctccaggaggccagctacaaagggcaccgggccagcaaagtgctgtttctggggaacctgaagaagctgatgtccacaggcacatcccgatggaacaaccggcaggtggccttgtgggaccaggataacctctctgtgcctctgatggaggaggacctggacggctcctcgggcgtgctgtttcccttctatgacgcggacaccagcatgctctacgtggtggggaagggagatggcaacatccgctactacgaggtgagcgccgacaagcctcacctgagctacctgactgagtaccgctcctataacccacagaaggggatcggtgtcatgccaaagagaggactcgacgtgtcctcctgcgagatcttccgcttctacaagctgatcacaaccaaaagcctcatcgagcccatctccatgattgtgccccggcggtcagaatcctaccaagaggacatataccctccaacagcaggggcccagccctccctgacggcccaggagtggctcagcgggatgaatcgagacccaatcctggtgtcccttaggcctggctctgagctgctgagaccccacccactgcctgcagagagacctatcttcaattccatggccccagcctcaccccggctcttgaatcagacagaaaagctggctgcagaagatggctggaggtcttcctccctgttggaggagaagatgccaaggtgggcagcagaacacaggctggaggagaagaaaacctggctgacaaatggctttgacgttttcgaatgccccccaccaaagacagagaatgagttgctgcagatgttctaccggcaacaggaggagatccgaaggctccgggagctgttgacccagcgagaggtccaggccaaacagttggaactggagatcaaaaacttgcggatgggctcagagcagctctgagcagagacctctgccctcctcaccctcagggacaccactcggctccatggggaggtttagaaccaaaccacaagtcccctcaaggacaaccactatttctatattttttaccagaaaacaaaactctccatcgctgaaagagattccagtgggacatggtgccgtttttctgtttgccttcttgcaacaacagtttctgaattgactttgttttcagatgatgccttctgttgaattctgttattaagggcccatgatgagctgtaacttctcaagaggaaagaacacagtagaaaactagagctggaaggatctaggttgacctgtctgtgattttcaaactgtggtccagagaataggggaagactgggccagacgcagtggctcatgcctgtaatcccagcactctgggaggctgaggtgggcggattgcttgaggtcgggagtttgaaaccagtctcaccaggcgcagtggctcacgcctgtaattccagcatgttgggaggccgaggctggtggatcacgaggtcagcagttcgagaccagcctgaccaacatggtgaaaccccatctctact

SEQ ID NO: 7983 - protein, 525 aa, Homo sapiens; identical to SEQ ID NO: 1122

SEQ ID NO: 7984 - DNA, 729 bp, Homo sapiens
aatgccccccaccaaagacagagaatgagttgctgcagatgttctaccggcaacaggaggagatccgaaggctccgggagctgttgacccagcgagaggtccaggccaaacagttggaactggagatcaaaaacttgcggatgggctcagagcagctctgagcagagacctctgccctcctcaccctcagggacaccactcggctccatggggaggtttagaaccaaaccacaagtcccctcaaggacaaccactatttctatattttttaccagaaaacaaaactctccatcgctgaaagagattccagtgggacatggtgccgtttttctgtttgccttcttgcaacaacagtttctgaattgactttgttttcagatgatgccttctgttgaattctgttattaagggcccatgatgagctgtaacttctcaagaggaaagaacacagtagaaaactagagctggaaggatctaggttgacctgtctgtgattttcaaactgtggtccagagaataggggaagactgggccagacgcagtggctcatgcctgtaatcccagcactctgggaggctgaggtgggcggattgcttgaggtcgggagtttgaaaccagtctcaccaggcgcagtggctcacgcctgtaattccagcatgttgggaggccgaggctggtggatcacgaggtcagcagttcgagaccagcctgaccaacatggtgaaaccc

SEQ ID NO: 7985 - protein, 59 aa, Homo sapiens
MPVIPALWEAEVGGLLEVGSLKPVSPGAVAHACNSSMLGGRGWWITRSAVRDQPDQHGE

SEQ ID NO: 7986 - DNA, 472 bp, Homo sapiens
aatgccccccaccaaagacagagaatgagttgctgcagatgttctaccggcaacaggaggagatccgaaggctccgggagctgttgacccagcgagaggtccaggccaaacagttggaactggagatcaaaaacttgcggatgggctcagagcagctctgagcagagacctctgccctcctcaccctcagggacaccactcggctccatggggaggtttagaaccaaaccacaagtcccctcaaggacaaccactatttctatattttttaccagaaaacaaaactctccatcgctgaaagagattccagtgggacatggtgccgtttttctgtttgccttcttgcaacaacagtttctgaattgactttgttttcagatgatgccttctgttgaattctgttattaagggcccatgatgagctgtaacttctcaagaggaaagaacacagtagaaaactagagctggaagg

SEQ ID NO: 7987 - protein, 52 aa, Homo sapiens
MGRFRTKPQVPSRTTTISIFFTRKQNSPSLKEIPVGHGAVFLFAFLQQQFLN

SEQ ID NO: 7988 - DNA, 2042 bp, Homo sapiens
atgtgggggcgcacggcgcggcggcgctgcccgcgggaactgcggcgcggccgggaggcgctgttggtgctcctggcgctactggcgttggccgggctgggctcggtgctgcgggcgcagcgtggggccggggccggggctgccgagccgggacccccgcgcaccccgcgccccgggcggcgcgagccggtcatgccgcggccgccggtgccggcgaacgcgctgggcgcgcggggcgaggcggtgcggctgcagctgcagggcgaggagctgcggctgcaggaggagagcgtgcggctgcaccagattaacatctacctcagcgaccgcatctcactgcaccgccgcctgcccgagcgctggaacccgctgtgcaaagagaagaaatatgattatgataatttgcccaggacatctgttatcatagcattttataatgaagcctggtcaactctccttcggacagtttacagtgtccttgagacatccccggatatcctgctagaagaagtgatccttgtagatgactacagtgatagagagcacctgaaggagcgcttggccaatgagctttcgggactgcccaaggtgcgcctgatccgcgccaacaagagagagggcctggtgcgagcccggctgctgggggcgtctgcggcgaggggcgatgttctgaccttcctggactgtcactgtgagtgccacgaagggtggctggagccgctgctgcagaggatccatgaagaggagtcggcagtggtgtgcccggtgattgatgtgatcgactggaacaccttcgaatacctggggaactccggggagccccagatcggcggtttcgactggaggctggtgttcacgtggcacacagttcctgagagggagaggatacggatgcaatcccccgtcgatgtcatcaggtctccaacaatggctggtgggctgtttgctgtgagtaagaaatattttgaatatctggggtcttatgatacaggaatggaagtttggggaggagaaaacctcgaattttcctttaggatctggcagtgtggtggggttctggaaacacacccatgttcccatgttggccatgttttccccaagcaagctccctactcccgcaacaaggctctggccaacagtgttcgtgcagctgaagtatggatggatgaatttaaagagctctactaccatcgcaacccccgtgcccgcttggaaccttttggggatgtgacagagaggaagcagctccgggacaagctccagtgtaaagacttcaagtggttcttggagactgtgtatccagaactgcatgtgcctgaggacaggcctggcttcttcgggatgctccagaacaaaggactaacagactactgctttgactataaccctcccgatgaaaaccagattgtgggacaccaggtcattctgtacctctgtcatgggatgggccagaatcagtttttcgagtacacgtcccagaaagaaatacgctataacacccaccagcctgagggctgcattgctgtggaagcaggaatggatacccttatcatgcatctctgcgaagaaactgccccagagaatcagaagttcatcttgcaggaggatggatctttatttcacgaacagtccaagaaatgtgtccaggctgcgaggaaggagtcgagtgacagtttcgttccactcttacgagactgcaccaactcggatcatcagaaatggttcttcaaagagcgcatgttatgaagcctcgtgtatcaaggagcccatcgaaggagactgtggagccaggactctgcccaacaaagacttagctaagcagtgaccagaacccaccaaaaactaggctgcattgctttgaagaggcaatcattttgccatttgtgaaagttgtgttggatttagtaaaaatgtgaataagctttgtacttattttgagaactttttaaatgttccaaaataccctattttcaaagggtaatcgtaagatgttaacccttggtatttagaaaattaaaaccttataatatttttctatcaag

SEQ ID NO: 7989 - protein, 581 aa, Homo sapiens [sequence omitted]

SEQ ID NO: 7990 - DNA, 2735 bp, Homo sapiens
atgtgggggcgcacggcgcggcggcgctgcccgcgggaactgcggcgcggccgggaggcgctgttggtgctcctggcgctactggcgttggccgggctgggctcggtgctgcgggcgcagcgtggggccggggccggggctgccgagccgggacccccgcgcaccccgcgccccgggcggcgcgagccggtcatgccgcggccgccggtgccggcgaacgcgctgggcgcgcggggcgaggcggtgcggctgcagctgcagggcgaggagctgcggctgcaggaggagagcgtgcggctgcaccagattaacatctacctcagcgaccgcatctcactgcaccgccgcctgcccgagcgctggaacccgctgtgcaaagagaagaaatatgattatgataatttgcccaggacatctgttatcatagcattttataatgaagcctggtcaactctccttcggacagtttacagtgtccttgagacatccccggatatcctgctagaagaagtgatccttgtagatgactacagtgatagagagcacctgaaggagcgcttggccaatgagctttcgggactgcccaaggtgcgcctgatccgcgccaacaagagagagggcctggtgcgagcccggctgctgggggcgtctgcggcgaggggcgatgttctgaccttcctggactgtcactgtgagtgccacgaagggtggctggagccgctgctgcagaggatccatgaagaggagtcggcagtggtgtgcccggtgattgatgtgatcgactggaacaccttcgaatacctggggaactccggggagccccagatcggcggtttcgactggaggctggtgttcacgtggcacacagttcctgagagggagaggatacggatgcaatcccccgtcgatgtcatcaggtctccaacaatggctggtgggctgtttgctgtgagtaagaaatattttgaatatctggggtcttatgatacaggaatggaagtttggggaggagaaaacctcgaattttcctttaggatctggcagtgtggtggggttctggaaacacacccatgttcccatgttggccatgttttccccaagcaagctccctactcccgcaacaaggctctggccaacagtgttcgtgcagctgaagtatggatggatgaatttaaagagctctactaccatcgcaacccccgtgcccgcttggaaccttttggggatgtgacagagaggaagcagctccgggacaagctccagtgtaaagacttcaagtggttcttggagactgtgtatccagaactgcatgtgcctgaggacaggcctggcttcttcgggatgctccagaacaaaggactaacagactactgctttgactataaccctcccgatgaaaaccagattgtgggacaccaggtcattctgtacctctgtcatgggatgggccagaatcagtttttcgagtacacgtcccagaaagaaatacgctataacacccaccagcctgagggctgcattgctgtggaagcaggaatggatacccttatcatgcatctctgcgaagaaactgccccagagaatcagaagttcatcttgcaggaggatggatctttatttcacgaacagtccaagaaatgtgtccaggctgcgaggaaggagtcgagtgacagtttcgttccactcttacgagactgcaccaactcggatcatcagaaatggttcttcaaagagcgcatgttatgaagcctcgtgtatcaaggagcccatcgaaggagactgtggagccaggactctgcccaacaaagacttagctaagcagtgaccagaacccaccaaaaactaggctgcattgctttgaagaggcaatcattttgccatttgtgaaagttgtgttggatttagtaaaaatgtgaataagctttgtacttattttgagaactttttaaatgttccaaaataccctattttcaaagggtaatcgtaagatgttaacccttggtatttagaaaattaaaaccttataatatttttctatcaagatgtatattttacagtcgtgccttttactctcattagcaaaaaagataaagattttattttggtatttacaagaattcccaggtacgaagatatctgcatgggtggaaatcaggttcaagcaacgtactttgcattaactgataatacctcagctgcggggttaaagttttcccagtatagagagactgtcactaggaacattgtattgatttattcaggtcattgagatcttctagatgtattttaaaaagaatgctttttggttatgtgttgctaccacagttaacactccataatgttcatgtcagccaaagaggactaaccaaagctgaaatctcagagaacaatttgctttactaagctgagtcaacttgagagcgaacttctaacaatgccgcactgtagtgtggctggttctaccactatgactttaaaacatgtttatatcatttttaatttttatgatacggtagtgtcagggagaaatgtaatgttctatatgaaattcctttttcaagtttgttcattaataacagttattaatttaaatcagcgttagagtttgtgctgctgcaactgctgtgaaaatttctctgagtaattctgatttgtgaatgatcccagaccaaccctgagattttgtcaacctgattaagtcaatatgaatgattaaaaagatgtgagaacactga

SEQ ID NO: 7991 - protein, 581 aa, Homo sapiens [sequence omitted]

SEQ ID NO: 7992 - DNA, 1897 bp, Homo sapiens
ggacttgaccctgagcaggtagaagccactgaagggatcggagcaggaagtgacctgagcatgtgctgcgtgccatgtggtctccaacaatggctggtgggctgtttgctgtgagtaagaaatattttgaatatctggggtcttatgatacaggaatggaagtttggggaggagaaaacctcgaattttcctttaggatctggcagtgtggtggggttctggaaacacacccatgttcccatgttggccatgttttccccaagcaagctccctactcccgcaacaaggctctggccaacagtgttcgtgcagctgaagtatggatggatgaatttaaagagctctactaccatcgcaacccccgtgcccgcttggaaccttttggggatgtgacagagaggaagcagctccgggacaagctccagtgtaaagacttcaagtggttcttggagactgtgtatccagaactgcatgtgcctgaggacaggcctggcttcttcgggatgctccagaacaaaggactaacagactactgctttgactataaccctcccgatgaaaaccagattgtgggacaccaggtcattctgtacctctgtcatgggatgggccagaatcagtttttcgagtacacgtcccagaaagaaatacgctataacacccaccagcctgagggctgcattgctgtggaagcaggaatggatacccttatcatgcatctctgcgaagaaactgccccagagaatcagaagttcatcttgcaggaggatggatctttatttcacgaacagtccaagaaatgtgtccaggctgcgaggaaggagtcgagtgacagtttcgttccactcttacgagactgcaccaactcggatcatcagaaatggttcttcaaagagcgcatgttatgaagcctcgtgtatcaaggagcccatcgaaggagactgtggagccaggactctgcccaacaaagacttagctaagcagtgaccagaacccaccaaaaactaggctgcattgctttgaagaggcaatcattttgccatttgtgaaagttgtgttggatttagtaaaaatgtgaataagctttgtacttattttgagaactttttaaatgttccaaaataccctattttcaaagggtaatcgtaagatgttaacccttggtatttagaaaattaaaaccttataatatttttctatcaagatgtatattttacagtcgtgccttttactctcattagcaaaaaagataaagattttattttggtatttacaagaattcccaggtacgaagatatctgcatgggtggaaatcaggttcaagcaacgtactttgcattaactgataatacctcagctgcggggttaaagttttcccagtatagagagactgtcactaggaacattgtattgatttattcaggtcattgagatcttctagatgtattttaaaaagaatgctttttggttatgtgttgctaccacagttaacactccataatgttcatgtcagccaaagaggactaaccaaagctgaaatctcagagaacaatttgctttactaagctgagtcaacttgagagcgaacttctaacaatgccgcactgtagtgtggctggttctaccactatgactttaaaacatgtttatatcatttttaatttttatgatacggtagtgtcagggagaaatgtaatgttctatatgaaattcctttttcaagtttgttcattaataacagttattaatttaaatcagcgttagagtttgtgctgctgcaactgctgtgaaaatttctctgagtaattctgatttgtgaatgatcccagaccaaccctgagattttgtcaacctgattaagtcaatatgaatgattaaaaagatgtgagaacactga

SEQ ID NO: 7993 - protein, 277 aa, Homo sapiens
MWSPTMAGGLFAVSKKYFEYLGSYDTGMEVWGGENLEFSFRIWQCGGVLETHPCSHVGHVFPKQAPYSRNKALANSVRAAEVWMDEFKELYYHRNPRARLEPFGDVTERKQLRDKLQCKDFKWFLETVYPELHVPEDRPGFFGMLQNKGLTDYCFDYNPPDENQIVGHQVILYLCHGMGQNQFFEYTSQKEIRYNTHQPEGCIAVEAGMDTLIMHLCEETAPENQKFILQEDGSLFHEQSKKCVQAARKESSDSFVPLLRDCTNSDHQKWFFKERML

SEQ ID NO: 7994 - DNA, 460 bp, Homo sapiens
gacgatgttccctagtctaatctgctctttccttccttcattcattcaatcaatcattcacgcagctggccagcagacactggatgaccacccctgggccaggccttgtggcaaatgctacagtaatgaccagacacatcacacccgccttctagaagccctccctcacaaaccggatcaactgctatgataaagtgtccactaccattccttgagggcttacaatggcttctggttgggagaaagatgggaagaggaggacattcaagaagatcagagacgtctggggtgtgcagaagtatttttccttcttattttcctgtattcaataggtaacaccatggtgtgtggcttttctgggcagcctgcaaatgtcattgctagtgacaacatttttctgcaggaaaacatattccagcttttaatcatctttagaataaacccatttataagcagtata

SEQ ID NO: 7995 - protein, 49 aa, Homo sapiens
MIKCPLPFLEGLQWLLVGRKMGRGGHSRRSETSGVCRSIFPSYFPVFNR

SEQ ID NO: 7996 - DNA, 1219 bp, Homo sapiens
gtacaagcctggtgctgtgtccccgggacagtcctgagttgctgcgttacacggaagacacttacccctcaataaatatttctgaaatggatggatctttatttcacgaacagtccaagaaatgtgtccaggctgcgaggaaggagtcgagtgacagtttcgttccactcttacgagactgcaccaactcggatcatcagaaatggttcttcaaagagcgcatgttatgaagcctcgtgtatcaaggagcccatcgaaggagactgtggagccaggactctgcccaacaaagacttagctaagcagtgaccagaacccaccaaaaactaggctgcattgctttgaagaggcaatcattttgccatttgtgaaagttgtgttggatttagtaaaaatgtgaataagctttgtacttattttgagaactttttaaatgttccaaaataccctattttcaaagggtaatcgtaagatgttaacccttggtatttagaaaattaaaaccttataatatttttctatcaagatgtatattttacagtcgtgccttttactctcattagcaaaaaagataaagattttattttggtatttacaagaattcccaggtacgaagatatctgcatgggtggaaatcaggttcaagcaacgtactttgcattaactgataatacctcagctgcggggttaaagttttcccagtatagagagactgtcactaggaacattgtattgatttattcaggtcattgagatcttctagatgtattttaaaaagaatgctttttggttatgtgttgctaccacagttaacactccataatgttcatgtcagccaaagaggactaaccaaagctgaaatctcagagaacaatttgctttactaagctgagtcaacttgagagcgaacttctaacaatgccgcactgtagtgtggctggttctaccactatgactttaaaacatgtttatatcatttttaatttttatgatacggtagtgtcagggagaaatgtaatgttctatatgaaattcctttttcaagtttgttcattaataacagttattaatttaaatcagcgttagagtttgtgctgctgcaactgctgtgaaaatttctctgagtaattctgatttgtgaatgatcccagaccaaccctgagattttgtcaacctgattaagtcaatatgaatgattaaaaagatgtgagaacactga

SEQ ID NO: 7997 - protein, 47 aa, Homo sapiens
MDGSLFHEQSKKCVQAARKESSDSFVPLLRDCTNSDHQKWFFKERML

SEQ ID NO: 7998 - DNA, 761 bp, Homo sapiens
cccattgcaatcagaagattatttatggaaaaaagcaaaatggagatatttaaaagacggagagagacagcagaaagctgcttaagaaattgctttgagtccacaggagggaagcacaaaggagatgggataatagtgttatacactacatgatatcacagagctggcagagttaatgagtatcttggacaattgcaccaaatgcaatggattgggatcactaaatcaagacgtaatttgatagaaataaagtgacctcttcctgatgtatctccaaggctcccttgctaccaacttcgcactaggtttggctgatggagataagaagaaagaatatatggatagtacatcttctaagcatttgtatctcttgaagtatgaagttcttgcctccatttctgacaggcaatttggctggaattatttgaaataatccctgtttgattatctgctggcattttagtgggagagatggggtctctctcttccccaggccggagtgctagagtgcactggcatgattacagctcactgcagcctcgacctcctgggctcaattgatcctctagcctcagcctctggtcctaggaaaactaacacagcaggcttatgctgatggagcagatgcaagcctgtgagccagcacggatttcccaggaacgttgctgttcgctaggccacgtgctggcctcacagctggtgatgagaaggcgaagacagagtcagcttaaccaaggcactgtgggctctgtgaaagcctt

SEQ ID NO: 7999 - protein, 55 aa, Homo sapiens
MYLQGSLATNFALGLADGDKKKEYMDSTSSKHLYLLKYEVLASISDRQFGWNYLK

SEQ ID NO: 8000 - DNA, 777 bp, Homo sapiens
agaattctaccagtgcacctcattcagacattcatcaagaaaaaggccagctgaaggcagacagccaacaaaactcagtcgttagccacagccctggctgtcctcgtccatcaagcctgcccattgtgagcttccattcatcttacctgtctgttatggaagagtgaagtggaaaaggcatggaggactcagaagacctgctaccgagaagagccccattgcaatcagaagattatttatggaaaaaagcaaaatggagatatttaaaagacggagagagacagcagaaagctgcttaagaaattgctttgagtccacaggagggaagcacaaaggagatgggataatagtgttatacactacatgatatcacagagctggcagagttaatgagtatcttggacaattgcaccaaatgcaatggattgggatcactaaatcaagacgtaatttgatagaaataaaggtaaggccactttattccagataccaactgcaaaagagacaagataatagagaaagtttgggctttagcagcactaatgattgaaaaagtcacagggctttagttagtatcagtcaactttatgaatcagctacccagaaaggctaatatgattttaggatgcactactataaatgaagtaactagaatgacaagaaaattgacctttattttatgccaatcattccacatcaaatgtgcctcaggttaggtgccaaactctaggaggctattcataaattaacctatattcggagaaaccaacaagtctg

SEQ ID NO: 8001 - protein, 39 aa, Homo sapiens
MEDSEDLLPRRAPLQSEDYLWKKAKWRYLKDGERQQKAA

SEQ ID NO: 8002 - DNA, 3766 bp, Homo sapiens
tattcttcctgttttacctcgccttgacccagaatgaagaaaacatttgcgatggaaaagtgactttgtaatatcaaatgccaaagctactatcattcagtgctacatgaactgtgactttaagaattttggtgaactttgatattttttgtttgtctgaaagaaaggaatgtgtaagtgaaagctgaaagaagaataaccaggatgatgagagctgtggaagctgtatcgtccaaggaattgattatgtaccgtgactgtaacttttttgtaatgctgtttaactctcaatcagactgtgaactggatggtcacgaagtcattccccaactcctagcaagtttgactgaatatatcatgtccacagtagattttcaagaatcatttatagtacttaactttaaagaaacaaggctgcttttaaaaaatgaactaataggcttaaatcaattgcatccatatttgctgtttataggattgctatcagtataccttttgcgtttatagtcaacatgtatcatcctgaaatattctttctggacttataactacttccccctttttcactttaaaacaaacctcaagaataaattactaaccagtcttaaccatcttttataaacatatgctcttataaatgttgtgactagatgcaattaaaaataatagggaatgtggtaggtttttaatttgtacatcctcttatttagtgttaccacataaatgatgagtttgtgtggttctgttttccatttttgttctaactgaaaactttttggctgggcacggtgcctcatgcgcctgtaatcccagctactcaggaggctgaggcaggagaatcgcttgaacctgggaggcaggggttgcagtgagctgagacggtgtcactgcactccagcctgggtgacagtgagtctttgtctcaaagaaaaaaagaaaaagaaaacttatgcaagtcgagctcctttttaattaagtaggaagggattaggttaagaaagtctctcaacatgacccatctttagcagtatctggggtgcttatttaagtatgcagtcccactaccctaccctagtcctacagaattagaatctgattcaaaataaagtctgaaaaccatgagatagagaattctatgaaatatcttgtacagattttcgtgatatatttatacacgcatgggtttgtagatccctgaaacttagaggtcatttagctaaaatctacattttttttaacttttaataggattgaaatgatattttacactgtatcacagatacagtattttatataactttttgtaactgaccttatcttggccttgagtcccatcctctctggtggtagcgtaaaactgaaaattccagtttgggtcaatatttagtgaaagttctactttcttttcagagagtttgttcccccctttcttccttagatgttttcaaacacacagccccatcctactcaaaccaagtgaagcaagagtggacaattctagaattggctgtgccatgtaggttttttttagaatttgaactgatttccttcattttgatgaggtggcaactgtccccattgtaatggtcaccattgcagcgaggatagccttacttctgcggcgcagagctcctcagggggcctctggctcctgtccttcctcaggtccatccaactactccttgggcctccttatggtagccctcattgtcttgagttgatttcactaggtttctgttctctgtcatctgcaacataactgacatggttctaaatctgtctctaaggagataacacattagtatattttctacactattgaagcctctacctaatgtatgacttttgtagctcaggtaaagagatctttttaccagtgttatcgtttctagtctgtttgttagtcttcttttaaatagatatggcctaaatcctgtattcctggctaggaagcacttctctccacccctctgctttgagttacaaattcaattcaatttcctatgtatttattaatacctacagataaagtactgtgctttgggggacacaaaggtgactggtacctgctcttttaggaggtcaccgtgcagaggatcctattctggtacaccaatagttataaagcaagccacagcctaggcaacatagtgagacccctgtctctactaaaaaattaaaaaaaaaaaaaaaagattggctaggtgtgctggtgcatgcatagagtcccagccactcgggaggctgaggtgggaggattgcttgagcctgggaggttgaggctgcagtgggccatgattgcacaacttggcaacagagtgagaccctgtctctaaatcaatcaatcaagcgagccagaatgcagtagtggcctgagagaggcatcctggaacgcagtgcggtctggctaggcttagaagtattcatgtgatttttacctgacaagggaaggaagagctgctccacgtgcagagcaaggtttcagaatgagaggagaagagcaggcactgcagagggtgagggaaagggcagcagtggactgggaagccctcaggtggaggtcagcattgcttccctcagatcatgggtgaatttgaggaactcagttaatatctttgtatgttcctccctccataaggtgagaacaagcacatgctctgcccatgtcagaaattgtctagactagtgtttttcaaagtgcaaaagcctcaacccattactgagttgagaagccaacttaatggtttaacaggattgaccagcattttttccgaaaaaatcaaaaacatctgagtgtactgcatatagaaataggtggttttgcctcatgaatattctgtttctgtgtgttcctatattttactttgtattgtgttggttttttaagagacagtcctgctctgtcatccaggctggagtgcagtggtataatcatagctcactgcaagactccttgaatccctgggctcaagcaatcctcaacccttagcctcccaagtagctgagactacaggcacatgccaccatgcccagctaatttttttttttttttaatttttgtagagacagcatcttgctatgttgcccaggctggtcttgaactcttggcctcaagcagtcctctcgatcctcccaccttggcctcctaaagtgctgagattacaggtgtgagccactgcatctggcttacttattttgtctattgtctgttccactagtatgtaaagtcttagagagcaagaatttttgtttatttctttctcttcctcctttcctttcttcctcttttacttcgttcactactgtattccacataaaatatatttggcatatagtaggtgttcaatatgttgaaggaatgaaagaatttatagacttgagttgcaatataaaatgtatttttttttactgtgagttatggcaaaaaaagttttgaaagccgcttctaaataatgcagatgtcagtgctttgaccctggaataaaaactgaaatgacttagtgatttcaaaggcatatttgttttcctgaacaatctataaactgtctcattaagttgtctcagttatttgcttcacttcggcaacagaacctcagcctttacatgtgtttaaagcctcttgaggcaaaggatttggaaaatatggttacatggagaatagaagataatgagagagagtatcaattcattagtgcagttgaacccctctattggaatcccatcagcgagcacaagtcccatttcaacagcaataaatgcaacaagt

SEQ ID NO: 8003 - protein, 100 aa, Homo sapiens [sequence omitted]

SEQ ID NO: 8004 - DNA, 1382 bp, Homo sapiens
tattcttcctgttttacctcgccttgacccagaatgaagaaaacatttgcgatggaaaagtgactttgtaatatcaaatgccaaagctactatcattcagtgctacatgaactgtgactttaagaattttggtgaactttgatattttttgtttgtctgaaagaaaggaatgtgtaagtgaaagctgaaagaagaataaccaggatgatgagagctgtggaagctgtatcgtccaaggaattgattatgtaccgtgactgtaacttttttgtaatgctgtttaactctcaatcagactgtgaactggatggtcacgaagtcattccccaactcctagcaagtttgactgaatatatcatgtccacagtagattttcaagaatcatttatagtacttaactttaaagaaacaaggctgcttttaaaaaatgaactaataggcttaaatcaattgcatccatatttgctgtttataggattgctatcagtataccttttgcgtttatagtcaacatgtatcatcctgaaatattctttctggacttataactacttccccctttttcactttaaaacaaacctcaagaataaattactaaccagtcttaaccatcttttataaacatatgctcttataaatgttgtgactagatgcaattaaaaataatagggaatgtggtaggtttttaatttgtacatcctcttatttagtgttaccacataaatgatgagtttgtgtggttctgttttccatttttgttctaactgaaaactttttggctgggcacgccactgcatctggcttacttattttgtctattgtctgttccactagtatgtaaagtcttagagagcaagaatttttgtttatttctttctcttcctcctttcctttcttcctcttttacttcgttcactactgtattccacataaaatatatttggcatatagtaggtgttcaatatgttgaaggaatgaaagaatttatagacttgagttgcaatataaaatgtatttttttttactgtgagttatggcaaaaaaagttttgaaagccgcttctaaataatgcagatgtcagtgctttgaccctggaataaaaactgaaatgacttagtgatttcaaaggcatatttgttttcctgaacaatctataaactgtctcattaagttgtctcagttatttgcttcacttcggcaacagaacctcagcctttacatgtgtttaaagcctcttgaggcaaaggatttggaaaatatggttacatggagaatagaagataatgagagagagtatcaattcattagtgcagttgaacccctctattggaatcccatcagcgagcacaagtcccatttcaacagcaataaatgcaacaagt

SEQ ID NO: 8005 - protein, 100 aa, Homo sapiens [sequence omitted]

SEQ ID NO: 8006 - DNA, 1491 bp, Homo sapiens
tattcttcctgttttacctcgccttgacccagaatgaagaaaacatttgcgatggaaaagtgactttgtaatatcaaatgccaaagctactatcattcagtgctacatgaactgtgactttaagaattttggtgaactttgatattttttgtttgtctgaaagaaaggaatgtgtaagtgaaagctgaaagaagaataaccaggatgatgagagctgtggaagctgtatcgtccaaggaattgattatgtaccgtgactgtaacttttttgtaatgctgtttaactctcaatcagactgtgaactggatggtcacgaagtcattccccaactcctagcaagtttgactgaatatatcatgtccacagtagattttcaagaatcatttatagtacttaactttaaagaaacaaggctgcttttaaaaaatgaactaataggcttaaatcaattgcatccatatttgctgtttataggattgctatcagtataccttttgcgtttatagtcaacatgtatcatcctgaaatattctttctggacttataactacttccccctttttcactttaaaacaaacctcaagaataaattactaaccagtcttaaccatcttttataaacatatgctcttataaatgttgtgactagatgcaattaaaaataatagggaatgtggtaggtttttaatttgtacatcctcttatttagtgttaccacataaatgatgagtttgtgtggttctgttttccatttttgttctaactgaaaactttttggctgggcacggtgcctcatgcctgtaatcccagcactttgggagcctgggaggttgaggctgcagtgggccatgattgcacaacttggcctcctaaagtgctgagattacaggtgtgagccactgcatctggcttacttattttgtctattgtctgttccactagtatgtaaagtcttagagagcaagaatttttgtttatttctttctcttcctcctttcctttcttcctcttttacttcgttcactactgtattccacataaaatatatttggcatatagtaggtgttcaatatgttgaaggaatgaaagaatttatagacttgagttgcaatataaaatgtatttttttttactgtgagttatggcaaaaaaagttttgaaagccgcttctaaataatgcagatgtcagtgctttgaccctggaataaaaactgaaatgacttagtgatttcaaaggcatatttgttttcctgaacaatctataaactgtctcattaagttgtctcagttatttgcttcacttcggcaacagaacctcagcctttacatgtgtttaaagcctcttgaggcaaaggatttggaaaatatggttacatggagaatagaagataatgagagagagtatcaattcattagtgcagttgaacccctctattggaatcccatcagcgagcacaagtcccatttcaacagcaataaatgcaacaagt

SEQ ID NO: 8007 - protein, 100 aa, Homo sapiens [sequence omitted]

SEQ ID NO: 8008 - DNA, 4179 bp, Homo sapiens
ctggagtgttaaaggcacgatcatggctcacggcagcctctacttcatgggctcaagcgatcctcctgcctcagcctcccaagtagctagcctacaggcacatgccaccaagcctgggttttcaaaacaaaaatagagttgcaatcttggcagaactggacaaagagaaaagaaaactacttatgcagaaccagtcttcaacaaatcatcctggagctagcatgctcatgcacattcatctggatacttcatcactcaagactctgcatttgggaaccttattcttcctgttttacctcgccttgacccagaatgaagaaaacatttgcgatggaaaagtgactttgtaatatcaaatgccaaagctactatcattcagtgctacatgaactgtgactttaagaattttggtgaactttgatattttttgtttgtctgaaagaaaggaatgtgtaagtgaaagctgaaagaagaataaccaggatgatgagagctgtggaagctgtatcgtccaaggaattgattatgtaccgtgactgtaacttttttgtaatgctgtttaactctcaatcagactgtgaactggatggtcacgaagtcattccccaactcctagcaagtttgactgaatatatcatgtccacagtagattttcaagaatcatttatagtacttaactttaaagaaacaaggctgcttttaaaaaatgaactaataggcttaaatcaattgcatccatatttgctgtttataggattgctatcagtataccttttgcgtttatagtcaacatgtatcatcctgaaatattctttctggacttataactacttccccctttttcactttaaaacaaacctcaagaataaattactaaccagtcttaaccatcttttataaacatatgctcttataaatgttgtgactagatgcaattaaaaataatagggaatgtggtaggtttttaatttgtacatcctcttatttagtgttaccacataaatgatgagtttgtgtggttctgttttccatttttgttctaactgaaaactttttggctgggcacggtgcctcatgcctgtaatcccagcactttgggaggccaaggcgggcagatcacttgagatcaggagtttgagaccagcctggccaacatggtgaaaccctgtctctactaaaagtataaaaaattagccatgtgtggtggcacacgcctgtaatcccagctactcaggaggctgaggcaggagaatcgcttgaacctgggaggcaggggttgcagtgagctgagacggtgtcactgcactccagcctgggtgacagtgagtctttgtctcaaagaaaaaaagaaaaagaaaacttatgcaagtcgagctcctttttaattaagtaggaagggattaggttaagaaagtctctcaacatgacccatctttagcagtatctggggtgcttatttaagtatgcagtcccactaccctaccctagtcctacagaattagaatctgattcaaaataaagtctgaaaaccatgagatagagaattctatgaaatatcttgtacagattttcgtgatatatttatacacgcatgggtttgtagatccctgaaacttagaggtcatttagctaaaatctacattttttttaacttttaataggattgaaatgatattttacactgtatcacagatacagtattttatataactttttgtaactgaccttatcttggccttgagtcccatcctctctggtggtagcgtaaaactgaaaattccagtttgggtcaatatttagtgaaagttctactttcttttcagagagtttgttcccccctttcttccttagatgttttcaaacacacagccccatcctactcaaaccaagtgaagcaagagtggacaattctagaattggctgtgccatgtaggttttttttagaatttgaactgatttccttcattttgatgaggtggcaactgtccccattgtaatggtcaccattgcagcgaggatagccttacttctgcggcgcagagctcctcagggggcctctggctcctgtccttcctcaggtccatccaactactccttgggcctccttatggtagccctcattgtcttgagttgatttcactaggtttctgttctctgtcatctgcaacataactgacatggttctaaatctgtctctaaggagataacacattagtatattttctacactattgaagcctctacctaatgtatgacttttgtagctcaggtaaagagatctttttaccagtgttatcgtttctagtctgtttgttagtcttcttttaaatagatatggcctaaatcctgtattcctggctaggaagcacttctctccacccctctgctttgagttacaaattcaattcaatttcctatgtatttattaatacctacagataaagtactgtgctttgggggacacaaaggtgactggtacctgctcttttaggaggtcaccgtgcagaggatcctattctggtacaccaatagttataaagcaagccacagcctaggcaacatagtgagacccctgtctctactaaaaaattaaaaaaaaaaaaaaaagattggctaggtgtgctggtgcatgcatagagtcccagccactcgggaggctgaggtgggaggattgcttgagcctgggaggttgaggctgcagtgggccatgattgcacaacttggcaacagagtgagaccctgtctctaaatcaatcaatcaagcgagccagaatgcagtagtggcctgagagaggcatcctggaacgcagtgcggtctggctaggcttagaagtattcatgtgatttttacctgacaagggaaggaagagctgctccacgtgcagagcaaggtttcagaatgagaggagaagagcaggcactgcagagggtgagggaaagggcagcagtggactgggaagccctcaggtggaggtcagcattgcttccctcagatcatgggtgaatttgaggaactcagttaatatctttgtatgttcctccctccataaggtgagaacaagcacatgctctgcccatgtcagaaattgtctagactagtgtttttcaaagtgcaaaagcctcaacccattactgagttgagaagccaacttaatggtttaacaggattgaccagcattttttccgaaaaaatcaaaaacatctgagtgtactgcatatagaaataggtggttttgcctcatgaatattctgtttctgtgtgttcctatattttactttgtattgtgttggttttttaagagacagtcctgctctgtcatccaggctggagtgcagtggtataatcatagctcactgcaagactccttgaatccctgggctcaagcaatcctcaacccttagcctcccaagtagctgagactacaggcacatgccaccatgcccagctaatttttttttttttttaatttttgtagagacagcatcttgctatgttgcccaggctggtcttgaactcttggcctcaagcagtcctctcgatcctcccaccttggcctcctaaagtgctgagattacaggtgtgagccactgcatctggcttacttattttgtctattgtctgttccactagtatgtaaagtcttagagagcaagaatttttgtttatttctttctcttcctcctttcctttcttcctcttttacttcgttcactactgtattccacataaaatatatttggcatatagtaggtgttcaatatgttgaaggaatgaaagaatttatagacttgagttgcaatataaaatgtatttttttttactgtgagttatggcaaaaaaagttttgaaagccgcttctaaataatgcagatgtcagtgctttgaccctggaataaaaactgaaatgacttagtgatttcaaaggcatatttgttttcctgaacaatctataaactgtctcattaagttgtctcagttatttgcttcacttcggcaacagaacctcagcctttacatgtgtttaaagcctcttgaggcaaaggatttggaaaatatggttacatggagaatagaagataatgagagagagtatcaattcattagtgcagttgaacccctctattggaatcccatcagcgagcacaagtcccatttcaacagcaataaatgcaacaagt

SEQ ID NO: 8009 - protein, 82 aa, Homo sapiens
MPPSLGFQNKNRVAILAELDKEKRKLLMQNQSSTNHPGASMLMHIHLDTSSLKTLHLGTLFFLFYLALTQNEENICDGKVTL

SEQ ID NO: 8010 - DNA, 3152 bp, Homo sapiens
ccctttaagagcagcgattgtaaggagaggcggtcccggtgtcctcgggtcccaggtgattgtgaagtgctgaccaattgccactggacatacttgagatcaggagtttgagaccagcctggccaacatggtgaaaccctgtctctactaaaagtataaaaaattagccatgtgtggtggcacacgcctgtaatcccagctactcaggaggctgaggcaggagaatcgcttgaacctgggaggcaggggttgcagtgagctgagacggtgtcactgcactccagcctgggtgacagtgagtctttgtctcaaagaaaaaaagaaaaagaaaacttatgcaagtcgagctcctttttaattaagtaggaagggattaggttaagaaagtctctcaacatgacccatctttagcagtatctggggtgcttatttaagtatgcagtcccactaccctaccctagtcctacagaattagaatctgattcaaaataaagtctgaaaaccatgagatagagaattctatgaaatatcttgtacagattttcgtgatatatttatacacgcatgggtttgtagatccctgaaacttagaggtcatttagctaaaatctacattttttttaacttttaataggattgaaatgatattttacactgtatcacagatacagtattttatataactttttgtaactgaccttatcttggccttgagtcccatcctctctggtggtagcgtaaaactgaaaattccagtttgggtcaatatttagtgaaagttctactttcttttcagagagtttgttcccccctttcttccttagatgttttcaaacacacagccccatcctactcaaaccaagtgaagcaagagtggacaattctagaattggctgtgccatgtaggttttttttagaatttgaactgatttccttcattttgatgaggtggcaactgtccccattgtaatggtcaccattgcagcgaggatagccttacttctgcggcgcagagctcctcagggggcctctggctcctgtccttcctcaggtccatccaactactccttgggcctccttatggtagccctcattgtcttgagttgatttcactaggtttctgttctctgtcatctgcaacataactgacatggttctaaatctgtctctaaggagataacacattagtatattttctacactattgaagcctctacctaatgtatgacttttgtagctcaggtaaagagatctttttaccagtgttatcgtttctagtctgtttgttagtcttcttttaaatagatatggcctaaatcctgtattcctggctaggaagcacttctctccacccctctgctttgagttacaaattcaattcaatttcctatgtatttattaatacctacagataaagtactgtgctttgggggacacaaaggtgactggtacctgctcttttaggaggtcaccgtgcagaggatcctattctggtacaccaatagttataaagcaagccacagcctaggcaacatagtgagacccctgtctctactaaaaaattaaaaaaaaaaaaaaaagattggctaggtgtgctggtgcatgcatagagtcccagccactcgggaggctgaggtgggaggattgcttgagcctgggaggttgaggctgcagtgggccatgattgcacaacttggcaacagagtgagaccctgtctctaaatcaatcaatcaagcgagccagaatgcagtagtggcctgagagaggcatcctggaacgcagtgcggtctggctaggcttagaagtattcatgtgatttttacctgacaagggaaggaagagctgctccacgtgcagagcaaggtttcagaatgagaggagaagagcaggcactgcagagggtgagggaaagggcagcagtggactgggaagccctcaggtggaggtcagcattgcttccctcagatcatgggtgaatttgaggaactcagttaatatctttgtatgttcctccctccataaggtgagaacaagcacatgctctgcccatgtcagaaattgtctagactagtgtttttcaaagtgcaaaagcctcaacccattactgagttgagaagccaacttaatggtttaacaggattgaccagcattttttccgaaaaaatcaaaaacatctgagtgtactgcatatagaaataggtggttttgcctcatgaatattctgtttctgtgtgttcctatattttactttgtattgtgttggttttttaagagacagtcctgctctgtcatccaggctggagtgcagtggtataatcatagctcactgcaagactccttgaatccctgggctcaagcaatcctcaacccttagcctcccaagtagctgagactacaggcacatgccaccatgcccagctaatttttttttttttttaatttttgtagagacagcatcttgctatgttgcccaggctggtcttgaactcttggcctcaagcagtcctctcgatcctcccaccttggcctcctaaagtgctgagattacaggtgtgagccactgcatctggcttacttattttgtctattgtctgttccactagtatgtaaagtcttagagagcaagaatttttgtttatttctttctcttcctcctttcctttcttcctcttttacttcgttcactactgtattccacataaaatatatttggcatatagtaggtgttcaatatgttgaaggaatgaaagaatttatagacttgagttgcaatataaaatgtatttttttttactgtgagttatggcaaaaaaagttttgaaagccgcttctaaataatgcagatgtcagtgctttgaccctggaataaaaactgaaatgacttagtgatttcaaaggcatatttgttttcctgaacaatctataaactgtctcattaagttgtctcagttatttgcttcacttcggcaacagaacctcagcctttacatgtgtttaaagcctcttgaggcaaaggatttggaaaatatggttacatggagaatagaagataatgagagagagtatcaattcattagtgcagttgaacccctctattggaatcccatcagcgagcacaagtcccatttcaacagcaataaatgcaacaagt

SEQ ID NO: 8011 - protein, 53 aa, Homo sapiens
MCLKPLEAKDLENMVTWRIEDNEREYQFISAVEPLYWNPISEHKSHFNSNKCN

SEQ ID NO: 8012 - DNA, 4229 bp, Homo sapiens
gtagtgccgcgagttgagctcctcttgcctaagtggtcgcgccccctttaagagcagcgattgtaaggagaggcggtcccggtgtcctcgggtcccaggtgattgtgaagtgctgaccaattgccactggacatacttgaaacaaaataggaaaatggcagcaaactcttcaggacaagcattgcactctcgagaccctctcttaataaggacttccgggatcacgctgagcagcagcatattgcagcccaacagaaggcagctttgcagcatgctcatgcacattcatctggatacttcatcactcaagactctgcatttgggaaccttattcttcctgttttacctcgccttgacccagaatgaagaaaacatttgcgatggaaaagtgactttgtaatatcaaatgccaaagctactatcattcagtgctacatgaactgtgactttaagaattttggtgaactttgatattttttgtttgtctgaaagaaaggaatgtgtaagtgaaagctgaaagaagaataaccaggatgatgagagctgtggaagctgtatcgtccaaggaattgattatgtaccgtgactgtaacttttttgtaatgctgtttaactctcaatcagactgtgaactggatggtcacgaagtcattccccaactcctagcaagtttgactgaatatatcatgtccacagtagattttcaagaatcatttatagtacttaactttaaagaaacaaggctgcttttaaaaaatgaactaataggcttaaatcaattgcatccatatttgctgtttataggattgctatcagtataccttttgcgtttatagtcaacatgtatcatcctgaaatattctttctggacttataactacttccccctttttcactttaaaacaaacctcaagaataaattactaaccagtcttaaccatcttttataaacatatgctcttataaatgttgtgactagatgcaattaaaaataatagggaatgtggtaggtttttaatttgtacatcctcttatttagtgttaccacataaatgatgagtttgtgtggttctgttttccatttttgttctaactgaaaactttttggctgggcacggtgcctcatgcctgtaatcccagcactttgggaggccaaggcgggcagatcacttgagatcaggagtttgagaccagcctggccaacatggtgaaaccctgtctctactaaaagtataaaaaattagccatgtgtggtggcacacgcctgtaatcccagctactcaggaggctgaggcaggagaatcgcttgaacctgggaggcaggggttgcagtgagctgagacggtgtcactgcactccagcctgggtgacagtgagtctttgtctcaaagaaaaaaagaaaaagaaaacttatgcaagtcgagctcctttttaattaagtaggaagggattaggttaagaaagtctctcaacatgacccatctttagcagtatctggggtgcttatttaagtatgcagtcccactaccctaccctagtcctacagaattagaatctgattcaaaataaagtctgaaaaccatgagatagagaattctatgaaatatcttgtacagattttcgtgatatatttatacacgcatgggtttgtagatccctgaaacttagaggtcatttagctaaaatctacattttttttaacttttaataggattgaaatgatattttacactgtatcacagatacagtattttatataactttttgtaactgaccttatcttggccttgagtcccatcctctctggtggtagcgtaaaactgaaaattccagtttgggtcaatatttagtgaaagttctactttcttttcagagagtttgttcccccctttcttccttagatgttttcaaacacacagccccatcctactcaaaccaagtgaagcaagagtggacaattctagaattggctgtgccatgtaggttttttttagaatttgaactgatttccttcattttgatgaggtggcaactgtccccattgtaatggtcaccattgcagcgaggatagccttacttctgcggcgcagagctcctcagggggcctctggctcctgtccttcctcaggtccatccaactactccttgggcctccttatggtagccctcattgtcttgagttgatttcactaggtttctgttctctgtcatctgcaacataactgacatggttctaaatctgtctctaaggagataacacattagtatattttctacactattgaagcctctacctaatgtatgacttttgtagctcaggtaaagagatctttttaccagtgttatcgtttctagtctgtttgttagtcttcttttaaatagatatggcctaaatcctgtattcctggctaggaagcacttctctccacccctctgctttgagttacaaattcaattcaatttcctatgtatttattaatacctacagataaagtactgtgctttgggggacacaaaggtgactggtacctgctcttttaggaggtcaccgtgcagaggatcctattctggtacaccaatagttataaagcaagccacagcctaggcaacatagtgagacccctgtctctactaaaaaattaaaaaaaaaaaaaaaagattggctaggtgtgctggtgcatgcatagagtcccagccactcgggaggctgaggtgggaggattgcttgagcctgggaggttgaggctgcagtgggccatgattgcacaacttggcaacagagtgagaccctgtctctaaatcaatcaatcaagcgagccagaatgcagtagtggcctgagagaggcatcctggaacgcagtgcggtctggctaggcttagaagtattcatgtgatttttacctgacaagggaaggaagagctgctccacgtgcagagcaaggtttcagaatgagaggagaagagcaggcactgcagagggtgagggaaagggcagcagtggactgggaagccctcaggtggaggtcagcattgcttccctcagatcatgggtgaatttgaggaactcagttaatatctttgtatgttcctccctccataaggtgagaacaagcacatgctctgcccatgtcagaaattgtctagactagtgtttttcaaagtgcaaaagcctcaacccattactgagttgagaagccaacttaatggtttaacaggattgaccagcattttttccgaaaaaatcaaaaacatctgagtgtactgcatatagaaataggtggttttgcctcatgaatattctgtttctgtgtgttcctatattttactttgtattgtgttggttttttaagagacagtcctgctctgtcatccaggctggagtgcagtggtataatcatagctcactgcaagactccttgaatccctgggctcaagcaatcctcaacccttagcctcccaagtagctgagactacaggcacatgccaccatgcccagctaatttttttttttttttaatttttgtagagacagcatcttgctatgttgcccaggctggtcttgaactcttggcctcaagcagtcctctcgatcctcccaccttggcctcctaaagtgctgagattacaggtgtgagccactgcatctggcttacttattttgtctattgtctgttccactagtatgtaaagtcttagagagcaagaatttttgtttatttctttctcttcctcctttcctttcttcctcttttacttcgttcactactgtattccacataaaatatatttggcatatagtaggtgttcaatatgttgaaggaatgaaagaatttatagacttgagttgcaatataaaatgtatttttttttactgtgagttatggcaaaaaaagttttgaaagccgcttctaaataatgcagatgtcagtgctttgaccctggaataaaaactgaaatgacttagtgatttcaaaggcatatttgttttcctgaacaatctataaactgtctcattaagttgtctcagttatttgcttcacttcggcaacagaacctcagcctttacatgtgtttaaagcctcttgaggcaaaggatttggaaaatatggttacatggagaatagaagataatgagagagagtatcaattcattagtgcagttgaacccctctattggaatcccatcagcgagcacaagtcccatttcaacagcaataaatgcaacaagt

SEQ ID NO: 8013 - protein, 81 aa, Homo sapiens
MAANSSGQALHSRDPLLIRTSGITLSSSILQPNRRQLCSMLMHIHLDTSSLKTLHLGTLFFLFYLALTQNEENICDGKVTL

SEQ ID NO: 8014 - DNA, 4336 bp, Homo sapiens
ttgtagtgccgcgagttgagctcctcttgcctaagtggtcgcgccccctttaagagcagcgattgtaaggagaggcggtcccggtgtcctcgggtcccaggtgattgtgaagtgctgaccaattgccactggacatacttgaaacaaaataggaaaatggcagcaaactcttcaggacaagacaaggtctcgctgtgttgcccaggctgatcttgaactcctggcctcaggtgatcctcctgcctcaacttcccaaagcactaggattacaaatgttttcaaaacaaaaatagagttgcaatcttggcagaactggacaaagagaaaagaaaactacttatgcagaaccagtcttcaacaaatcatcctggagctagcatgctcatgcacattcatctggatacttcatcactcaagactctgcatttgggaaccttattcttcctgttttacctcgccttgacccagaatgaagaaaacatttgcgatggaaaagtgactttgtaatatcaaatgccaaagctactatcattcagtgctacatgaactgtgactttaagaattttggtgaactttgatattttttgtttgtctgaaagaaaggaatgtgtaagtgaaagctgaaagaagaataaccaggatgatgagagctgtggaagctgtatcgtccaaggaattgattatgtaccgtgactgtaacttttttgtaatgctgtttaactctcaatcagactgtgaactggatggtcacgaagtcattccccaactcctagcaagtttgactgaatatatcatgtccacagtagattttcaagaatcatttatagtacttaactttaaagaaacaaggctgcttttaaaaaatgaactaataggcttaaatcaattgcatccatatttgctgtttataggattgctatcagtataccttttgcgtttatagtcaacatgtatcatcctgaaatattctttctggacttataactacttccccctttttcactttaaaacaaacctcaagaataaattactaaccagtcttaaccatcttttataaacatatgctcttataaatgttgtgactagatgcaattaaaaataatagggaatgtggtaggtttttaatttgtacatcctcttatttagtgttaccacataaatgatgagtttgtgtggttctgttttccatttttgttctaactgaaaactttttggctgggcacggtgcctcatgcctgtaatcccagcactttgggaggccaaggcgggcagatcacttgagatcaggagtttgagaccagcctggccaacatggtgaaaccctgtctctactaaaagtataaaaaattagccatgtgtggtggcacacgcctgtaatcccagctactcaggaggctgaggcaggagaatcgcttgaacctgggaggcaggggttgcagtgagctgagacggtgtcactgcactccagcctgggtgacagtgagtctttgtctcaaagaaaaaaagaaaaagaaaacttatgcaagtcgagctcctttttaattaagtaggaagggattaggttaagaaagtctctcaacatgacccatctttagcagtatctggggtgcttatttaagtatgcagtcccactaccctaccctagtcctacagaattagaatctgattcaaaataaagtctgaaaaccatgagatagagaattctatgaaatatcttgtacagattttcgtgatatatttatacacgcatgggtttgtagatccctgaaacttagaggtcatttagctaaaatctacattttttttaacttttaataggattgaaatgatattttacactgtatcacagatacagtattttatataactttttgtaactgaccttatcttggccttgagtcccatcctctctggtggtagcgtaaaactgaaaattccagtttgggtcaatatttagtgaaagttctactttcttttcagagagtttgttcccccctttcttccttagatgttttcaaacacacagccccatcctactcaaaccaagtgaagcaagagtggacaattctagaattggctgtgccatgtaggttttttttagaatttgaactgatttccttcattttgatgaggtggcaactgtccccattgtaatggtcaccattgcagcgaggatagccttacttctgcggcgcagagctcctcagggggcctctggctcctgtccttcctcaggtccatccaactactccttgggcctccttatggtagccctcattgtcttgagttgatttcactaggtttctgttctctgtcatctgcaacataactgacatggttctaaatctgtctctaaggagataacacattagtatattttctacactattgaagcctctacctaatgtatgacttttgtagctcaggtaaagagatctttttaccagtgttatcgtttctagtctgtttgttagtcttcttttaaatagatatggcctaaatcctgtattcctggctaggaagcacttctctccacccctctgctttgagttacaaattcaattcaatttcctatgtatttattaatacctacagataaagtactgtgctttgggggacacaaaggtgactggtacctgctcttttaggaggtcaccgtgcagaggatcctattctggtacaccaatagttataaagcaagccacagcctaggcaacatagtgagacccctgtctctactaaaaaattaaaaaaaaaaaaaaaagattggctaggtgtgctggtgcatgcatagagtcccagccactcgggaggctgaggtgggaggattgcttgagcctgggaggttgaggctgcagtgggccatgattgcacaacttggcaacagagtgagaccctgtctctaaatcaatcaatcaagcgagccagaatgcagtagtggcctgagagaggcatcctggaacgcagtgcggtctggctaggcttagaagtattcatgtgatttttacctgacaagggaaggaagagctgctccacgtgcagagcaaggtttcagaatgagaggagaagagcaggcactgcagagggtgagggaaagggcagcagtggactgggaagccctcaggtggaggtcagcattgcttccctcagatcatgggtgaatttgaggaactcagttaatatctttgtatgttcctccctccataaggtgagaacaagcacatgctctgcccatgtcagaaattgtctagactagtgtttttcaaagtgcaaaagcctcaacccattactgagttgagaagccaacttaatggtttaacaggattgaccagcattttttccgaaaaaatcaaaaacatctgagtgtactgcatatagaaataggtggttttgcctcatgaatattctgtttctgtgtgttcctatattttactttgtattgtgttggttttttaagagacagtcctgctctgtcatccaggctggagtgcagtggtataatcatagctcactgcaagactccttgaatccctgggctcaagcaatcctcaacccttagcctcccaagtagctgagactacaggcacatgccaccatgcccagctaatttttttttttttttaatttttgtagagacagcatcttgctatgttgcccaggctggtcttgaactcttggcctcaagcagtcctctcgatcctcccaccttggcctcctaaagtgctgagattacaggtgtgagccactgcatctggcttacttattttgtctattgtctgttccactagtatgtaaagtcttagagagcaagaatttttgtttatttctttctcttcctcctttcctttcttcctcttttacttcgttcactactgtattccacataaaatatatttggcatatagtaggtgttcaatatgttgaaggaatgaaagaatttatagacttgagttgcaatataaaatgtatttttttttactgtgagttatggcaaaaaaagttttgaaagccgcttctaaataatgcagatgtcagtgctttgaccctggaataaaaactgaaatgacttagtgatttcaaaggcatatttgttttcctgaacaatctataaactgtctcattaagttgtctcagttatttgcttcacttcggcaacagaacctcagcctttacatgtgtttaaagcctcttgaggcaaaggatttggaaaatatggttacatggagaatagaagataatgagagagagtatcaattcattagtgcagttgaacccctctattggaatcccatcagcgagcacaagtcccatttcaacagcaataaatgcaacaagt

SEQ ID NO: 8015 - protein, 55 aa, Homo sapiens
MQNQSSTNHPGASMLMHIHLDTSSLKTLHLGTLFFLFYLALTQNEENICDGKVTL

SEQ ID NO: 8016 - DNA, 4243 bp, Homo sapiens
ttgtagtgccgcgagttgagctcctcttgcctaagtggtcgcgccccctttaagagcagcgattgtaaggagaggcggtcccggtgtcctcgggtcccaggtgattgtgaagtgctgaccaattgccactggacatacttgaaacaaaataggaaaatggcagcaaactcttcaggacaaggttttcaaaacaaaaatagagttgcaatcttggcagaactggacaaagagaaaagaaaactacttatgcagaaccagtcttcaacaaatcatcctggagctagcatgctcatgcacattcatctggatacttcatcactcaagactctgcatttgggaaccttattcttcctgttttacctcgccttgacccagaatgaagaaaacatttgcgatggaaaagtgactttgtaatatcaaatgccaaagctactatcattcagtgctacatgaactgtgactttaagaattttggtgaactttgatattttttgtttgtctgaaagaaaggaatgtgtaagtgaaagctgaaagaagaataaccaggatgatgagagctgtggaagctgtatcgtccaaggaattgattatgtaccgtgactgtaacttttttgtaatgctgtttaactctcaatcagactgtgaactggatggtcacgaagtcattccccaactcctagcaagtttgactgaatatatcatgtccacagtagattttcaagaatcatttatagtacttaactttaaagaaacaaggctgcttttaaaaaatgaactaataggcttaaatcaattgcatccatatttgctgtttataggattgctatcagtataccttttgcgtttatagtcaacatgtatcatcctgaaatattctttctggacttataactacttccccctttttcactttaaaacaaacctcaagaataaattactaaccagtcttaaccatcttttataaacatatgctcttataaatgttgtgactagatgcaattaaaaataatagggaatgtggtaggtttttaatttgtacatcctcttatttagtgttaccacataaatgatgagtttgtgtggttctgttttccatttttgttctaactgaaaactttttggctgggcacggtgcctcatgcctgtaatcccagcactttgggaggccaaggcgggcagatcacttgagatcaggagtttgagaccagcctggccaacatggtgaaaccctgtctctactaaaagtataaaaaattagccatgtgtggtggcacacgcctgtaatcccagctactcaggaggctgaggcaggagaatcgcttgaacctgggaggcaggggttgcagtgagctgagacggtgtcactgcactccagcctgggtgacagtgagtctttgtctcaaagaaaaaaagaaaaagaaaacttatgcaagtcgagctcctttttaattaagtaggaagggattaggttaagaaagtctctcaacatgacccatctttagcagtatctggggtgcttatttaagtatgcagtcccactaccctaccctagtcctacagaattagaatctgattcaaaataaagtctgaaaaccatgagatagagaattctatgaaatatcttgtacagattttcgtgatatatttatacacgcatgggtttgtagatccctgaaacttagaggtcatttagctaaaatctacattttttttaacttttaataggattgaaatgatattttacactgtatcacagatacagtattttatataactttttgtaactgaccttatcttggccttgagtcccatcctctctggtggtagcgtaaaactgaaaattccagtttgggtcaatatttagtgaaagttctactttcttttcagagagtttgttcccccctttcttccttagatgttttcaaacacacagccccatcctactcaaaccaagtgaagcaagagtggacaattctagaattggctgtgccatgtaggttttttttagaatttgaactgatttccttcattttgatgaggtggcaactgtccccattgtaatggtcaccattgcagcgaggatagccttacttctgcggcgcagagctcctcagggggcctctggctcctgtccttcctcaggtccatccaactactccttgggcctccttatggtagccctcattgtcttgagttgatttcactaggtttctgttctctgtcatctgcaacataactgacatggttctaaatctgtctctaaggagataacacattagtatattttctacactattgaagcctctacctaatgtatgacttttgtagctcaggtaaagagatctttttaccagtgttatcgtttctagtctgtttgttagtcttcttttaaatagatatggcctaaatcctgtattcctggctaggaagcacttctctccacccctctgctttgagttacaaattcaattcaatttcctatgtatttattaatacctacagataaagtactgtgctttgggggacacaaaggtgactggtacctgctcttttaggaggtcaccgtgcagaggatcctattctggtacaccaatagttataaagcaagccacagcctaggcaacatagtgagacccctgtctctactaaaaaattaaaaaaaaaaaaaaaagattggctaggtgtgctggtgcatgcatagagtcccagccactcgggaggctgaggtgggaggattgcttgagcctgggaggttgaggctgcagtgggccatgattgcacaacttggcaacagagtgagaccctgtctctaaatcaatcaatcaagcgagccagaatgcagtagtggcctgagagaggcatcctggaacgcagtgcggtctggctaggcttagaagtattcatgtgatttttacctgacaagggaaggaagagctgctccacgtgcagagcaaggtttcagaatgagaggagaagagcaggcactgcagagggtgagggaaagggcagcagtggactgggaagccctcaggtggaggtcagcattgcttccctcagatcatgggtgaatttgaggaactcagttaatatctttgtatgttcctccctccataaggtgagaacaagcacatgctctgcccatgtcagaaattgtctagactagtgtttttcaaagtgcaaaagcctcaacccattactgagttgagaagccaacttaatggtttaacaggattgaccagcattttttccgaaaaaatcaaaaacatctgagtgtactgcatatagaaataggtggttttgcctcatgaatattctgtttctgtgtgttcctatattttactttgtattgtgttggttttttaagagacagtcctgctctgtcatccaggctggagtgcagtggtataatcatagctcactgcaagactccttgaatccctgggctcaagcaatcctcaacccttagcctcccaagtagctgagactacaggcacatgccaccatgcccagctaatttttttttttttttaatttttgtagagacagcatcttgctatgttgcccaggctggtcttgaactcttggcctcaagcagtcctctcgatcctcccaccttggcctcctaaagtgctgagattacaggtgtgagccactgcatctggcttacttattttgtctattgtctgttccactagtatgtaaagtcttagagagcaagaatttttgtttatttctttctcttcctcctttcctttcttcctcttttacttcgttcactactgtattccacataaaatatatttggcatatagtaggtgttcaatatgttgaaggaatgaaagaatttatagacttgagttgcaatataaaatgtatttttttttactgtgagttatggcaaaaaaagttttgaaagccgcttctaaataatgcagatgtcagtgctttgaccctggaataaaaactgaaatgacttagtgatttcaaaggcatatttgttttcctgaacaatctataaactgtctcattaagttgtctcagttatttgcttcacttcggcaacagaacctcagcctttacatgtgtttaaagcctcttgaggcaaaggatttggaaaatatggttacatggagaatagaagataatgagagagagtatcaattcattagtgcagttgaacccctctattggaatcccatcagcgagcacaagtcccatttcaacagcaataaatgcaacaagt

SEQ ID NO: 8017 - protein, 85 aa, Homo sapiens
MAANSSGQGFQNKNRVAILAELDKEKRKLLMQNQSSTNHPGASMLMHIHLDTSSLKTLHLGTLFFLFYLALTQNEENICDGKVTL

SEQ ID NO: 8018 - DNA, 4398 bp, Homo sapiens
gcgggggcgggaaggttgtagtgccgcgagttgagctcctcttgcctaagtggtcgcgccccctttaagagcagcgattgtaaggagaggcggtcccggtgtcctcgggtcccaggtgattgtgaagtgctgaccaattgccactggacatacttgaaacaaaataggaaaatggcagcaaactcttcaggacaagacaaggtctcgctgtgttgcccaggctgatcttgaactcctggcctcaggttttcaaaacaaaaatagagttgcaatcttggcagaactggacaaagagaaaagaaaactacttatgcagaaccagtcttcaacaaatcatcctggagctagcattgcactctcgagaccctctcttaataaggacttccgggatcacgctgagcagcagcatattgcagcccaacagaaggcagctttgcagcatgctcatgcacattcatctggatacttcatcactcaagactctgcatttgggaaccttattcttcctgttttacctcgccttgacccagaatgaagaaaacatttgcgatggaaaagtgactttgtaatatcaaatgccaaagctactatcattcagtgctacatgaactgtgactttaagaattttggtgaactttgatattttttgtttgtctgaaagaaaggaatgtgtaagtgaaagctgaaagaagaataaccaggatgatgagagctgtggaagctgtatcgtccaaggaattgattatgtaccgtgactgtaacttttttgtaatgctgtttaactctcaatcagactgtgaactggatggtcacgaagtcattccccaactcctagcaagtttgactgaatatatcatgtccacagtagattttcaagaatcatttatagtacttaactttaaagaaacaaggctgcttttaaaaaatgaactaataggcttaaatcaattgcatccatatttgctgtttataggattgctatcagtataccttttgcgtttatagtcaacatgtatcatcctgaaatattctttctggacttataactacttccccctttttcactttaaaacaaacctcaagaataaattactaaccagtcttaaccatcttttataaacatatgctcttataaatgttgtgactagatgcaattaaaaataatagggaatgtggtaggtttttaatttgtacatcctcttatttagtgttaccacataaatgatgagtttgtgtggttctgttttccatttttgttctaactgaaaactttttggctgggcacggtgcctcatgcctgtaatcccagcactttgggaggccaaggcgggcagatcacttgagatcaggagtttgagaccagcctggccaacatggtgaaaccctgtctctactaaaagtataaaaaattagccatgtgtggtggcacacgcctgtaatcccagctactcaggaggctgaggcaggagaatcgcttgaacctgggaggcaggggttgcagtgagctgagacggtgtcactgcactccagcctgggtgacagtgagtctttgtctcaaagaaaaaaagaaaaagaaaacttatgcaagtcgagctcctttttaattaagtaggaagggattaggttaagaaagtctctcaacatgacccatctttagcagtatctggggtgcttatttaagtatgcagtcccactaccctaccctagtcctacagaattagaatctgattcaaaataaagtctgaaaaccatgagatagagaattctatgaaatatcttgtacagattttcgtgatatatttatacacgcatgggtttgtagatccctgaaacttagaggtcatttagctaaaatctacattttttttaacttttaataggattgaaatgatattttacactgtatcacagatacagtattttatataactttttgtaactgaccttatcttggccttgagtcccatcctctctggtggtagcgtaaaactgaaaattccagtttgggtcaatatttagtgaaagttctactttcttttcagagagtttgttcccccctttcttccttagatgttttcaaacacacagccccatcctactcaaaccaagtgaagcaagagtggacaattctagaattggctgtgccatgtaggttttttttagaatttgaactgatttccttcattttgatgaggtggcaactgtccccattgtaatggtcaccattgcagcgaggatagccttacttctgcggcgcagagctcctcagggggcctctggctcctgtccttcctcaggtccatccaactactccttgggcctccttatggtagccctcattgtcttgagttgatttcactaggtttctgttctctgtcatctgcaacataactgacatggttctaaatctgtctctaaggagataacacattagtatattttctacactattgaagcctctacctaatgtatgacttttgtagctcaggtaaagagatctttttaccagtgttatcgtttctagtctgtttgttagtcttcttttaaatagatatggcctaaatcctgtattcctggctaggaagcacttctctccacccctctgctttgagttacaaattcaattcaatttcctatgtatttattaatacctacagataaagtactgtgctttgggggacacaaaggtgactggtacctgctcttttaggaggtcaccgtgcagaggatcctattctggtacaccaatagttataaagcaagccacagcctaggcaacatagtgagacccctgtctctactaaaaaattaaaaaaaaaaaaaaaagattggctaggtgtgctggtgcatgcatagagtcccagccactcgggaggctgaggtgggaggattgcttgagcctgggaggttgaggctgcagtgggccatgattgcacaacttggcaacagagtgagaccctgtctctaaatcaatcaatcaagcgagccagaatgcagtagtggcctgagagaggcatcctggaacgcagtgcggtctggctaggcttagaagtattcatgtgatttttacctgacaagggaaggaagagctgctccacgtgcagagcaaggtttcagaatgagaggagaagagcaggcactgcagagggtgagggaaagggcagcagtggactgggaagccctcaggtggaggtcagcattgcttccctcagatcatgggtgaatttgaggaactcagttaatatctttgtatgttcctccctccataaggtgagaacaagcacatgctctgcccatgtcagaaattgtctagactagtgtttttcaaagtgcaaaagcctcaacccattactgagttgagaagccaacttaatggtttaacaggattgaccagcattttttccgaaaaaatcaaaaacatctgagtgtactgcatatagaaataggtggttttgcctcatgaatattctgtttctgtgtgttcctatattttactttgtattgtgttggttttttaagagacagtcctgctctgtcatccaggctggagtgcagtggtataatcatagctcactgcaagactccttgaatccctgggctcaagcaatcctcaacccttagcctcccaagtagctgagactacaggcacatgccaccatgcccagctaatttttttttttttttaatttttgtagagacagcatcttgctatgttgcccaggctggtcttgaactcttggcctcaagcagtcctctcgatcctcccaccttggcctcctaaagtgctgagattacaggtgtgagccactgcatctggcttacttattttgtctattgtctgttccactagtatgtaaagtcttagagagcaagaatttttgtttatttctttctcttcctcctttcctttcttcctcttttacttcgttcactactgtattccacataaaatatatttggcatatagtaggtgttcaatatgttgaaggaatgaaagaatttatagacttgagttgcaatataaaatgtatttttttttactgtgagttatggcaaaaaaagttttgaaagccgcttctaaataatgcagatgtcagtgctttgaccctggaataaaaactgaaatgacttagtgatttcaaaggcatatttgttttcctgaacaatctataaactgtctcattaagttgtctcagttatttgcttcacttcggcaacagaacctcagcctttacatgtgtttaaagcctcttgaggcaaaggatttggaaaatatggttacatggagaatagaagataatgagagagagtatcaattcattagtgcagttgaacccctctattggaatcccatcagcgagcacaagtcccatttcaacagcaataaatgcaacaagt

SEQ ID NO: 8019 - protein, 74 aa, Homo sapiens
MQNQSSTNHPGASIALSRPSLNKDFRDHAEQQHIAAQQKAALQHAHAHSSGYFITQDSAFGNLILPVLPRLDPE

SEQ ID NO: 8020 - DNA, 4183 bp, Homo sapiens
agcgcagcgggggcgggaaggttgtagtgccgcgagttgagctcctcttgcctaagtggtcgcgccccctttaagagcagcgattgtaaggagaggcggtcccggtgtcctcgggtcccaggttttcaaaacaaaaatagagttgcaatcttggcagaactggacaaagagaaaagaaaactacttatgcagaaccagtcttcaacaaatcatcctggagctagcatgctcatgcacattcatctggatacttcatcactcaagactctgcatttgggaaccttattcttcctgttttacctcgccttgacccagaatgaagaaaacatttgcgatggaaaagtgactttgtaatatcaaatgccaaagctactatcattcagtgctacatgaactgtgactttaagaattttggtgaactttgatattttttgtttgtctgaaagaaaggaatgtgtaagtgaaagctgaaagaagaataaccaggatgatgagagctgtggaagctgtatcgtccaaggaattgattatgtaccgtgactgtaacttttttgtaatgctgtttaactctcaatcagactgtgaactggatggtcacgaagtcattccccaactcctagcaagtttgactgaatatatcatgtccacagtagattttcaagaatcatttatagtacttaactttaaagaaacaaggctgcttttaaaaaatgaactaataggcttaaatcaattgcatccatatttgctgtttataggattgctatcagtataccttttgcgtttatagtcaacatgtatcatcctgaaatattctttctggacttataactacttccccctttttcactttaaaacaaacctcaagaataaattactaaccagtcttaaccatcttttataaacatatgctcttataaatgttgtgactagatgcaattaaaaataatagggaatgtggtaggtttttaatttgtacatcctcttatttagtgttaccacataaatgatgagtttgtgtggttctgttttccatttttgttctaactgaaaactttttggctgggcacggtgcctcatgcctgtaatcccagcactttgggaggccaaggcgggcagatcacttgagatcaggagtttgagaccagcctggccaacatggtgaaaccctgtctctactaaaagtataaaaaattagccatgtgtggtggcacacgcctgtaatcccagctactcaggaggctgaggcaggagaatcgcttgaacctgggaggcaggggttgcagtgagctgagacggtgtcactgcactccagcctgggtgacagtgagtctttgtctcaaagaaaaaaagaaaaagaaaacttatgcaagtcgagctcctttttaattaagtaggaagggattaggttaagaaagtctctcaacatgacccatctttagcagtatctggggtgcttatttaagtatgcagtcccactaccctaccctagtcctacagaattagaatctgattcaaaataaagtctgaaaaccatgagatagagaattctatgaaatatcttgtacagattttcgtgatatatttatacacgcatgggtttgtagatccctgaaacttagaggtcatttagctaaaatctacattttttttaacttttaataggattgaaatgatattttacactgtatcacagatacagtattttatataactttttgtaactgaccttatcttggccttgagtcccatcctctctggtggtagcgtaaaactgaaaattccagtttgggtcaatatttagtgaaagttctactttcttttcagagagtttgttcccccctttcttccttagatgttttcaaacacacagccccatcctactcaaaccaagtgaagcaagagtggacaattctagaattggctgtgccatgtaggttttttttagaatttgaactgatttccttcattttgatgaggtggcaactgtccccattgtaatggtcaccattgcagcgaggatagccttacttctgcggcgcagagctcctcagggggcctctggctcctgtccttcctcaggtccatccaactactccttgggcctccttatggtagccctcattgtcttgagttgatttcactaggtttctgttctctgtcatctgcaacataactgacatggttctaaatctgtctctaaggagataacacattagtatattttctacactattgaagcctctacctaatgtatgacttttgtagctcaggtaaagagatctttttaccagtgttatcgtttctagtctgtttgttagtcttcttttaaatagatatggcctaaatcctgtattcctggctaggaagcacttctctccacccctctgctttgagttacaaattcaattcaatttcctatgtatttattaatacctacagataaagtactgtgctttgggggacacaaaggtgactggtacctgctcttttaggaggtcaccgtgcagaggatcctattctggtacaccaatagttataaagcaagccacagcctaggcaacatagtgagacccctgtctctactaaaaaattaaaaaaaaaaaaaaaagattggctaggtgtgctggtgcatgcatagagtcccagccactcgggaggctgaggtgggaggattgcttgagcctgggaggttgaggctgcagtgggccatgattgcacaacttggcaacagagtgagaccctgtctctaaatcaatcaatcaagcgagccagaatgcagtagtggcctgagagaggcatcctggaacgcagtgcggtctggctaggcttagaagtattcatgtgatttttacctgacaagggaaggaagagctgctccacgtgcagagcaaggtttcagaatgagaggagaagagcaggcactgcagagggtgagggaaagggcagcagtggactgggaagccctcaggtggaggtcagcattgcttccctcagatcatgggtgaatttgaggaactcagttaatatctttgtatgttcctccctccataaggtgagaacaagcacatgctctgcccatgtcagaaattgtctagactagtgtttttcaaagtgcaaaagcctcaacccattactgagttgagaagccaacttaatggtttaacaggattgaccagcattttttccgaaaaaatcaaaaacatctgagtgtactgcatatagaaataggtggttttgcctcatgaatattctgtttctgtgtgttcctatattttactttgtattgtgttggttttttaagagacagtcctgctctgtcatccaggctggagtgcagtggtataatcatagctcactgcaagactccttgaatccctgggctcaagcaatcctcaacccttagcctcccaagtagctgagactacaggcacatgccaccatgcccagctaatttttttttttttttaatttttgtagagacagcatcttgctatgttgcccaggctggtcttgaactcttggcctcaagcagtcctctcgatcctcccaccttggcctcctaaagtgctgagattacaggtgtgagccactgcatctggcttacttattttgtctattgtctgttccactagtatgtaaagtcttagagagcaagaatttttgtttatttctttctcttcctcctttcctttcttcctcttttacttcgttcactactgtattccacataaaatatatttggcatatagtaggtgttcaatatgttgaaggaatgaaagaatttatagacttgagttgcaatataaaatgtatttttttttactgtgagttatggcaaaaaaagttttgaaagccgcttctaaataatgcagatgtcagtgctttgaccctggaataaaaactgaaatgacttagtgatttcaaaggcatatttgttttcctgaacaatctataaactgtctcattaagttgtctcagttatttgcttcacttcggcaacagaacctcagcctttacatgtgtttaaagcctcttgaggcaaaggatttggaaaatatggttacatggagaatagaagataatgagagagagtatcaattcattagtgcagttgaacccctctattggaatcccatcagcgagcacaagtcccatttcaacagcaataaatgcaacaagt

SEQ ID NO: 8021 - protein, 55 aa, Homo sapiens; identical to SEQ ID NO: 8015

SEQ ID NO: 8022 - DNA, 4316 bp, Homo sapiens
ggggtttccgctccctggggcgcacgtcagtcaggaggcggaagcgcagcgggggcgggaaggttgtagtgccgcgagttgagctcctcttgcctaagtggtcgcgccccctttaagagcagcgattgtaaggagaggcggtcccggtgtcctcgggtcccaggttttcaaaacaaaaatagagttgcaatcttggcagaactggacaaagagaaaagaaaactacttatgcagaaccagtcttcaacaaatcatcctggagctagcattgcactctcgagaccctctcttaataaggacttccgggatcacgctgagcagcagcatattgcagcccaacagaaggcagctttgcagcatgctcatgcacattcatctggatacttcatcactcaagactctgcatttgggaaccttattcttcctgttttacctcgccttgacccagaatgaagaaaacatttgcgatggaaaagtgactttgtaatatcaaatgccaaagctactatcattcagtgctacatgaactgtgactttaagaattttggtgaactttgatattttttgtttgtctgaaagaaaggaatgtgtaagtgaaagctgaaagaagaataaccaggatgatgagagctgtggaagctgtatcgtccaaggaattgattatgtaccgtgactgtaacttttttgtaatgctgtttaactctcaatcagactgtgaactggatggtcacgaagtcattccccaactcctagcaagtttgactgaatatatcatgtccacagtagattttcaagaatcatttatagtacttaactttaaagaaacaaggctgcttttaaaaaatgaactaataggcttaaatcaattgcatccatatttgctgtttataggattgctatcagtataccttttgcgtttatagtcaacatgtatcatcctgaaatattctttctggacttataactacttccccctttttcactttaaaacaaacctcaagaataaattactaaccagtcttaaccatcttttataaacatatgctcttataaatgttgtgactagatgcaattaaaaataatagggaatgtggtaggtttttaatttgtacatcctcttatttagtgttaccacataaatgatgagtttgtgtggttctgttttccatttttgttctaactgaaaactttttggctgggcacggtgcctcatgcctgtaatcccagcactttgggaggccaaggcgggcagatcacttgagatcaggagtttgagaccagcctggccaacatggtgaaaccctgtctctactaaaagtataaaaaattagccatgtgtggtggcacacgcctgtaatcccagctactcaggaggctgaggcaggagaatcgcttgaacctgggaggcaggggttgcagtgagctgagacggtgtcactgcactccagcctgggtgacagtgagtctttgtctcaaagaaaaaaagaaaaagaaaacttatgcaagtcgagctcctttttaattaagtaggaagggattaggttaagaaagtctctcaacatgacccatctttagcagtatctggggtgcttatttaagtatgcagtcccactaccctaccctagtcctacagaattagaatctgattcaaaataaagtctgaaaaccatgagatagagaattctatgaaatatcttgtacagattttcgtgatatatttatacacgcatgggtttgtagatccctgaaacttagaggtcatttagctaaaatctacattttttttaacttttaataggattgaaatgatattttacactgtatcacagatacagtattttatataactttttgtaactgaccttatcttggccttgagtcccatcctctctggtggtagcgtaaaactgaaaattccagtttgggtcaatatttagtgaaagttctactttcttttcagagagtttgttcccccctttcttccttagatgttttcaaacacacagccccatcctactcaaaccaagtgaagcaagagtggacaattctagaattggctgtgccatgtaggttttttttagaatttgaactgatttccttcattttgatgaggtggcaactgtccccattgtaatggtcaccattgcagcgaggatagccttacttctgcggcgcagagctcctcagggggcctctggctcctgtccttcctcaggtccatccaactactccttgggcctccttatggtagccctcattgtcttgagttgatttcactaggtttctgttctctgtcatctgcaacataactgacatggttctaaatctgtctctaaggagataacacattagtatattttctacactattgaagcctctacctaatgtatgacttttgtagctcaggtaaagagatctttttaccagtgttatcgtttctagtctgtttgttagtcttcttttaaatagatatggcctaaatcctgtattcctggctaggaagcacttctctccacccctctgctttgagttacaaattcaattcaatttcctatgtatttattaatacctacagataaagtactgtgctttgggggacacaaaggtgactggtacctgctcttttaggaggtcaccgtgcagaggatcctattctggtacaccaatagttataaagcaagccacagcctaggcaacatagtgagacccctgtctctactaaaaaattaaaaaaaaaaaaaaaagattggctaggtgtgctggtgcatgcatagagtcccagccactcgggaggctgaggtgggaggattgcttgagcctgggaggttgaggctgcagtgggccatgattgcacaacttggcaacagagtgagaccctgtctctaaatcaatcaatcaagcgagccagaatgcagtagtggcctgagagaggcatcctggaacgcagtgcggtctggctaggcttagaagtattcatgtgatttttacctgacaagggaaggaagagctgctccacgtgcagagcaaggtttcagaatgagaggagaagagcaggcactgcagagggtgagggaaagggcagcagtggactgggaagccctcaggtggaggtcagcattgcttccctcagatcatgggtgaatttgaggaactcagttaatatctttgtatgttcctccctccataaggtgagaacaagcacatgctctgcccatgtcagaaattgtctagactagtgtttttcaaagtgcaaaagcctcaacccattactgagttgagaagccaacttaatggtttaacaggattgaccagcattttttccgaaaaaatcaaaaacatctgagtgtactgcatatagaaataggtggttttgcctcatgaatattctgtttctgtgtgttcctatattttactttgtattgtgttggttttttaagagacagtcctgctctgtcatccaggctggagtgcagtggtataatcatagctcactgcaagactccttgaatccctgggctcaagcaatcctcaacccttagcctcccaagtagctgagactacaggcacatgccaccatgcccagctaatttttttttttttttaatttttgtagagacagcatcttgctatgttgcccaggctggtcttgaactcttggcctcaagcagtcctctcgatcctcccaccttggcctcctaaagtgctgagattacaggtgtgagccactgcatctggcttacttattttgtctattgtctgttccactagtatgtaaagtcttagagagcaagaatttttgtttatttctttctcttcctcctttcctttcttcctcttttacttcgttcactactgtattccacataaaatatatttggcatatagtaggtgttcaatatgttgaaggaatgaaagaatttatagacttgagttgcaatataaaatgtatttttttttactgtgagttatggcaaaaaaagttttgaaagccgcttctaaataatgcagatgtcagtgctttgaccctggaataaaaactgaaatgacttagtgatttcaaaggcatatttgttttcctgaacaatctataaactgtctcattaagttgtctcagttatttgcttcacttcggcaacagaacctcagcctttacatgtgtttaaagcctcttgaggcaaaggatttggaaaatatggttacatggagaatagaagataatgagagagagtatcaattcattagtgcagttgaacccctctattggaatcccatcagcgagcacaagtcccatttcaacagcaataaatgcaacaagt

SEQ ID NO: 8023 - protein, 74 aa, Homo sapiens; identical to SEQ ID NO: 8019

SEQ ID NO: 8024 - DNA, 4484 bp, Homo sapiens
tttggaaaaaaaagtgacgtctgcactgaggtggccgctaaagtgcgaatcacgacgggcggtggccgttgggtcccggcgggaggcggggtttccgctccctggggcgcacgtcagtcaggaggcggaagcgcagcgggggcgggaaggttgtagtgccgcgagttgagctcctcttgcctaagtggtcgcgccccctttaagagcagcgattgtaaggagaggcggtcccggtgtcctcgggtcccaggtgattgtgaagtgctgaccaattgccactggacatacttgaaacaaaataggaaaatggcagcaaactcttcaggacaaggttttcaaaacaaaaatagagttgcaatcttggcagaactggacaaagagaaaagaaaactacttatgcagaaccagtcttcaacaaatcatcctggagctagcattgcactctcgagaccctctcttaataaggacttccgggatcacgctgagcagcagcatattgcagcccaacagaaggcagctttgcagcatgctcatgcacattcatctggatacttcatcactcaagactctgcatttgggaaccttattcttcctgttttacctcgccttgacccagaatgaagaaaacatttgcgatggaaaagtgactttgtaatatcaaatgccaaagctactatcattcagtgctacatgaactgtgactttaagaattttggtgaactttgatattttttgtttgtctgaaagaaaggaatgtgtaagtgaaagctgaaagaagaataaccaggatgatgagagctgtggaagctgtatcgtccaaggaattgattatgtaccgtgactgtaacttttttgtaatgctgtttaactctcaatcagactgtgaactggatggtcacgaagtcattccccaactcctagcaagtttgactgaatatatcatgtccacagtagattttcaagaatcatttatagtacttaactttaaagaaacaaggctgcttttaaaaaatgaactaataggcttaaatcaattgcatccatatttgctgtttataggattgctatcagtataccttttgcgtttatagtcaacatgtatcatcctgaaatattctttctggacttataactacttccccctttttcactttaaaacaaacctcaagaataaattactaaccagtcttaaccatcttttataaacatatgctcttataaatgttgtgactagatgcaattaaaaataatagggaatgtggtaggtttttaatttgtacatcctcttatttagtgttaccacataaatgatgagtttgtgtggttctgttttccatttttgttctaactgaaaactttttggctgggcacggtgcctcatgcctgtaatcccagcactttgggaggccaaggcgggcagatcacttgagatcaggagtttgagaccagcctggccaacatggtgaaaccctgtctctactaaaagtataaaaaattagccatgtgtggtggcacacgcctgtaatcccagctactcaggaggctgaggcaggagaatcgcttgaacctgggaggcaggggttgcagtgagctgagacggtgtcactgcactccagcctgggtgacagtgagtctttgtctcaaagaaaaaaagaaaaagaaaacttatgcaagtcgagctcctttttaattaagtaggaagggattaggttaagaaagtctctcaacatgacccatctttagcagtatctggggtgcttatttaagtatgcagtcccactaccctaccctagtcctacagaattagaatctgattcaaaataaagtctgaaaaccatgagatagagaattctatgaaatatcttgtacagattttcgtgatatatttatacacgcatgggtttgtagatccctgaaacttagaggtcatttagctaaaatctacattttttttaacttttaataggattgaaatgatattttacactgtatcacagatacagtattttatataactttttgtaactgaccttatcttggccttgagtcccatcctctctggtggtagcgtaaaactgaaaattccagtttgggtcaatatttagtgaaagttctactttcttttcagagagtttgttcccccctttcttccttagatgttttcaaacacacagccccatcctactcaaaccaagtgaagcaagagtggacaattctagaattggctgtgccatgtaggttttttttagaatttgaactgatttccttcattttgatgaggtggcaactgtccccattgtaatggtcaccattgcagcgaggatagccttacttctgcggcgcagagctcctcagggggcctctggctcctgtccttcctcaggtccatccaactactccttgggcctccttatggtagccctcattgtcttgagttgatttcactaggtttctgttctctgtcatctgcaacataactgacatggttctaaatctgtctctaaggagataacacattagtatattttctacactattgaagcctctacctaatgtatgacttttgtagctcaggtaaagagatctttttaccagtgttatcgtttctagtctgtttgttagtcttcttttaaatagatatggcctaaatcctgtattcctggctaggaagcacttctctccacccctctgctttgagttacaaattcaattcaatttcctatgtatttattaatacctacagataaagtactgtgctttgggggacacaaaggtgactggtacctgctcttttaggaggtcaccgtgcagaggatcctattctggtacaccaatagttataaagcaagccacagcctaggcaacatagtgagacccctgtctctactaaaaaattaaaaaaaaaaaaaaaagattggctaggtgtgctggtgcatgcatagagtcccagccactcgggaggctgaggtgggaggattgcttgagcctgggaggttgaggctgcagtgggccatgattgcacaacttggcaacagagtgagaccctgtctctaaatcaatcaatcaagcgagccagaatgcagtagtggcctgagagaggcatcctggaacgcagtgcggtctggctaggcttagaagtattcatgtgatttttacctgacaagggaaggaagagctgctccacgtgcagagcaaggtttcagaatgagaggagaagagcaggcactgcagagggtgagggaaagggcagcagtggactgggaagccctcaggtggaggtcagcattgcttccctcagatcatgggtgaatttgaggaactcagttaatatctttgtatgttcctccctccataaggtgagaacaagcacatgctctgcccatgtcagaaattgtctagactagtgtttttcaaagtgcaaaagcctcaacccattactgagttgagaagccaacttaatggtttaacaggattgaccagcattttttccgaaaaaatcaaaaacatctgagtgtactgcatatagaaataggtggttttgcctcatgaatattctgtttctgtgtgttcctatattttactttgtattgtgttggttttttaagagacagtcctgctctgtcatccaggctggagtgcagtggtataatcatagctcactgcaagactccttgaatccctgggctcaagcaatcctcaacccttagcctcccaagtagctgagactacaggcacatgccaccatgcccagctaatttttttttttttttaatttttgtagagacagcatcttgctatgttgcccaggctggtcttgaactcttggcctcaagcagtcctctcgatcctcccaccttggcctcctaaagtgctgagattacaggtgtgagccactgcatctggcttacttattttgtctattgtctgttccactagtatgtaaagtcttagagagcaagaatttttgtttatttctttctcttcctcctttcctttcttcctcttttacttcgttcactactgtattccacataaaatatatttggcatatagtaggtgttcaatatgttgaaggaatgaaagaatttatagacttgagttgcaatataaaatgtatttttttttactgtgagttatggcaaaaaaagttttgaaagccgcttctaaataatgcagatgtcagtgctttgaccctggaataaaaactgaaatgacttagtgatttcaaaggcatatttgttttcctgaacaatctataaactgtctcattaagttgtctcagttatttgcttcacttcggcaacagaacctcagcctttacatgtgtttaaagcctcttgaggcaaaggatttggaaaatatggttacatggagaatagaagataatgagagagagtatcaattcattagtgcagttgaacccctctattggaatcccatcagcgagcacaagtcccatttcaacagcaataaatgcaacaagt

SEQ ID NO: 8025 - protein, 104 aa, Homo sapiens; identical to SEQ ID NO: 1126

SEQ ID NO: 8026 - DNA, 1481 bp, Homo sapiens
tttggaaaaaaaagtgacgtctgcactgaggtggccgctaaagtgcgaatcacgacgggcggtggccgttgggtcccggcgggaggcggggtttccgctccctggggcgcacgtcagtcaggaggcggaagcgcagcgggggcgggaaggttgtagtgccgcgagttgagctcctcttgcctaagtggtcgcgccccctttaagagcagcgattgtaaggagaggcggtcccggtgtcctcgggtcccaggtgattgtgaagtgctgaccaattgccactggacatacttgaaacaaaataggaaaatggcagcaaactcttcaggacaaggttttcaaaacaaaaatagagttgcaatcttggcagaactggacaaagagaaaagaaaactacttatgcagaaccagtcttcaacaaatcatcctggagctagcattgcactctcgagaccctctcttaataaggacttccgggatcacgctgagcagcagcatattgcagcccaacagaaggcagctttgcagcatgctcatgcacattcatctggatacttcatcactcaagactctgcatttgggaaccttattcttcctgttttacctcgccttgacccagaatgaagaaaacatttgcgatggaaaagtgactttgtaatatcaaatgccaaagctactatcattcagtgctacatgaactgtgactttaagaattttggtgaactttgatattttttgtttgtctgaaagaaaggaatgtgtaagtgaaagctgaaagaagaataaccaggatgatgagagctgtggaagctgtatcgtccaaggaattgattatgtaccgtgactgtaacttttttgtaatgctgtttaactctcaatcagactgtgaactggatggtcacgaagtcattccccaactcctagcaagtttgactgaatatatcatgtccacagtagattttcaagaatcatttatagtacttaactttaaagaaacaaggctgcttttaaaaaatgaactaataggcttaaatcaattgcatccatatttgctgtttataggattgctatcagtataccttttgcgtttatagtcaacatgtatcatcctgaaatattctttctggacttataactacttccccctttttcactttaaaacaaacctcaagaataaattactaaccagtcttaaccatcttttataaacatatgctcttataaatgttgtgactagatgcaattaaaaataatagggaatgtggtaggtttttaatttgtacatcctcttatttagtgttaccacataaatgatgagtttgtgtggttctgttttccatttttgttctaactgaaaactttttggctgggcacggtgcctcatgcctgtaatcccagcactttgggaggccaaggcgggcagatcacttgagatcaggagtttgagaccagcctggccaacatggtgaaaccctgtctctact

SEQ ID NO: 8027 - protein, 104 aa, Homo sapiens; identical to SEQ ID NO: 1126

SEQ ID NO: 8028 - DNA, 500 bp, Homo sapiens
aggaggcggaagcgcagcgggggcgggaaggttgtagtgccgcgagttgagctcctcttgcctaagtggtcgcgccccctttaagagcagcgattgtaaggagaggcggtcccggtgtcctcgggtcccaggtgattgtgaagtgctgaccaattgccactggacatacttgaaacaaaataggaaaatggcagcaaactcttcaggacaaggttttcaaaacaaaaatagagttgcaatcttggcagaactggacaaagagaaaagaaaactacttatgcagaaccagtcttcaacaaatcatcctggagctaggtattgacactataatgtgggttttttgtttgttttgttttgttttgttttgttttgagacggagtctcgccctgtcccccaggctggagtgcaatgctgattgcaccactgcaatccagcctggatgatatagtaagactgtctaaaacaaacaaacaaaaaagatccattatccccttcagcc

SEQ ID NO: 8029 - protein, 44 aa, Homo sapiens
MAANSSGQGFQNKNRVAILAELDKEKRKLLMQNQSSTNHPGARY

SEQ ID NO: 8030 - DNA, 420 bp, Homo sapiens
atgcgcccaccagcagccacgcttggggctgggggctttgaggacacgcacgctgccttaaatataatggacatccgtatggattaagactctatacaagctttctctttagtacaccaggggaaagtgaaaaaagaaccacatttgaattcggctttgtcactacaagtgggtgaccatgagcaagttactaacctcagtgaacctgttcctaacctaaaaaggaggagaatggagagcaggtaataataccttatgagatggttgtgagagttatatagcattctttatgtcatagtcctagcaaagtgctggcataaaataggtgctccctaaatgttaattacctaccttcctttccctttctgtcagattttctctactattcttatgaaataataaagagtttttgtaattaaa

SEQ ID NO: 8031 - protein, 44 aa, Homo sapiens
GHARCLKYNGHPYGLRLYTSFLFSTPGESEKRTTFEFGFVTTSG

SEQ ID NO: 8032 - DNA, 707 bp, Homo sapiens
gccggcagagaccagccggcgggtggcggcggcccccagcacggccggtgcaaggcctcgggttaagcggcggccgagcggggctcggcccggggtgctcggggagctcgccgcggcgggcagcaggaggaagcggcggcggcgcgtcccgagcggtgcgcgccatggcgggcgggccccccaaggccctgccgtccacggggccccactccctgcgcgacatgccgcacccgctggccggctccagcagcgaggaggccgtgggtggtgacagcacgcccagcccggacctgctgatggcccgcagcttcggtgacaaggatctcattttgcccaacggtggtactccagcaggtacttcaagtccagcttcttcatcttcccttctcaacagacttcagcttgatgatgatattgatggtgagactagagatctcttcgttatagttgatgatcccaagaagcatgtgtgtacaatggagacttacatcacctataggatcaccaccaaaagtactcgggtggagtttgacctgccagaatattctgttcgtcgaagataccaggattttgactggttgaggagcaaactggaagaatcccagcccactcatctcattcccgtaggtagtaagtcactacagcttgtttctcacttgtcctgtgttgtctttcctgaaggggttcactcaactctcatcccttaa

SEQ ID NO: 8033 - protein, 180 aa, Homo sapiens
MAGGPPKALPSTGPHSLRDMPHPLAGSSSEEAVGGDSTPSPDLLMARSFGDKDLILPNGGTPAGTSSPASSSSLLNRLQLDDDIDGETRDLFVIVDDPKKHVCTMETYITYRITTKSTRVEFDLPEYSVRRRYQDFDWLRSKLEESQPTHLIPVGSKSLQLVSHLSCVVFPEGVHSTLIP

SEQ ID NO: 8034 - DNA, 673 bp, Homo sapiens
gccggcagagaccagccggcgggtggcggcggcccccagcacggccggtgcaaggcctcgggttaagcggcggccgagcggggctcggcccggggtgctcggggagctcgccgcggcgggcagcaggaggaagcggcggcggcgcgtcccgagcggtgcgcgccatggcgggcgggccccccaaggccctgccgtccacggggccccactccctgcgcgacatgccgcacccgctggccggctccagcagcgaggaggccgtgggtggtgacagcacgcccagcccggacctgctgatggcccgcagcttcggtgacaaggatctcattttgcccaacggtggtactccagcaggtacttcaagtccagcttcttcatcttcccttctcaacagacttcagcttgatgatgatattgatggtgagactagagatctcttcgttatagttgatgatcccaagaagcatgtgtgtacaatggagacttacatcacctataggatcaccaccaaaagtactcgggtggagtttgacctgccagaatattctgttcgtcgaagataccaggattttgactggttgaggagcaaactggaagaatcccagcccactcatctcattcccgacctgaacgcctacaagaagcaagggatagcattgctgaccagaatggg

SEQ ID NO: 8035 - protein, 168 aa, Homo sapiens
MAGGPPKALPSTGPHSLRDMPHPLAGSSSEEAVGGDSTPSPDLLMARSFGDKDLILPNGGTPAGTSSPASSSSLLNRLQLDDDIDGETRDLFVIVDDPKKHVCTMETYITYRITTKSTRVEFDLPEYSVRRRYQDFDWLRSKLEESQPTHLIPDLNAYKKQGIALLTR

SEQ ID NO: 8036 - DNA, 251 bp, Homo sapiens
aaatttagataagagccaggagtggtggctcatgcattgttgttttggggggttttttttgagatggagtctcactctgtcgaccaggctggagttccgtctcaaaaaataaataaataaataaatggatgcttgcacactctctgacccagtatttattttacttatttttaccacaatttgttctagaaaagatatagtgataggtaaaatacaatcaaatgacataaattagaagtaggtgaaaagga

SEQ ID NO: 8037 - protein, 36 aa, Homo sapiens
MDACTLSDPVFILLIFTTICSRKDIVIGKIQSNDIN

SEQ ID NO: 8038 - DNA, 3712 bp, Homo sapiens
agtaatagcagcaactgctacccagccagattttaattagtttctgttccctgttcagagtaccttgtggagctgagagaatacgggcctgtgtactccacatggagcgccttggagggtgagctggctgaacccctggagggtgtgtcagcttgcattgggaactgctctacagccttagaagagctgacagatgacatgacagaagacttcctacctgtgctcagggaatatattttatactctgactccatgaagagtgtattgaagaagagggaccaagttcaagcagagtatgaagccaaactggaagctgtggctctgcggaaggaagaccgccccaaggtaccggcggacgtcgagaaatgtcaggatcggatggagtgtttcaatgctgacctgaaagctgacatggagaggtggcagaacaacaagaggcaggacttccggcagctactcatggggatggctgacaagaacatccagtattatgagaagtgcctcatggcgtgggagtcgattattccactactgcaggagaaacaagaggccaagtaaagttctttcttgggacggagactcttctacctacacagggcctggcaccctataccggaatgtccctgcagtgccagagacgcagtgctgggaaaacaaccacagaaacatctctcctttgtgtatttttccctcccccacctttcaccccacagtggttttcaattagtatttattccatggtggagtctgtgaggctagaatatctctcagcaagagcagcatacctccatgttgtgaaggcatctgttcagtgaagcactacgaaaatttgaaaccaagggacaagacaacctgcagctgacgctctgacatttcatgacagtttcctctttagggacagctgagttgccagttgtgggagagaacccggggcctgcttttcaaggatgaggaggaggcaggaacagaaggcagctgctgctttctgtggaaacctggcccctctggaattggcctctgtgggcattgactcgtcttggcctaggaggcattggtgcctccctggcaagtccttaacgtacagtacctgtagctgtgagtgtggcctgctgcctgcttgtgatgagtgataccgtcttactgtttctgtttcacatagggacatttaaatcaatgtcaatgtgcgtccatgcttgagtgagcaagccagcgtccttgtcctcctgcaatgcctttgggaagctcaggggaatgctccccaagcttgtttctgacactagaatgcaacagattggaaactttttgtgtaaaatgaaaaaaacaaagtgctggttttttttttttttctgtgaaggtcttcagtgttttgcttgttcactgtcatcagagcagggattagacctgttagggaatatctattgtcttgaagtcagagtagctccccattgttgagatcagtgggcatataccaagctccacccccagtgtcagctttgtgcaatttgcctttacctcaccaaaaatacctactttaatatttcctcctgtgtcctctgaatgtctgggcgagcttttggtgagagggctggtatgtcatgttgttatgatacagtcgaaatttgtcaatgcagtgtgaatttgttctcttcggccttgttctgccttgtgatcttttcaattcagtgaataaaccaggaatccattttttcaccaacccaccctgtagattgtcagctttttgtttgagagatgcctggtctcacagttacatgtatcagagtgtgtgtaagttgtctgtgttagaaaggttggggtgggggctttgttgcaggggattagactgttctttcttcatcataatttgagatacatcctgagtatgactgtctaaccctttctgtgtggcagaaaaatatgttttccaggtagtttttactactacagagagtctgtaaataagtgctttaaaaaaataacaaaccaataagatatttgtctcctatataaacattctgtgtatttagcacttgaaaatcaacaaatccagaatttaaaaaaatgccacagacttttcaaagcccaactctacttttttgagaatttgtccgtacctactaatatgccttattcttcttcacctagtgttttaaaagtcctgggtagaaagagttttagaaatgtaatcagttgttcagcttcaataatatagagatctaacatagtcagtcctcaggccccctaaagaaacaagcaagaaagtgagggccatcactagggttggctttggggaggggaaaactaaggactgcttttgccaaatgatatttttgataatgtaaggaaacacagggaccacaaaaccttttttttttttttaagtgtgaaagattagtgccttttggcatacttttgattttagaggatatagtatcggcattgacaaatcacgtagaaacaaagaatgctatagatgacaacagtattaaatgttactcctgattctgcagaacagcttttgaagatactggggggtatcttcaagcctcagagcagcttgtttcagatagaaattctctatgggttgaaatgccaaaaacagaaaacatgatgttgactcatgtaatttagtccattttagcagagcctttagtgttaacaccagtggcgaggagcattgcatattctctgtcagcagcagcactcccacaccaggtggttctgggctctctgtaggctggtcctagtaggtgacacccagcaacacccctgttggacaggattgattgttcgcagtcttagaccaacacttcagtcagaaatgttactgggaggaggaaaggaaaatcactttttttcctccatgtggaaatgaggagagaggaaagtggattgcaaaccaaaatgtgagtcagtgtgatgaagcagtggctctgtcatctcggcctttatccaataacaaaccagcatctcttaaaggcgcttttggcctagacacccctgaagtttggatgaagtctggtggattccctgtctgttgtatttctgtgtgcctgttcccttcattgctgtgagttgggagtgcattgagagatgatgtccatctgatatattcctgtgaaataaactgccagcaaactttctaacttgtattttaactgttaaagaagagattaaaaacttcggctttggacatgtccacattatggactgtcatcttatttttaaaagtcattctttacgtttaaaattttaaaataaaaaccttctgaggtattgatgtagtccaccgtgtaaatgttaccttctctccatgctgccattatgccaaaacaaaagctgtgataaaaaaagtgcttgagagagtgtgttgataagaaagtgatttatttacagatggaagtctttgtttcatgaagctaccaaactttaaaaagaatgtcacccttttttttgtttgttatggaaaccagagattgtaaaatggaaaaagaatcgtttttttgttgactttttgatgctggcacgaggtttttgtccacttttttcatatatctgtgtataaaaaaattgttgtttactatggaattagtattacattttgaggtaaacaaaagaatttgtattgcttgataaatattagcttgtaaatttaaagtttctttacttcaattaacttaaaggaccaataaacccataaaagatgctttcttta

SEQ ID NO: 8039 - protein, 119 aa, Homo sapiens
MTEDFLPVLREYILYSDSMKSVLKKRDQVQAEYEAKLEAVALRKEDRPKVPADVEKCQDRMECFNADLKADMERWQNNKRQDFRQLLMGMADKNIQYYEKCLMAWESIIPLLQEKQEAK

SEQ ID NO: 8040 - DNA, 4068 bp, Homo sapiens
aattgtaaactgccagcagggagacttctacatacagagctaatgcagaccggagagtggggcctcgtgtctgttgtttccagacccttctggcaagtaccggcggacgtcgagaaatgtcaggatcggatggagtgtttcaatgctgacctgaaagctgacatggagaggtggcagaacaacaagaggcaggacttccggcagctactcatggggatggctgacaagaacatccagtattatgagaaggcccagtttaccctcaatttaccctcttctacatcttccacatctgcaccaatctggggagatgaagaaacttcctagtgtagtagccatcatgactggcaggcaggccgacagccagctgaggctgaagtgcagtggcatgatctcagctcactgcaacctctgccttccaggcccaagcagtccccccgcctcagtctcccgagtagctggtgctacaggtgatgctgctgctgctggcccaagaacccctgggttagaacatctgttagaagaaatggtgaccctggaaaagctgacaaggtttgaaactcctaccctggtgacagctggagttgaaaaggagccaatacttgggctttgagagctcagctcaggttaaaaaacacaagtttatatagcacggtcaatgtggacaaggaatgacatttctctaaacagtaagaggcttttcaggagtaggaacgattagattcattcaggctgaggagctggtcaagaggctggaccagaaggtaaggagttggggaatgagcatattgatgagtaagggtggagaggttgaacatggtcttgacctcatctttcccatcctatctgctctgctcatgctgccagactcttggggttggaggggggcgctacctttttcccagtggcctgagccccaaatctgagtcattctggcctccatctacctcaccctctaccatccatccattaaccaactcctgtagcctctaactcccaaatatttttccatatccatctacttttctccatgcttgtagcttcctaccctacgtctgctattatttttttactttaatttttttttttaagaggcaatcttgctctctcacccaggcaggggtatagtggcccagtcatagctcactgcagccttgaactcgggctcaagcgatcctgtcgttttagcctcctgagtagctgggattataggtgcacaccaccatacccaggtaattttaattttttttgtagagatagtggtctcgctatttgctcaggctagtgctggattcctggcctcaagtgatcttcctagcttggcctcccagagtgctgggattataggcctgagccaccaaggctggccagtcagtctgccattatccttcacctggtttactgcaagggcttcacagctcatctcctttcttcaagcttgctcactccttccaccaattcattgtcctcagtgttgccagggagctgtttctaagatgcaaatttaagcactctgtgttcctgcttaacaccttccaacagctatccccatttactctgaagagaaacatctttttcttttgaaaggatattttatgttattcctccttaccaccccagtctcatcttactgtcctccgtaatacttgtccttccgtctgctgccttcacactgaattcctaaacctttgatatattttcaccttcaggccttccagcaagttgttccttctgcctggaatgtcccccaacatctggccttagtaactgctacttacccttccagccttgtcatagaagtcatttctgggatgcccttcctgctctcccaaatctggattccgtgctcccttatattagtgaggttggagaggttgaacgtgatcttgaacttcttgaactcatctttcccatcccatctgctctgctcatgttgcctgactcagtgcaagggtgctggctccttcccagtggaaggagacatccctatctgctgttctgtctgcttcacctgatagacagtacactgtgctagggcagacacagtcacgtgctattctttctgtatctcagcacctagcatggggcctggaccttattagatgtgtcatagagttttgttcattccctgcaagaggattagagatacaaactctcagagcccaaataccttgaatgtattctgcagccgtgtattttatcctgtataagaacatcaagtctgtagtcacagacagaatctgacctgggaaggaacgattcacacactcatacaatgaatgttgattttattaggtgagtctgcttttataaatccaagtaaacaaggttataaaaatgactacctcaaataaaatagctcttaatgtacctcctcttccttcacaccacccactttgggaagcactgttgactggaagtactcaattgaacatcccattgaagaaagccttgtgacatttgcttcttaaaagcaacagtagtaacaaaactacccagaagacaagggcctgagctccatccccctcctgagtgtttgtaggtaaggaagactcaggaaagaaagctgacttttttcaaggttttattttaatttaaaagacattgttcgtgcaaaactgttggtagttcttacaaaacatcccttccacattcccctcaggctgtgataatgcacgctttgagttctcccatgggactttcagcacagcacccaggtgactagttagctatactttggagccctcaagacagtcccttgaagaaaaggggcaggctcgctgtagctggagtctgaagcccctcacagggcctgggactgctgtgtgcagcctgcctgtaacccttaaggtcatgctctgctgtcacagaacccagtgtctgcctaatgggggtgtcttaaagctgagaacgtttttccatcaccaggaaagtgcttttccccatccaccagggatccctgagccagagcaggtcattctgaggccaactctggctggaacgcaggtttcttaagcagtgggttgcttaggtcaccagttccctggtcccttcttttgtcttctgggggcctggccatggctgatgttttcagttcctgcaggtaagcatcttcatttctctatgatgtctccatatggtgacaatgggacttgtttataggccacgatgctgtaagaattgaccatagagagttacaagagaacagctggaatggggtaaaggtgaaactgccctcacagggttaatgataattacaagccaggctttaggcaaaatcataggtaggcattgaccaaggtgtgctggtgcactgtgacccatctccctgcagctgctagctaaaaggagcatgttgaccatttgcttccccattgttcctttagatagaatctctgggggccaggcatggtggcttatgcctgtaatcccaacagtttgggaggttgaggcaggtggatcacctgaagtcaggagttcgagaccagcctggccaacctggtgaaaccccaactctactaaaaatacaaaaattagctgggcatggtggcaggcgcttgtaatcccagctactcgggatgctcaggcaggagaatcacttgaacctgggaggcggaggttgcagtgagccaagattgcgccattgcactccagtctgggtgacagactgagattctgtctcaaaaaaaaaaaaaaaaagaatctctgatactggacctttttacttaagaattgcttaaggtgtttttcagatcctgaattccagcagaatggctagtgccaaccagcctgaagaccctcaccaaggaaccaactcagcacagggctggcaagtggagagtgaagacttggaagcagccagcacagggccacatgatccttgacccctgctgtggaccactacagcacaggcacaaggcgatggccagcatctgacttcatgggcagccccaggcagctctggggtgtgggcggtcagcagtgctgacttattagtcagcgtaagtcagcgctgagagatgctacaccctctgacagggcatgcattcattaaacgaattctttttg

SEQ ID NO: 8041 - protein, 123 aa, Homo sapiens
MRRPSLPSIYPLLHLPHLHQSGEMKKLPSVVAIMTGRQADSQLRLKCSGMISAHCNLCLPGPSSPPASVSRVAGATGDAAAAGPRTPGLEHLLEEMVTLEKLTRFETPTLVTAGVEKEPILGL

SEQ ID NO: 8042 - DNA, 346 bp, Homo sapiens
cctcctcagaactcttcccacctcctcagaattcctcctccctcctcagaatcctcccacctcctcagaattcctccttcctcctcagaactcctttcacttcctcagaattcctcctggctcctcaggattcctcttcagagctcctcccacctcctcagaactcctcccgcctcctcagaactcctttcaccttctcacaatttctcccacctcttcagaactcccgctcctcacacctctcccaccccctcagaactcctccccacctcttcagaacctctccccacctcccccaaacccctcctgccttctcagaacccctctccacttccccaaaactcct

SEQ ID NO: 8043 - protein, 114 aa, Homo sapiens
PPQNSSHLLRIPPPSSESSHLLRIPPSSSELLSLPQNSSWLLRIPLQSSSHLLRTPPASSELLSPSHNFSHLFRTPAPHTSPTPSELLPTSSEPLPTSPKPLLPSQNPSPLPQN

SEQ ID NO: 8044 - DNA, 2406 bp, Homo sapiens
aggtcttcagtgttttgcttgttcactgtcatcagagcagggattagacctgttagggaatatctattgtcttgaagtcagagtagctccccattgttgagatcagtgggcatataccaagctccacccccagtgtcagctttgtgcaatttgcctttacctcaccaaaaatacctactttaatatttcctcctgtgtcctctgaatgtctgggcgagcttttggtgagagggctggtatgtcatgttgttatgatacagtcgaaatttgtcaatgcagtgaaaatgttctctcctgggccagcctcacagcttgcgttgggtgtgttggaattgttctcttcggccttgttctgccttgtgatcttttcaattcagtgaataaaccaggaatccattttttcaccaacccaccctgtagattgtcagctttttgtttgagagatgcctggtctcacagttacatgtatcagagtgtgtgtaagttgtctgtgttagaaaggttggggtgggggctttgttgcaggggattagactgttctttcttcatcataatttgagatacatcctgagtatgactgtctaaccctttctgtgtggcagaaaaatatgttttccaggtagtttttactactacagagagtctgtaaataagtgctttaaaaaaataacaaaccaataagatatttgtctcctatataaacattctgtgtatttagcacttgaaaatcaacaaatccagaatttaaaaaaatgccacagacttttcaaagcccaactctacttttttgagaatttgtccgtacctactaatatgccttattcttcttcacctagtgttttaaaagtcctgggtagaaagagttttagaaatgtaatcagttgttcagcttcaataatatagagatctaacatagtcagtcctcaggccccctaaagaaacaagcaagaaagtgagggccatcactagggttggctttggggaggggaaaactaaggactgcttttgccaaatgatatttttgataatgtaaggaaacacagggaccacaaaaccttttttttttttttaagtgtgaaagattagtgccttttggcatacttttgattttagaggatatagtatcggcattgacaaatcacgtagaaacaaagaatgctatagatgacaacagtattaaatgttactcctgattctgcagaacagcttttgaagatactggggggtatcttcaagcctcagagcagcttgtttcagatagaaattctctatgggttgaaatgccaaaaacagaaaacatgatgttgactcatgtaatttagtccattttagcagagcctttagtgttaacaccagtggcgaggagcattgcatattctctgtcagcagcagcactcccacaccaggtggttctgggctctctgtaggctggtcctagtaggtgacacccagcaacacccctgttggacaggattgattgttcgcagtcttagaccaacacttcagtcagaaatgttactgggaggaggaaaggaaaatcactttttttcctccatgtggaaatgaggagagaggaaagtggattgcaaaccaaaatgtgagtcagtgtgatgaagcagtggctctgtcatctcggcctttatccaataacaaaccagcatctcttaaaggcgcttttggcctagacacccctgaagtttggatgaagtctggtggattccctgtctgttgtatttctgtgtgcctgttcccttcattgctgtgagttgggagtgcattgagagatgatgtccatctgatatattcctgtgaaataaactgccagcaaactttctaacttgtattttaactgttaaagaagagattaaaaacttcggctttggacatgtccacattatggactgtcatcttatttttaaaagtcattctttacgtttaaaattttaaaataaaaaccttctgaggtattgatgtagtccaccgtgtaaatgttaccttctctccatgctgccattatgccaaaacaaaagctgtgataaaaaaagtgcttgagagagtgtgttgataagaaagtgatttatttacagatggaagtctttgtttcatgaagctaccaaactttaaaaagaatgtcacccttttttttgtttgttatggaaaccagagattgtaaaatggaaaaagaatcgtttttttgttgactttttgatgctggcacgaggtttttgtccacttttttcatatatctgtgtataaaaaaattgttgtttactatggaattagtattacattttgaggtaaacaaaagaatttgtattgcttgataaatattagcttgtaaatttaaagtttctttacttcaattaacttaaaggaccaataaacccataaaagatgctttcttta

SEQ ID NO: 8045 - protein, 117 aa, Homo sapiens
MSGRAFGERAGMSCCYDTVEICQCSENVLSWASLTACVGCVGIVLFGLVLPCDLFNSVNKPGIHFFTNPPCRLSAFCLRDAWSHSYMYQSVCKLSVLERLGWGLCCRGLDCSFFIII

SEQ ID NO: 8046 - DNA, 2467 bp, Homo sapiens
gtcacaggcgctgcgtgccctggctctgctcgccactggccggcgcgctcccggcgcacggagcacactcgcgctcccggcgcacggagcacactcgcgctccgggactgaaacctgagcagccgtagcagccgaatttgggagcatatccttgtcactgcagccagaaagcccttcgatccccatcagagaggtcacatgagccccgaggtcacctgcccgcggaggggccacctgcctcgcttccacccgaggacctgggttgagcccgtggtggcctcgtcccaggtggctgcctccctctacgatgcggggctactcctcgtggtgaaggcgtcctacggaaccggaggctcctccaaccacagtgccagcccatcgccccggggggctctagaggaccaacagcagagagccatctccaatttctacattatctacaaccttgtggtgggcctgtcccccctgctgtccgcctacgggctgggatggctcagcgaccgctaccaccgaaagatctccatctgcatgtcgctgctgggcttcctgctctcccgcctcgggctgctgctcaaggtgctgctggactggccagtggaggtgctgtacggggcggcggcgctgaacgggctattcggcggcttctccgccttctggtccggggtcatggcgctgggatcgctgggctcctccgagggccgccgctctgtgcgcctcatcctcattgacctgatgctgggcttggcggggttctgcgggagcatggcttccgggcatctcttcaagcagatggctgggcactctgggcagggcctgatactgacggcctgcagcgtgagctgtgcctcgtttgccctgctctacagccttttggtgctaaaggtccctgagtcggtggccaaacccagccaggagctccccgccgtggataccgtgtctggcacggttggcacataccgcactctggatcctgatcagttggaccaacagtatgcagtggggcaccctccatctcctggaaaagcaaaaccccataaaaccaccattgccttgctctttgtgggtgctatcatatatgacctggcggtggtgggcacagtggacgtgatccctctttttgtgctgagggagcctctcggttggaaccaagtgcaggtgggctatggtatggctgcagggtacaccatcttcatcaccagcttcctgggtgtcctggtcttctcccgctgctttcgggacaccaccatgatcatgattgggatggtctcctttgggtcaggagccctcctcttggcttttgtgaaagagacatacatgttctatattgctcgagccgtcatgctgtttgctctcatccccgtcacaaccatccgatcagctatgtccaaactcataaagggctcctcttatggaaaggtgttcgtcatactgcagctgtccttggctctgaccggcgtggtgacatccaccttgtacaacaagatctaccagctcaccatggacatgtttgtgggctcctgctttgctctctcctcctttctctccttcctggccatcattccaattagcatcgtggcctataaacaagtcccattgtcaccatatggagacatcatagagaaatgaagatgcttacctgcaggaactgaaaacatcagccatggccaggcccccagaagacaaaagaagggaccagggaactggtgacctaagcaacccactgcttaagaaacctgcgttccagccagagttggcctcagaatgacctgctctggctcagggatccctggtggatggggaaaagcactttcctggtgatggaaaaacgttctcagctttaagacacccccattaggcagacactgggttctgtgacagcagagcatgaccttaagggttacaggcaggctgcacacagcagtcccaggccctgtgaggggcttcagactccagctacagcgagcctgccccttttcttcaagggactgtcttgagggctccaaagtatagctaactagtcacctgggtgctgtgctgaaagtcccatgggagaactcaaagcgtgcattatcacagcctgaggggaatgtggaagggatgttttgtaagaactaccaacagttttgcacgaacaatgtcttttaaattaaaataaaaccttgaaaaaagtcagctttctttcctgagtcttccttacctacaaacactcaggagggggatggagctcaggcccttgtcttctgggtagttttgttactactgttgcttttaagaagcaaatgtcacaaggctttcttcaatgggatgttcaattgagtacttccagtcaacagtgcttcccaaagtgggtggtgtgaaggaagaggaggtacattaagagctattttatttgaggtagtcatttttataaccttgtttacttggatttataaaagcagactcacctaataaaatcaacattcattgt

SEQ ID NO: 8047 - protein, 475 aa, Homo sapiens
MSPEVTCPRRGHLPRFHPRTWVEPVVASSQVAASLYDAGLLLVVKASYGTGGSSNHSASPSPRGALEDQQQRAISNFYIIYNLVVGLSPLLSAYGLGWLSDRYHRKISICMSLLGFLLSRLGLLLKVLLDWPVEVLYGAAALNGLFGGFSAFWSGVMALGSLGSSEGRRSVRLILIDLMLGLAGFCGSMASGHLFKQMAGHSGQGLILTACSVSCASFALLYSLLVLKVPESVAKPSQELPAVDTVSGTVGTYRTLDPDQLDQQYAVGHPPSPGKAKPHKTTIALLFVGAIIYDLAVVGTVDVIPLFVLREPLGWNQVQVGYGMAAGYTIFITSFLGVLVFSRCFRDTTMIMIGMVSFGSGALLLAFVKETYMFYIARAVMLFALIPVTTIRSAMSKLIKGSSYGKVFVILQLSLALTGVVTSTLYNKIYQLTMDMFVGSCFALSSFLSFLAIIPISIVAYKQVPLSPYGDIIEK

SEQ ID NO: 8048 - DNA, 2205 bp, Homo sapiens
ctcgggaggtcactcggctgctgggcgggctgctgtcacaggcgctgcgtgccctggctctgctcgccactggccggcgcgctcccggcgcacggagcacactcgcgctcccggcgcacggagcacactcgcgctccgggactgaaacctgagcagccgtagcagccgaatttgggagcatatccttgtcactgcagccagaaagcccttcgatccccatcagagaggtcacatgagccccgaggtcacctgcccgcggaggggccacctgcctcgcttccacccgaggacctgggttgagcccgtggtggcctcgtcccaggtggctgcctccctctacgatgcggggctactcctcgtggtgaaggcgtcctacggaaccggaggctcctccaaccacagtgccagcccatcgccccggggggctctagaggaccaacagcagagagccatctccaatttctacattatctacaaccttgtggtgggcctgtcccccctgctgtccgcctacgggctgggatggctcagcgaccgctaccaccgaaagatctccatctgcatgtcgctgctgggcttcctgctctcccgcctcgggctgctgctcaaggtgctgctggactggccagtggaggtgctgtacggggcggcggcgctgaacgggctattcggcggcttctccgccttctggtccggggtcatggcgctgggatcgctgggctcctccgagggccgccgctctgtgcgcctcatcctcattgacctgatgctgggcttggcggggttctgcgggagcatggcttccgggcatctcttcaagcagatggctgggcactctgggcagggcctgatactgacggcctgcagcgtgagctgtgcctcgtttgccctgctctacagccttttggtgctaaaggtccctgagtcggtggccaaacccagccaggagctccccgccgtggataccgtgtctggcacggttggcacataccgcactctggatcctgatcagttggaccaacagtatgcagtggggcaccctccatctcctggaaaagcaaaaccccataaaaccaccattgccttgctctttgtgggtgctatcatatatgacctggcggtggtgggcacagtggacgtgatccctctttttgtgctgagggagcctctcggttggaaccaagtgcaggtgggctatggtatggctgcagggtacaccatcttcatcaccagcttcctgggtgtcctggtcttctcccgctgctttcgggacaccaccatgatcatgattgggatggtctcctttgggtcaggagccctcctcttggcttttgtgaaagagacatacatgttctatattgctcgagccgtcatgctgtttgctctcatccccgtcacaaccatccgatcagctatgtccaaactcataaagggctcctcttatggaaaggtgttcgtcatactgcagctgtccttggctctgaccggcgtggtgacatccaccttgtacaacaagatctaccagctcaccatggacatgtttgtgggctcctgctttgctctctcctcctttctctccttcctggccatcattccaattagcatcgtggcctataaacaagtcccattgtcaccatatggagacatcatagagaaatgaagatgcttacctgcaggaactgaaaacatcagccatggccaggcccccagaagacaaaagaagggaccagggaactggtgacctaagcaacccactgcttaagaaacctgcgttccagccagagttggcctcagaatgacctgctctggctcagggatccctggtggatggggaaaagcactttcctggtgatggaaaaacgttctcagctttaagacacccccattaggcagacactgggttctgtgacagcagagcatgaccttaagggttacaggcaggctgcacacagcagtcccaggccctgtgaggggcttcagactccagctacagcgagcctgccccttttcttcaagggactgtcttgagggctccaaagtatagctaactagtcacctgggtgctgtgctgaaagtcccatgggagaactcaaagcgtgcattatcacagcctgaggggaatgtggaagggatgttttgtaagaactaccaacagttttgcacgaacaatgtcttttaaattaaaataaaaccttgaaaaaagtc

SEQ ID NO: 8049 - protein, 475 aa, Homo sapiens; identical to SEQ ID NO: 8047

SEQ ID NO: 8050 - DNA, 2144 bp, Homo sapiens
gagccgggaggcagagggagtagtgaccgccttccggagccgggattcatgcctgtcctcgggaccagcgaaggggactttacggctgagtatgagccaggctgctaggagccaggtacccccacgcctgcagtccccgcgccgtgcccggaatgcgagctgcacgcagggctctcccaagttcccaccgagccgaataaaaagcgtcctcccgcagctctccgccaaagacggacattgactccaggacatccagatcatggagtacacgctggccaacatggccaagtcttgggccgaagcttataaggacctggagaattcagatgagtttaaatcatttatgaagcgcctccccagcaaccacttcctgaccatcggaagcatccatcagcactggggcaatgactgggacctgcagaaccgctacaagctcctgcagagtgccacggaggcacagagacaaaagatccaacgcactgcccgcaagcttttcggcctcagtgtacgctgtcgccacaatcccaaccaccagctgcctagagagaggacaattcagcagtggcttgcaagggtccagtcactcctctactgtaatgagaatgggttttggggaaccttcctggagagccagcggagctgcgtgtgccacggcagcaccacgctgtgccagcgccccatcccctgcgtgataggcgggaacaacagctgcgccatgtgcagcctggccaacatctccctctgcggctcctgcaacaagggctacaagctgtatcgaggccgctgtgaaccacagaacgtggactcggagcggagcgagcagttcatcagctttgagactgacctggacttccaggacctggagctgaagtacctgctgcagaagatggactcacgcctctacgtccacaccaccttcatcagcaacgagatccgcctcgacaccttctttgaccctcggtggcgcaagcgcatgtccctcactctcaagagcaacaagaaccgcatggacttcatccacatggtgatcggcatgtccatgcgcatctgccagatgcgcaacagcagcctggaccccatgttctttgtctatgtcaacccctttagcgggagccattcggagggctggaacatgcccttcggggaatttggctacccacgctgggagaagatccgtctccaaaacagccagtgctacaactggactcttttgctgggcaatcggtggaaaacatttttcgagacggtccacatctacctacgtagtcggactcggctacctaccctactgcgaaatgagactggccagggccccgtggacctgtcggatccctccaagaggcagttctacatcaagatctcagacgtgcaggtgtttgggtatagcctgaggttcaacgccgacctcctgcgcagtgcagtgcagcaggtcaaccagtcctacacacagggcggccagttctattcctcttcgtcagtgatgctcctcttgttggatattcgggaccgaattaatcgcctggcccctcctgtggccccggggaaaccccagctggacttgttctcctgtatgctgaaacaccgcctgaaactgaccaacagcgagatcatcagggtgaaccacgccttggacctgtacaacacggagatcctcaaacagtcggaccagatgacagccaaactctgctaacccgggactccttgccatggacttttcctgttgttgtacacacacaacagaacaaaatgaagcaaaacaaaacaaaaaaacccacaaaaatttgtaaaatgtaattaatattcaaagaaaaggaggaaaatcttcatttgttggaaatgaaaacgttctagcaactgtataaaagcgttgggcatgtttgttatttctatactcactctgtcatgaagaagggtctcagccttttgtggagcattgagggagttgcttcttaggcctcaggtgctgtattgggggagaagggagaaagcatatgcaatgaattgtaaagatctctgctgtgcaggtgctaagattaaacactaaaaagaaagagagatatatgtaatgtacaactgacactgccatttttcctttttggaggaaatggacatagataaagaagatatttcttcggttaagattt

SEQ ID NO: 8051 - protein, 476 aa, Homo sapiens
MEYTLANMAKSWAEAYKDLENSDEFKSFMKRLPSNHFLTIGSIHQHWGNDWDLQNRYKLLQSATEAQRQKIQRTARKLFGLSVRCRHNPNHQLPRERTIQQWLARVQSLLYCNENGFWGTFLESQRSCVCHGSTTLCQRPIPCVIGGNNSCAMCSLANISLCGSCNKGYKLYRGRCEPQNVDSERSEQFISFETDLDFQDLELKYLLQKMDSRLYVHTTFISNEIRLDTFFDPRWRKRMSLTLKSNKNRMDFIHMVIGMSMRICQMRNSSLDPMFFVYVNPFSGSHSEGWNMPFGEFGYPRWEKIRLQNSQCYNWTLLLGNRWKTFFETVHIYLRSRTRLPTLLRNETGQGPVDLSDPSKRQFYIKISDVQVFGYSLRFNADLLRSAVQQVNQSYTQGGQFYSSSSVMLLLLDIRDRINRLAPPVAPGKPQLDLFSCMLKHRLKLTNSEIIRVNHALDLYNTEILKQSDQMTAKLC

SEQ ID NO: 8052 - DNA, 3205 bp, Homo sapiens
cccggagaccgcggcgcacttggacttccctctccattcgccagccgcctcgctcccggaccccacggctgcaaactgatctggcgcgcggggaggaggagagcgcaggcgagcgaacccgcgagagagggagagagcgagcgagcaacagcgagagcgagagcgagagagccgggaggcagagggagtagtgaccgccttccggagccgggattcatgcctgtcctcgggaccagcgaaggggactttacggctgagtatgagccaggctgctaggagccaggtacccccacgcctgcagtccccgcgccgtgcccggaatgcgagctgcacgcagggctctcccaagttcccaccgagccgaataaaaagcgtcctcccgcagctctccgccaaagacggacattgactccaggactccacagaatggagcaagaatgagaggaaaaaggccggcagaaaagcatgaactggaggtttgttgagctcctctacttcctgtttatatggggccgtatctcagtgcagccctcccaccaggaaccagctgggacagaccaacatgtctccaaggaatttgattggctcatttcagacagggggcctttccaccactccaggagctacctatcctttgtggaaagacaccgtcaaggatttacaaccagatataaaatatacagggagtttgcccgttggaaggtgaggaacacagccatcgagaggagagatctggtccgccatccagtgcccctcatgccggagtttcaaaggagcatccgcctgcttggcaggagacctaccactcagcagttcatcgataccatcatcaaaaagtacggcacccacctgctcatctcagccacattgggaggggaggaggctttgaccatgtatatggacaaaagtcgcctcgacaggaagtcagggaatgccactcaaagtgttgaagctctgcaccagctcgcatcatcctactttgttgaccgtgatggtaccatgaggaggcttcatgagatccagatatcaactggagcaatcaaggtcacagagacacgcactgggcctctgggctgtaacagctatgacaatctggactctgtgagttccgtccttctgcaaagcacggagagcaaactgcaccttcaaggtcttcagataatctttcctcagtatctgcaagagaagtttgtccagtcggccttgagctatatcatgtgcaatggggagggggagtacctgtgccagaacagccagtgtcgctgccaatgtgccgaggagtttccgcagtgcaactgccccatcacggacatccagatcatggagtacacgctggccaacatggccaagtcttgggccgaagcttataaggacctggagaattcagatgagtttaaatcatttatgaagcgcctccccagcaaccacttcctgaccatcggaagcatccatcagcactggggcaatgactgggacctgcagaaccgctacaagctcctgcagagtgccacggaggcacagagacaaaagatccaacgcactgcccgcaagcttttcggcctcagtgtacgctgtcgccacaatcccaaccaccagctgcctagagagaggacaattcagcagtggcttgcaagggtccagtcactcctctactgtaatgagaatgggttttggggaaccttcctggagagccagcggagctgcgtgtgccacggcagcaccacgctgtgccagcgccccatcccctgcgtgataggcgggaacaacagctgcgccatgtgcagcctggccaacatctccctctgcggctcctgcaacaagggctacaagctgtatcgaggccgctgtgaaccacagaacgtggactcggagcggagcgagcagttcatcagctttgagactgacctggacttccaggacctggagctgaagtacctgctgcagaagatggactcacgcctctacgtccacaccaccttcatcagcaacgagatccgcctcgacaccttctttgaccctcggtggcgcaagcgcatgtccctcactctcaagagcaacaagaaccgcatggacttcatccacatggtgatcggcatgtccatgcgcatctgccagatgcgcaacagcagcctggaccccatgttctttgtctatgtcaacccctttagcgggagccattcggagggctggaacatgcccttcggggaatttggctacccacgctgggagaagatccgtctccaaaacagccagtgctacaactggactcttttgctgggcaatcggtggaaaacatttttcgagacggtccacatctacctacgtagtcggactcggctacctaccctactgcgaaatgagactggccagggccccgtggacctgtcggatccctccaagaggcagttctacatcaagatctcagacgtgcaggtgtttgggtatagcctgaggttcaacgccgacctcctgcgcagtgcagtgcagcaggtcaaccagtcctacacacagggcggccagttctattcctcttcgtcagtgatgctcctcttgttggatattcgggaccgaattaatcgcctggcccctcctgtggccccggggaaaccccagctggacttgttctcctgtatgctgaaacaccgcctgaaactgaccaacagcgagatcatcagggtgaaccacgccttggacctgtacaacacggagatcctcaaacagtcggaccagatgacagccaaactctgctaacccgggactccttgccatggacttttcctgttgttgtacacacacaacagaacaaaatgaagcaaaacaaaacaaaaaaacccacaaaaatttgtaaaatgtaattaatattcaaagaaaaggaggaaaatcttcatttgttggaaatgaaaacgttctagcaactgtataaaagcgttgggcatgtttgttatttctatactcactctgtcatgaagaagggtctcagccttttgtggagcattgagggagttgcttcttaggcctcaggtgctgtattgggggagaagggagaaagcatatgcaatgaattgtaaagatctctgctgtgcaggtgctaagattaaacactaaaaagaaagagagatatatgtaatgtacaactgacactgccatttttcctttttggaggaaatggacatagataaagaagatatttcttcggttaagattt

SEQ ID NO: 8053 - protein, 761 aa, Homo sapiens
MNWRFVELLYFLFIWGRISVQPSHQEPAGTDQHVSKEFDWLISDRGPFHHSRSYLSFVERHRQGFTTRYKIYREFARWKVRNTAIERRDLVRHPVPLMPEFQRSIRLLGRRPTTQQFIDTIIKKYGTHLLISATLGGEEALTMYMDKSRLDRKSGNATQSVEALHQLASSYFVDRDGTMRRLHEIQISTGAIKVTETRTGPLGCNSYDNLDSVSSVLLQSTESKLHLQGLQIIFPQYLQEKFVQSALSYIMCNGEGEYLCQNSQCRCQCAEEFPQCNCPITDIQIMEYTLANMAKSWAEAYKDLENSDEFKSFMKRLPSNHFLTIGSIHQHWGNDWDLQNRYKLLQSATEAQRQKIQRTARKLFGLSVRCRHNPNHQLPRERTIQQWLARVQSLLYCNENGFWGTFLESQRSCVCHGSTTLCQRPIPCVIGGNNSCAMCSLANISLCGSCNKGYKLYRGRCEPQNVDSERSEQFISFETDLDFQDLELKYLLQKMDSRLYVHTTFISNEIRLDTFFDPRWRKRMSLTLKSNKNRMDFIHMVIGMSMRICQMRNSSLDPMFFVYVNPFSGSHSEGWNMPFGEFGYPRWEKIRLQNSQCYNWTLLLGNRWKTFFETVHIYLRSRTRLPTLLRNETGQGPVDLSDPSKRQFYIKISDVQVFGYSLRFNADLLRSAVQQVNQSYTQGGQFYSSSSVMLLLLDIRDRINRLAPPVAPGKPQLDLFSCMLKHRLKLTNSEIIRVNHALDLYNTEILKQSDQMTAKLC

SEQ ID NO: 8054 - DNA, 2921 bp, Homo sapiens
cccggagaccgcggcgcacttggacttccctctccattcgccagccgcctcgctcccggaccccacggctgcaaactgatctggcgcgcggggaggaggagagcgcaggcgagcgaacccgcgagagagggagagagcgagcgagcaacagcgagagcgagagcgagagagccgggaggcagagggagtagtgaccgccttccggagccgggattcatgcctgtcctcgggaccagcgaaggggactttacggctgagtatgagccaggctgctaggagccaggtacccccacgcctgcagtccccgcgccgtgcccggaatgcgagctgcacgcagggctctcccaagttcccaccgagccgaataaaaagcgtcctcccgcagctctccgccaaagacggacattgactccaggactccacagaatggagcaagaatgagaggaaaaaggccggcagaaaagcatgaactggaggtttgttgagctcctctacttcctgtttatatggggccgtatctcagtgcagccctcccaccaggaaccagctgggacagaccaacatgtctccaaggaatttgattggctcatttcagacagggggcctttccaccactccaggagctacctatcctttgtggaaagacaccgtcaaggatttacaaccagatataaaatatacagggagtttgcccgttggaaggtgaggaacacagccatcgagaggagagatctggtccgccatccagtgcccctcatgccggagtttcaaaggagcatccgcctgcttggcaggagacctaccactcagcagttcatcgataccatcatcaaaaagtacggcacccacctgctcatctcagccacattgggaggggaggaggctttgaccatgtatatggacaaaagtcgcctcgacaggaagtcagggaatgccactcaaagtgttgaagctctgcaccagctcgcatcatcctactttgttgaccgtgatggtaccatgaggaggcttcatgagatccagatatcaactggagcaatcaaggtcacagagacacgcactgggcctctgggctgtaacagctatgacaatctggactctgtgagttccgtccttctgcaaagcacggagagcaaactgcaccttcaaggtcttcagataatctttcctcagtatctgcaagagaagtttgtccagtcggccttgagctatatcatgtgcaatggggagggggagtacctgtgccagaacagccagtgtcgctgccaatgtgccgaggagtttccgcagtgcaactgccccatcacggacatccagatcatggagtacacgctggccaacatggccaagtcttgggccgaagcttataaggacctggagaattcagatgagtttaaatcatttatgaagcgcctccccagcaaccacttcctgaccatcggaagcatccatcagcactggggcaatgactgggacctgcagaaccgctacaagctcctgcagagtgccacggaggcacagagacaaaagatccaacgcactgcccgcaagcttttcggcctcagtgtacgctgtcgccacaatcccaaccaccagctgcctagagagaggacaattcagcagtggcttgcaagggtccagtcactcctctactgtaatgagaatgggttttggggaaccttcctggagagccagcggagctgcgtgtgccacggcagcaccacgctgtgccagcgccccatcccctgcgtgataggcgggaacaacagctgcgccatgtgcagcctggccaacatctccctctgcggctcctgcaacaagggctacaagctgtatcgaggccgctgtgaaccacagaacgtggactcggagcggagcgagcagttcatcagctttgagactgacctggacttccaggacctggagctgaagtacctgctgcagaagatggactcacgcctctacgtccacaccaccttcatcagcaacgagatccgcctcgacaccttctttgaccctcggtggcgcaagcgcatgtccctcactctcaagagcaacaagaaccgcatggacttcatccacatggtgatcggcatgtccatgcgcatctgccagatgcgcaacagcagcctggaccccatgttctttgtctatgtcaacccctttagcgggagccattcggagggctggaacatgcccttcggggaatttggctacccacgctgggagaagatccgtctccaaaacagccagtgctacaactggactcttttgctgggcaatcggtggaaaacatttttcgagacggtccacatctacctacgtagtcggactcggctacctaccctactgcgaaatgagactggccagggccccgtggacctgtcggatccctccaagaggcagttctacatcaagatctcagacgtgcaggtgtttgggtatagcctgaggttcaacgccgacctcctgcgcagtgcagtgcagcaggtcaaccagtcctacacacagggcggccagttctattcctcttcgtcagtgatgctcctcttgttggatattcgggaccgaattaatcgcctggcccctcctgtggccccggggaaaccccagctggacttgttctcctgtatgctgaaacaccgcctgaaactgaccaacagcgagatcatcagggtgaaccacgccttggacctgtacaacacggagatcctcaaacagtcggaccagatgacagccaaactctgctaacccgggactccttgccatggacttttcctgttgttgtacacacacaacagaacaaaatgaagcaaaacaaaacaaaaaaacccacaaaaatttgtaaaatgtaattaatattcaaagaaaaggaggaaaatcttcatttgttggaaatgaaaacgttctagcaactgtat

SEQ ID NO: 8055 - protein, 761 aa, Homo sapiens; identical to SEQ ID NO: 8053

SEQ ID NO: 8056 - DNA, 1858 bp, Homo sapiens
gagccgggaggcagagggagtagtgaccgccttccggagccgggattcatgcctgtcctcgggaccagcgaaggggactttacggctgagtatgagccaggctgctaggagccaggtacccccacgcctgcagtccccgcgccgtgcccggaatgcgagctgcacgcagggctctcccaagttcccaccgagccgaataaaaagcgtcctcccgcagctctccgccaaagacggacattgactccaggacatccagatcatggagtacacgctggccaacatggccaagtcttgggccgaagcttataaggacctggagaattcagatgagtttaaatcatttatgaagcgcctccccagcaaccacttcctgaccatcggaagcatccatcagcactggggcaatgactgggacctgcagaaccgctacaagctcctgcagagtgccacggaggcacagagacaaaagatccaacgcactgcccgcaagcttttcggcctcagtgtacgctgtcgccacaatcccaaccaccagctgcctagagagaggacaattcagcagtggcttgcaagggtccagtcactcctctactgtaatgagaatgggttttggggaaccttcctggagagccagcggagctgcgtgtgccacggcagcaccacgctgtgccagcgccccatcccctgcgtgataggcgggaacaacagctgcgccatgtgcagcctggccaacatctccctctgcggctcctgcaacaagggctacaagctgtatcgaggccgctgtgaaccacagaacgtggactcggagcggagcgagcagttcatcagctttgagactgacctggacttccaggacctggagctgaagtacctgctgcagaagatggactcacgcctctacgtccacaccaccttcatcagcaacgagatccgcctcgacaccttctttgaccctcggtggcgcaagcgcatgtccctcactctcaagagcaacaagaaccgcatggacttcatccacatggtgatcggcatgtccatgcgcatctgccagatgcgcaacagcagcctggaccccatgttctttgtctatgtcaacccctttagcgggagccattcggagggctggaacatgcccttcggggaatttggctacccacgctgggagaagatccgtctccaaaacagccagtgctacaactggactcttttgctgggcaatcggtggaaaacatttttcgagacggtccacatctacctacgtagtcggactcggctacctaccctactgcgaaatgagactggccagggccccgtggacctgtcggatccctccaagaggcagttctacatcaagatctcagacgtgcaggtgtttgggtatagcctgaggttcaacgccgacctcctgcgcagtgcagtgcagcaggtcaaccagtcctacacacagggcggccagttctattcctcttcgtcagtgatgctcctcttgttggatattcgggaccgaattaatcgcctggcccctcctgtggccccggggaaaccccagctggacttgttctcctgtatgctgaaacaccgcctgaaactgaccaacagcgagatcatcagggtgaaccacgccttggacctgtacaacacggagatcctcaaacagtcggaccagatgacagccaaactctgctaacccgggactccttgccatggacttttcctgttgttgtacacacacaacagaacaaaatgaagcaaaacaaaacaaaaaaacccacaaaaatttgtaaaatgtaattaatattcaaagaaaaggaggaaaatcttcatttgttggaaatgaaaacgttctagcaactgt

SEQ ID NO: 8057 - protein, 476 aa, Homo sapiens; identical to SEQ ID NO: 8051

SEQ ID NO: 8058 - DNA, 1686 bp, Homo sapiens
cccggagaccgcggcgcacttggacttccctctccattcgccagccgcctcgctcccggaccccacggctgcaaactgatctggcgcgcggggaggaggagagcgcaggcgagcgaacccgcgagagagggagagagcgagcgagcaacagcgagagcgagagcgagagagccgggaggcagagggagtagtgaccgccttccggagccgggattcatgcctgtcctcgggaccagcgaaggggactttacggctgagtatgagccaggctgctaggagccaggtacccccacgcctgcagtccccgcgccgtgcccggaatgcgagctgcacgcagggctctcccaagttcccaccgagccgaataaaaagcgtcctcccgcagctctccgccaaagacggacattgactccaggactccacagaatggagcaagaatgagaggaaaaaggccggcagaaaagcatgaactggaggtttgttgagctcctctacttcctgtttatatggggccgtatctcagtgcagccctcccaccaggaaccagctgggacagaccaacatgtctccaaggaatttgattggctcatttcagacagggggcctttccaccactccaggagctacctatcctttgtggaaagacaccgtcaaggatttacaaccagatataaaatatacagggagtttgcccgttggaaggtgaggaacacagccatcgagaggagagatctggtccgccatccagtgcccctcatgccggagtttcaaaggagcatccgcctgcttggcaggagacctaccactcagcagttcatcgataccatcatcaaaaagtacggcacccacctgctcatctcagccacattgggaggggaggaggctttgaccatgtatatggacaaaagtcgcctcgacaggaagtcagggaatgccactcaaagtgttgaagctctgcaccagctcgcatcatcctactttgttgaccgtgatggtaccatgaggaggcttcatgagatccagatatcaactggagcaatcaaggtcacagagacacgcactgggcctctgggctgtaacagctatgacaatctggactctgtgagttccgtccttctgcaaagcacggagagcaaactgcaccttcaaggtcttcagataatctttcctcagtatctgcaagagaagtttgtccagtcggccttgagctatatcatgtgcaatggggagggggagtacctgtgccagaacagccagtgtcgctgccaatgtgccgaggagtttccgcagtgcaactgccccatcacggacatccagatcatggagtacacgctggccaacatggccaagtcttgggccgaagcttataaggacctggagaattcaggtagagagtctcactcagtgccactgcatgagtggccttgagccaagtctgaaagggagctaatctaactggaattaggactgctgcaagggaaagttcagtgaccctgaccctttcactttggagtgtccagatgcaagtataatagctgtcacagagcaggcactcaataaatctcaactgaataaaattaatgaatagcataatccagtttgtggtcatatgatgtattgtttctgtcgtacccagaagacagaaagaataaatctgcataggaagcctctggagagggaagagtc

SEQ ID NO: 8059 - protein, 320 aa, Homo sapiens
MNWRFVELLYFLFIWGRISVQPSHQEPAGTDQHVSKEFDWLISDRGPFHHSRSYLSFVERHRQGFTTRYKIYREFARWKVRNTAIERRDLVRHPVPLMPEFQRSIRLLGRRPTTQQFIDTIIKKYGTHLLISATLGGEEALTMYMDKSRLDRKSGNATQSVEALHQLASSYFVDRDGTMRRLHEIQISTGAIKVTETRTGPLGCNSYDNLDSVSSVLLQSTESKLHLQGLQIIFPQYLQEKFVQSALSYIMCNGEGEYLCQNSQCRCQCAEEFPQCNCPITDIQIMEYTLANMAKSWAEAYKDLENSGRESHSVPLHEWP

SEQ ID NO: 8060 - DNA, 1588 bp, Homo sapiens
ctgccgctgtcaacccgagcctgagcgatcatggcaacgggctcgggcggggaacgcgtggcagcggctgcagcggcggcagtttggtggcggactggggcggcggagcggcggcggcggcggcggtggcactggcactggccccggccctgagcaccatgcggcggggcagctccgagagcgagctggcggcccggtgggaggcggaggcggtggctgcggccaaagcggcggccaaagctgaggccgaggccacagcggagacggtggcggaacaggtccgcgtggacgcgggcgcggccggggaaccggagtgcaaggcaggggaggagcagcccaaggtcctggccccggccccggcgcagcccagtgcggctgaggaggggaacacccaggtccttcagcggccgccgcccacgctgcccccgtccaagccgaagccggtgcagggcctctgcccgcacgggaagccccgggacaagggccgaagctgcaagcggagctcgggccacggttccggcgagaacggctcccagcggccggtcaccgtggacagctccaaggccaggacctccctggatgccctgaagatcagcatccgccagctcaagtggaaggagttcccatttggccggcgcttgccttgtgacatctactggcatggagtttcatttcacgacaatgacatattctccggtcaagtgaacaagtttccaggttcaaatggtgaaagacgatgacccctcctggaagcccacttttatcgtgaaacctgatggtggttgtcagggtgatggaatctacctcattaaagaccccagtgacatccgcctggcagggaccctccagagcaggccagcggtggtccaggagtacatctgcaaacctctccttatcgacaagctcaagtttgatattcgtctgtatgtcttactcaagtccttagaccccttagagatttatatagccaaagacggactctctaggttttgtaccgagccatatcaggagcccacccccaaaaacctgcaccgcatctttatgcacttaaccaactattcactgaacatccacagcggcaacttcatccactcggacagtgctagcactggcagcaaaaggactttttccagcatcctttgtagactgtcttccaaaggcgttgacatcaagaaggtctggtctgacatcatctccgtggtgattaagacggtcatcgcgctgactccagagctcaaagtcttctaccagtcagacatccccacggggaggccgggccccacgtgcttccaggtaaccattgccagttcccagcctgcgtttccagccttgaccggcctcaagagggctctctggcttcgtgtaggatgagtgatcggggtgggatggccagaggaggggacagtgttggtggtgctgtgggcttgggtgttaaacctgggcccaacttccaagctttctgtttgctccctgtgtgatttggggcaagctacttcccctctgttacctgtaaaatgaaatgaagaatacctatcttaaaaggttcttgtaagaattaaatgagataacacatgtaaagcagagtttt

SEQ ID NO: 8061 - protein, 193 aa, Homo sapiens
MRRGSSESELAARWEAEAVAAAKAAAKAEAEATAETVAEQVRVDAGAAGEPECKAGEEQPKVLAPAPAQPSAAEEGNTQVLQRPPPTLPPSKPKPVQGLCPHGKPRDKGRSCKRSSGHGSGENGSQRPVTVDSSKARTSLDALKISIRQLKWKEFPFGRRLPCDIYWHGVSFHDNDIFSGQVNKFPGSNGERR

SEQ ID NO: 8062 - DNA, 2022 bp, Homo sapiens
cgagtgttggcggggactgagcctcctgcttgaggtagttgtttttactcccagtccccaggctcacgagccccacgcgcgctcaatctgccctcccgcttctcctcgccactccgagttctgcgccctcgagatccagcgcatccgcggggtgggcgggtcctggcggctctttgccctcttccaacatggccgccgctgcctctgtgacaggcagggtcacgtgggcagcctcgcctatgaggtcgctggggctcggccggcgattgtcccttcccggaccccgtctcgatgcggtgactgccgctgtcaacccgagcctgagcgatcatggcaacgggctcgggcggggaacgcgtggcagcggctgcagcggcggcagtttggtggcggactggggcggcggagcggcggcggcggcggcggtggcactggcactggccccggccctgagcaccatgcggcggggcagctccgagagcgagctggcggcccggtgggaggcggaggcggtggctgcggccaaagcggcggccaaagctgaggccgaggccacagcggagacggtggcggaacaggtccgcgtggacgcgggcgcggccggggaaccggagtgcaaggcaggggaggagcagcccaaggtcctggccccggccccggcgcagcccagtgcggctgaggaggggaacacccaggtccttcagcggccgccgcccacgctgcccccgtccaagccgaagccggtgcagggcctctgcccgcacgggaagccccgggacaagggccgaagctgcaagcggagctcgggccacggttccggcgagaacggctcccagcggccggtcaccgtggacagctccaaggccaggacctccctggatgccctgaagatcagcatccgccagctcaagtggaaggagttcccatttggccggcgcttgccttgtgacatctactggcatggagtttcatttcacgacaatgacatattctccggtcaagtgaacaagtttccaggcatgacggagatggtgcgtaaaattactctgagcagagcagtgagaaccatgcagaatctctttcctgaggagtacaacttctaccctcgctcatggattctgcctgacgagttccagctctttgttgctcaggttcaaatggtgaaagacgatgacccctcctggaagcccacttttatcgtgaaacctgatggtggttgtcagggtgatggaatctacctcattaaagaccccagtgacatccgcctggcagggaccctccagagcaggccagcggtggtccaggagtacatctgcaaacctctccttatcgacaagctcaagtttgatattcgtctgtatgtcttactcaagtccttagaccccttagagatttatatagccaaagacggactctctaggttttgtaccgagccatatcaggagcccacccccaaaaacctgcaccgcatctttatgcacttaaccaactattcactgaacatccacagcggcaacttcatccactcggacagtgctagcactggcagcaaaaggactttttccagcatcctttgtagactgtcttccaaaggcgttgacatcaagaaggtctggtctgacatcatctccgtggtgattaagacggtcatcgcgctgactccagagctcaaagtcttctaccagtcagacatccccacggggaggccgggccccacgtgcttccaggtaaccattgccagttcccagcctgcgtttccagccttgaccggcctcaagagggctctctggcttcgtgtaggatgagtgatcggggtgggatggccagaggaggggacagtgttggtggtgctgtgggcttgggtgttaaacctgggcccaacttccaagctttctgtttgctccctgtgtgatttggggcaagctacttcccctctgttacctgtaaaatgaaatgaagaatacctatcttaaaaggttcttgtaagaattaaatgagataacacatgtaaagcagagtttt

SEQ ID NO: 8063 - protein, 538 aa, Homo sapiens
MAAAASVTGRVTWAASPMRSLGLGRRLSLPGPRLDAVTAAVNPSLSDHGNGLGRGTRGSGCSGGSLVADWGGGAAAAAAVALALAPALSTMRRGSSESELAARWEAEAVAAAKAAAKAEAEATAETVAEQVRVDAGAAGEPECKAGEEQPKVLAPAPAQPSAAEEGNTQVLQRPPPTLPPSKPKPVQGLCPHGKPRDKGRSCKRSSGHGSGENGSQRPVTVDSSKARTSLDALKISIRQLKWKEFPFGRRLPCDIYWHGVSFHDNDIFSGQVNKFPGMTEMVRKITLSRAVRTMQNLFPEEYNFYPRSWILPDEFQLFVAQVQMVKDDDPSWKPTFIVKPDGGCQGDGIYLIKDPSDIRLAGTLQSRPAVVQEYICKPLLIDKLKFDIRLYVLLKSLDPLEIYIAKDGLSRFCTEPYQEPTPKNLHRIFMHLTNYSLNIHSGNFIHSDSASTGSKRTFSSILCRLSSKGVDIKKVWSDIISVVIKTVIALTPELKVFYQSDIPTGRPGPTCFQVTIASSQPAFPALTGLKRALWLRVG

SEQ ID NO: 8064 - DNA, 2066 bp, Homo sapiens
ccggggctgagctgcggcggcgcctgacaatgccccctcgcgccccggcctcggcgcccgctcccggctccagcgcgcctgcacgtacgtagccttcacgtgtgtgtggatacggagtgcatgtgtggagacagaggaatatgctccaacaaatttcggatagaggcgccgaagacaggacgtggggaagctaaagaagtaaacaggtcatggcacgtttaacaaaaagacgacaggcggatacaaaagctatccagcatctttgggcagccattgagattatacggaaccagaagcagattgccaacattgaccgtattacaaagtatatgtctcgagtccacggtatgcaccctaaagagaccacccgtcagctgagcttagctgtgaaagatggtcttattgtcgaaactctaacagtgggctgcaaaggttcaaaagctggtattgaacaagaaggatattggttgccaggagatgagattgactgggaaacagaaaatcatgactggtattgttttgaatgccatttgcctggagaggtgttgatatgtgacctgtgttttcgtgtgtatcattccaagtgtttgtctgatgagttcaggcttagagacagcagtagtccctggcagtgcccagtttgcaggagcattaagaagaagaatacaaacaaacaggagatgggcacatacctcagattcattgtctcccgcatgaaggagagggctatagatcttaataaaaaggggaaggacaataaacacccgatgtacaggaggctggtgcactcagctgtggacgttcccaccattcaagagaaagtgaatgaagggaaataccgaagttatgaagagttcaaagctgatgcccaattgcttctccacaataccgtgattttctatggagcagacagtgagcaagctgacattgcgaggatgctatataaagacacatgtcatgagctggatgaactgcagctttgcaagaattgcttttacttgtcaaatgctcgtcctgacaactggttctgttatccttgtatacctaatcatgagctggtttgggctaaaatgaaaggttttgggttttggccagccaaagtcatgcagaaagaagacaatcaagtcgacgttcgcttctttggccaccaccaccagagggcctggattccttctgaaaacattcaagatatcacagtcaacattcatcggctgcacgtgaagcgcagtatgggttggaaaaaggcctgtgatgagctggagctgcatcagcgtttcctacgagaagggagattttggaaatctaagaatgaggaccgaggtgaggaagaggcagaatccagtatctcctccaccagtaatgagcagctaaaggtcactcaagaaccaagagcaaagaaaggacgacgtaatcaaagtgtggagcccaaaaaggaagaaccagagcctgaaacagaagcagtaagttctagccaggaaatacccacgatgcctcagcccatcgaaaaagtctccgtgtcaactcagacaaagaagttaagtgcctcttcaccaagaatgctgcatcggagcacccagaccacaaacgacggcgtgtgtcagagcatgtgccatgacaaatacaccaagatcttcaatgacttcaaagaccggatgaagtcggaccacaagcgggagacagagcgtgttgtccgagaagctctggagaagctgcgttctgaaatggaagaagaaaagagacaagctgtaaataaagctgtagccaacatgcagggtgagatggacagaaaatgtaagcaagtaaaggaaaagtgtaaggaagaatttgtagaagaaatcaagaagctggcaacacagcacaagcaactgatttctcagaccaagaagaagcagtgggtaaataccagtcttttttagacccttatttctgaaaatgtaccacaggtatgatgcccgttaattcagaaggtagctgtggcacatgcagaagatgtttctgaaataagatcaaatgtgaaatggtcagctttagttttaaaaattttattaaaagtcctatgatctctc

SEQ ID NO: 8065 - protein, 568 aa, Homo sapiens
MARLTKRRQADTKAIQHLWAAIEIIRNQKQIANIDRITKYMSRVHGMHPKETTRQLSLAVKDGLIVETLTVGCKGSKAGIEQEGYWLPGDEIDWETENHDWYCFECHLPGEVLICDLCFRVYHSKCLSDEFRLRDSSSPWQCPVCRSIKKKNTNKQEMGTYLRFIVSRMKERAIDLNKKGKDNKHPMYRRLVHSAVDVPTIQEKVNEGKYRSYEEFKADAQLLLHNTVIFYGADSEQADIARMLYKDTCHELDELQLCKNCFYLSNARPDNWFCYPCIPNHELVWAKMKGFGFWPAKVMQKEDNQVDVRFFGHHHQRAWIPSENIQDITVNIHRLHVKRSMGWKKACDELELHQRFLREGRFWKSKNEDRGEEEAESSISSTSNEQLKVTQEPRAKKGRRNQSVEPKKEEPEPETEAVSSSQEIPTMPQPIEKVSVSTQTKKLSASSPRMLHRSTQTTNDGVCQSMCHDKYTKIFNDFKDRMKSDHKRETERVVREALEKLRSEMEEEKRQAVNKAVANMQGEMDRKCKQVKEKCKEEFVEEIKKLATQHKQLISQTKKKQWVNTSLF

SEQ ID NO: 8066 - DNA, 648 bp, Homo sapiens
ggcccgagaggcgccgggcggcgggaaggaggcggcaccggaggggagggccgggcgcggcggcggcggcggtggaggagccggagcataatgctaaagaagtaaacaggtcatggcacgtttaacaaaaagacgacaggcggatacaaaagctatccagcatctttgggcagccattgagattatacggaaccagaagcagattgccaacattgaccgtattacaaagtatatgtctcgagtccacggtatgcaccctaaagagaccacccgtcagctgagcttagctgtgaaagatggtcttattgtcgaaactctaacagtgggctgcaaaggttcaaaagctggtattgaacaagaaggatattggttgccaggagatgagattgactgggaaacagaaaatcatgactggtattgttttgaatgccatttgcctggagaggtgttgatatgtgacctgtgttttcgtgtgtatcattccaagtgtttgtctgatgagttcaggcttagagacagcagtagtccctggcagtgcccagtttgcagggctggagggcagtggcatgatctcggctcactgcaacctccacttcctgggttcaagtgattcttctgcctcagcctcccgagtagctgggattacag

SEQ ID NO: 8067 - protein, 165 aa, Homo sapiens
MARLTKRRQADTKAIQHLWAAIEIIRNQKQIANIDRITKYMSRVHGMHPKETTRQLSLAVKDGLIVETLTVGCKGSKAGIEQEGYWLPGDEIDWETENHDWYCFECHLPGEVLICDLCFRVYHSKCLSDEFRLRDSSSPWQCPVCRAGGQWHDLGSLQPPLPGFK

SEQ ID NO: 8068 - DNA, 4091 bp, Homo sapiens
gctaaagaagtaaacaggtcatggcacgtttaacaaaaagacgacaggcggatacaaaagctatccagcatctttgggcagccattgagattatacggaaccagaagcagattgccaacattgaccgtattacaaaatgtgaaacaactacattattcttgaacctatggtgatttttacatcattacacagatatgtcattttcattagttgtatcattgttataaactggtatatgtctcgagtccacggtatgcaccctaaagagaccacccgtcagctgagcttagctgtgaaagatggtcttattgtcgaaactctaacagtgggctgcaaaggttcaaaagctggtattgaacaagaaggatattggttgccaggagatgagattgactgggaaacagaaaatcatgactggtattgttttgaatgccatttgcctggagaggtgttgatatgtgacctgtgttttcgtgtgtatcattccaagtgtttgtctgatgagttcaggcttagagacagcagtagtccctggcagtgcccagtttgcaggagcattaagaagaagaatacaaacaaacaggagatgggcacatacctcagattcattgtctcccgcatgaaggagagggctatagatcttaataaaaaggggaaggacaataaacacccgatgtacaggaggctggtgcactcagctgtggacgttcccaccattcaagagaaagtgaatgaagggaaataccgaagttatgaagagttcaaagctgatgcccaattgcttctccacaataccgtgattttctatggagcagacagtgagcaagctgacattgcgaggatgctatataaagacacatgtcatgagctggatgaactgcagctttgcaagaattgcttttacttgtcaaatgctcgtcctgacaactggttctgttatccttgtatacctaatcatgagctggtttgggctaaaatgaaaggttttgggttttggccagccaaagtcatgcagaaagaagacaatcaagtcgacgttcgcttctttggccaccaccaccagagggcctggattccttctgaaaacattcaagatatcacagtcaacattcatcggctgcacgtgaagcgcagtatgggttggaaaaaggcctgtgatgagctggagctgcatcagcgtttcctacgagaagggagattttggaaatctaagaatgaggaccgaggtgaggaagaggcagaatccagtatctcctccaccagtaatgagcagctaaaggtcactcaagaaccaagagcaaagaaaggacgacgtaatcaaagtgtggagcccaaaaaggaagaaccagagcctgaaacagaagcagtaagttctagccaggaaatacccacgatgcctcagcccatcgaaaaagtctccgtgtcaactcagacaaagaagttaagtgcctcttcaccaagaatgctgcatcggagcacccagaccacaaacgacggcgtgtgtcagagcatgtgccatgacaaatacaccaagatcttcaatgacttcaaagaccggatgaagtcggaccacaagcgggagacagagcgtgttgtccgagaagctctggagaagctgcgttctgaaatggaagaagaaaagagacaagctgtaaataaagctgtagccaacatgcagggtgagatggacagaaaatgtaagcaagtaaaggaaaagtgtaaggaagaatttgtagaagaaatcaagaagctggcaacacagcacaagcaactgatttctcagaccaagaagaagcagtggtgctacaactgtgaggaggaggccatgtaccactgctgctggaacacatcctactgctccatcaagtgccagcaggagcactggcacgcggagcacaagcgcacctgccgccggaaaagatgaagctggcccttcccggagtcaccccgatgattactcttttcagacacagcggtttttgtttccaagaagccaaaattgtttagaatttgcttcccattttgcaccagcctttaaacacttttcgtgaagaaattttgcacagtagtttaaatcttttgttaatgctcctccgaagtttttcagggggtaaaagtaacatcagtggagggtattattttaaataaattttaattgagaatttgttgcattttcagcaaattttaaaacatttttaggttttacagagattttaacctttaaacaacagatctttaaaaaacaggtgaatacaagtgagtttaacaaagaaacatttagaatagatctgaatgtaagaactacagaactgtttcagaaataaaacatactaccttgatgtgacatttttttcttaaccttgttgagctggttttgttcagcttaatttactgttcaaaggcattatctgttggtcacaccagtgggtatatgattgaatttagggaacagggttgacacagcagggctagtcctgcatattttttcttaaatatttcccaattgtgtttttcattatttcttttcaatatataacttttataacaaattattagctttgatcttgtagtttaaaattgcagggaactggggtaatcttttactgagctggatcttagagaaaatgaatatttaaattttaaagtttgcacatttcatctttgtcctaacatgagtgcttgtaacaaaataaacaacaaaaacaaagccaaaaactacctttatccatatgtgaaattatagatgaggcatacgaatttgtttaatgcttcccttcccttcccacatatcatctcactgcctattatctggtgtcacctcatgtatcgtaagttaatactaaaagaagagaaagcacttaagtttcacagaagccgttatgtttgtagtaatgggtcattgcctactaatgaactccatcactgtacacagaatgaagaataatgcatgttaattttcttgtattaaagatgccgtgatttgtaaaaagtctgtattttgcggaatgtctggattaagaagcattaccaataggaatggatcgatagttgaataatgattttttatacatagatatataaaatacagccaggaaaacttaaattacttttcttttaaaatatctcacaatttatgtggtatttttaaagactgatcttagaccaagtcaaattcccatttatcatttagttattttttgaggttagagaataatttgtacatatttatttagacctttgatatttattaaagcaattactcacaatggaagtgaaagaatcaggagaaaagccttttaaaaagtattctccaggtttgtcagggtcactctaaagataaaaatgtaactaagtcttctgtgaaatatcatccatctaatcttgatgctgttgcagatggtggtgacacaagttaattgacaaactactgccaaatggtgcacaatattttgtaaaaagtacccagtagccccatttcatacaatgtacctaaattatgcagtaacttggcatcatcgttccctccttgttgctgtgtaattagtcagtgttgccacagtgtgtggcgctgatggagatgtcagaaccgagaacacttaaccttctttgattgtttttcaagttttaagacttcgatccacccctatgagagcaagtaattgtggaaatatttttggtgtaaaatcattccagagtatgtaatatttaactgatagctgcatgaaagtgagattcgtgttactttggcttttctgtctctgttgacacggttgcacatttccaagttactacagcgtgaaaactgtgtgtttaaaaaaaaacaaaattaaaaaaagagattgtggcctggttttgtaaaagttttaggtaaaattacaattgattgttttaggaatcattattaaaaattttctgcaaatcataaagctatatcgaggtgttgagcttagccactatgcacattgtaattattcattgtggctgtccagttctatgatgcattctggcattttgtaagctgctctgactagcaatatatagattcatttaatgtgttaacattggttaataaatgtatttaaaaaaaacta

SEQ ID NO: 8069 - protein, 585 aa, Homo sapiens
MVIFTSLHRYVIFISCIIVINWYMSRVHGMHPKETTRQLSLAVKDGLIVETLTVGCKGSKAGIEQEGYWLPGDEIDWETENHDWYCFECHLPGEVLICDLCFRVYHSKCLSDEFRLRDSSSPWQCPVCRSIKKKNTNKQEMGTYLRFIVSRMKERAIDLNKKGKDNKHPMYRRLVHSAVDVPTIQEKVNEGKYRSYEEFKADAQLLLHNTVIFYGADSEQADIARMLYKDTCHELDELQLCKNCFYLSNARPDNWFCYPCIPNHELVWAKMKGFGFWPAKVMQKEDNQVDVRFFGHHHQRAWIPSENIQDITVNIHRLHVKRSMGWKKACDELELHQRFLREGRFWKSKNEDRGEEEAESSISSTSNEQLKVTQEPRAKKGRRNQSVEPKKEEPEPETEAVSSSQEIPTMPQPIEKVSVSTQTKKLSASSPRMLHRSTQTTNDGVCQSMCHDKYTKIFNDFKDRMKSDHKRETERVVREALEKLRSEMEEEKRQAVNKAVANMQGEMDRKCKQVKEKCKEEFVEEIKKLATQHKQLISQTKKKQWCYNCEEEAMYHCCWNTSYCSIKCQQEHWHAEHKRTCRRKR

SEQ ID NO: 8070 - DNA, 747 bp, Homo sapiens
aggagatgggcacatacctcagattcattgtctcccgcatgaaggagactaaaggtcactcaagaaccaagagcaaagaaaggacgacgtaatcaaagtgtggagcccaaaaaggaagaaccagagcctgaaacagaagcagtaagttctagccaggaaatacccacgatgcctcagcccatcgaaaaagtctccgtgtcaactcagacaaagaagttaagtgcctcttcaccaagaatgctgcatcggagcacccagaccacaaacgacggcgtgtgtcagagcatgtgccatgacaaatacaccaagatcttcaatgacttcaaagaccggatgaagtcggaccacaagcgggagacagagcgtgttgtccgagaagctctggagaagctgcgttctgaaatggaagaagaaaagagacaagctgtaaataaagctgtagccaacatgcagggtgagatggacagaaaatgtaagcaagtaaaggaaaagtgtaaggaagaatttgtagaagaaatcaagaagctggcaacacagcacaagcaactgatttctcagaccaagaagaagcagtgggtaaataccagtcttttttagacccttatttctgaaaatgtaccacaggtatgatgcccgttaattcagaaggtagctgtggcacatgcagaagatgtttctgaaataagatcaaatgtgaaatggtcagctttagttttaaaaattttattaaaagtcctatgatctctc

SEQ ID NO: 8071 - protein, 142 aa, Homo sapiens
MPQPIEKVSVSTQTKKLSASSPRMLHRSTQTTNDGVCQSMCHDKYTKIFNDFKDRMKSDHKRETERVVREALEKLRSEMEEEKRQAVNKAVANMQGEMDRKCKQVKEKCKEEFVEEIKKLATQHKQLISQTKKKQWVNTSLF

SEQ ID NO: 8072 - DNA, 7896 bp, Homo sapiens
ctcggtgcggttccgccgggcgcgaggagccgccgagacctccgcctgcgaacaaagaggaggccgtgcggggcgcggcgcccgcggagcatggcggaccgcagcctggagggcatggcgctgcccctggaggtgcgggcgcgcctggccgagctggagctggagctgtcggaaggtgacatcacacaaaaaggatatgaaaagaagaggtcaaagttaattggagcctaccttccgcagcctccgagggtggaccaagctttgccgcaagaacgccgggctcctgtcactccttcctccgcctctcgctaccaccgccgacggtcttcagggtcacgagatgagcgctatcggtcagacgtccacacggaagctgtccaggcggctctggccaaacacaaagagcggaagatggcagtgcctatgccttccaaacgcaggtccctggtcgtgcagacctcgatggacgcctacacccctccagatacctcttctggctcagaagatgaaggctcagtgcagggggactcccagggcacccccacctccagccagggcagcatcaatatggagcactggatcagccaggccatccacggctccaccacgtccaccacctcctcgtcctctacgcagagcgggggcagcggggctgcccacaggctggcggacgtcatggctcagacccacatagaaaatcattctgcacctcctgacgtaaccacgtacacctcagagcactcgatacaggtggagagaccgcagggttccacggggtcccggacagcgcccaagtacggcaacgccgagctcatggagaccggggatggagtaccagtaagtagccgggtgtcagcaaaaatccagcagcttgtcaataccctcaaacgaccgaaacgaccacctttacgagaattctttgtcgatgactttgaagaattattagaagttcaacaaccggatccgaaccaaccaaagccggagggggcccagatgctggccatgcgcggagagcagctgggcgtggtcacgaactggccgccgtcgctggaggccgcactgcagaggtggggcaccatctcgcccaaggcgccctgcctgaccaccatggacaccaacgggaagcccctctacatcctcacttacggcaagctgtggacaagaagtatgaaggtcgcttacagcattctacacaaattaggcacaaagcaggaacccatggtccggcctggagatagggtggcactggtgttccccaacaatgatccggctgccttcatggcggctttctacggctgcctgctggccgaggtggtccccgtgcccatcgaggtgccgctcaccaggaaggacgcagggagccagcagataggtttcttgcttggaagctgtggagttactgtagccttgactagtgacgcctgccataaaggacttccaaaaagcccaacgggagagatcccacagtttaaaggttggccaaagctgctgtggtttgtcacagagtctaaacatctctccaaaccgccccgagactggttcccacacattaaagatgccaataacgacactgcgtatattgagtacaagacgtgtaaggatggcagtgtgctgggtgtgacggtgacgaggactgcgctgctgacacactgccaggccctgacgcaggcgtgtggctacacggaagctgaaaccattgtgaatgtgctggatttcaagaaggacgtcgggctctggcatggcatcctgacaagcgtcatgaacatgatgcatgtgatcagcatcccgtactcgctgatgaaggtgaaccctctctcctggatccagaaggtctgccagtacaaagcaaaagtggcgtgtgtgaaatcgagggatatgcattgggcattagtagcacacagagatcagagagacatcaacctctcctctctgcgaatgctgatagtggcggacggcgcgaacccctggtctatttcttcttgcgatgcatttctcaatgtcttccaaagtaaaggccttcgacaggaggtcatctgtccttgtgccagctcgccagaggccctcactgtggccatccggaggcccacggatgacagtaaccagcccccgggccggggtgtcctctccatgcatggactgacctatggggtcattcgtgtggactcggaagagaagctgtccgtgctcaccgtgcaggatgtcggcctcgtgatgcctggagccatcatgtgttcagtgaagccagacggggttcctcagctgtgcagaacggatgagatcggggagctgtgtgtgtgtgcagttgcgacgggcacgtcctactatggcctctctggcatgaccaagaacacctttgaggtgtttcccatgacaagctccggggctccgatcagtgaatacccattcataaggacaggcttgctggggttcgtgggtcccggaggcctcgtcttcgtggtgggcaagatggatggcctcatggtggtcagcgggcgcaggcacaacgccgacgacatcgtggccactgcgctggccgtagaacccatgaagtttgtctaccggggaaggatagccgtgttctcggtgaccgtgctgcacgacgagaggatcgtgatcgtggctgagcagaggcctgactccacggaagaggacagtttccagtggatgagccgtgtgctgcaggcgattgacagtatacatcaagttggagtttattgcctggccttggtgccagcaaacaccctccccaaaaccccgcttggtgggatccatttatcagaaacaaaacagctttttctggagggctctctgcacccctgcaatgtcctaatgtgcccccacacctgcgtcacaaacttgcctaagcctcgacagaagcagccagaaatcggccctgcctctgtgatggtggggaacctggtctctgggaagagaatcgcccaggccagtggcagagacctgggtcagatcgaagataacgaccaggcacgcaagttcctgttcctctcagaggtcttgcagtggagagcacagaccaccccggaccacatcctctacacgctgctcaactgtcggggtgcgatagcgaactcgctgacctgcgtgcagctgcacaagagagctgagaagatcgccgtgatgctgatggagaggggccaccttcaggacggcgaccacgtggccttggtctaccccccaggaatagacctgatagcagcgttttatggttgcctgtacgcaggctgtgtgccaataaccgtccgtcccccgcacccacagaacatcgcgacgacgttgcctaccgtcaagatgattgtggaggtgagtcgctctgcctgtctgatgacgacacagctgatctgtaagttgctgcggtccagggaggcggcggcggctgtggacgtcaggacgtggcccctcatcctggacacagatgatttgccaaagaagcggcctgcccagatctgcaaaccttgcaacccagacactcttgcatatctcgacttcagcgtgtccacaactgggatgctagctggcgtaaagatgtctcacgcagccaccagtgccttctgccgttccattaagctgcagtgtgaactttacccctctagagaagtggccatctgcctggacccttactgtggactgggatttgtcctctggtgcctctgcagtgtgtattctgggcaccagtccatcctgatcccgccctctgagctggaaaccaaccccgccttgtggcttcttgccgtgagtcagtacaaagtccgagacacgttttgctcctactccgtgatggagctgtgcaccaaggggctgggctcgcaaacagagtccctcaaggcgcgagggctggacttgtcccgagtgaggacctgcgtggttgtggcggaagagaggcctcggatcgcactcacacagtcgttctcaaagctgtttaaggacctgggccttcacccgcgggccgtcagcacctcgttcggttgcagggtgaacctggcgatttgcttgcagggaacctcaggacctgacccaaccactgtctacgtggacatgagagccctgagacacgacagagtccgcttagtggaaagaggatcccctcatagtctgcccctgatggaatcgggaaagatacttccaggggttcggattataattgccaacccagaaacaaaaggaccgctgggggactcacaccttggagagatttgggttcacagtgcccacaatgccagcggttatttcactatttacggagacgaatccctccagtcagatcacttcaactcaagactaagttttggagacacccagaccatctgggcacgcacaggctacttggggttcctgcggagaactgagctcacagatgcaaatggagagcgccatgatgccctctacgtggtaggggcactggacgaagccatggagctgcggggcatgcggtaccacccaatcgacattgagacctcggtcatcagagcccataaaagcgttacggaatgtgctgtgtttacctggacaaatttgttggtggttgtggttgagctggatgggtcggaacaagaagccttggacctggttcccttggtgaccaacgtggtcctggaggagcactacctgatcgtcggagtggtggtcgtggtggacatcggcgtcatccccatcaactcccgtggggagaagcagcgcatgcacctgcgagacgggtttttggcagaccagctagaccccatctatgtggcctacaacatgtagtctcgtctcttggcttccatggacttttctagagatgtagacattgttctccgtgtccactgaagcgtgcagacacagggcaacactcaccagaatacagccatttgtggtgagagtggaggaggaagaggaggaggaagaggacttctcacagcagccacgattggcatgggggtgaaatgtgaatttaccactgaatttcgctcagaaggactttggattactgccttcagtttgttggaaaagcccatttcaaaactttcttttcttttctttcttttttaattattggataataagtgctttcttcgtaaatgtggtattttgttaagccgaaatagcaattaaaaaaatatcctgccctccagatgggttcttttaaacaatttatgtagtgtgacaaagaattgttttctctgttttaatgtgtcatgaaatcttaatgacatggatctgttactaatttaagccattgctagatctcatccttttaggaaagtttgaggtacgagaaaaccttccaaatagcaccttccaattagataatagcagctttctttgtcagaaatgtgctgaagaaacaaaggctggtatacggccttcgaagttagtatagaatgagaagaaattataaataaggtgtatttcggcaattatcttgcaaatatctttgtactaaactaaaaagataaaataagttaacttcctcaatatgtaattatgtacaaaacgtttaatttattttgatctctttagaactataaaagagaaaaacattcaagaatattaaagtcttgtaatgtttgctaatataaaaaagtgttgtattatcttgcgtggatagtatcacaacaaatatatatatatgaaatataaattcactaatgaacaaaggagattttaaagtttaagatgcagaacttgtcacttgcatggtgtgccccccgtactcacatacactctgctgttgccagcagtcgcagaccgcaggagccctgtctaaaagtttcttctagaaccagagaccagcaagtgaaattattgccatctcaaggatggcaaaagaattcaaagctcaatgtgcactatttttttctttgctgtgggacaacagtgaatgtgtttatgccagcgtgtgctgatgatactgaggggctttaggttggcaaatagcactgttttcttagctgcaagaattcattgcacaatgtttttcatcatttttgttaatgtcatctttttttggtccttgctacgaaaaggaatgcgattctgtggtcattcgcactgggttgcattgattccccctctgatggccaatgtggagtggacaaagtgtccggaactcacatcggtgatcgtcccctcgtcttaagacccagcccgctctgtgtgagcctctggggctccctcgctcagtgagcacagttccccgggggttcatgccagagctccggctgaagcaagaagtcctccagctgcgtcgtttgccgcctgtggacgagtgcgccccagtttctgccctggcagctcctggccacaccttctcagagctcacctgtgcacttctaaattgaattggcccacggtgtccaaccaagaaggagcatctgcactccgagaaagatgtgttctgtaactgccccagtgtgaccccgcagtggctctcggtgctagatatgcatgactaagattgatgctgggcaaaatgtagatgatctttcattatgttgtgggcagcgtctttctctgcctttgctatatgcagtcagcagtaagccttttgctaaaagagttttgtttgacttctgagatccaaggctgattgttgttaaaaaaaaaaaaaaaaaaaaagtggcacatttaaaaaaatgtgtctgcatatgtggtgcatccttccatctccacaaaccatttgattcttgaaatattgtttgacctcattgctgtgtgtgaatatttctccacatgcttcagatgcacattcctagtctctgcttcctaaggggggaaccaccacacattggggggaaaaaagacattttcctacacccacccaccttgttgaaagggaggtaggtttggggcttcaggccaggcactgactatgaaacattagctgcagtgtgcaggacagctttgaggtccagctgaagtcaggaagcaaaacaaatgtagatgtcacttcaaacataatttcaactgtcaccagatcaactctacattcaaggagtgtggacgctgcagtgcagttgtgagggcagttagcagccgcctcttctgcatcctgtcaactctgattagttagagtttaggctcaaaagagttggtggactgagattgaaatttggttgtgcaagagaaaggaaaggagacacttagtaccaccagtttcagcaataaagaagggtcattctgtattcaaaattgtactgtagataaatcattcatgagattgtaaaaaatgtttgtcttgtgaccttgtgcttttgaagtcagacaaaaccgtgtaatcaacttgcacaaaaagagggtacacagtgaacatataaacacagacctaatcaaacaggagcagattcctcatggtgcttgtttattatatatatttaatcctgcttgacactttacccaagggagatggtcccttttatcagttgaatgttagcagcgttatttcagagtgtggtgactggttagagaaactcatgtactcaaccagccacagtttcaaacaaaatttttatgtgcaaaggacagcaaccttcttgtatgttaaaccaccagtacgctttgtacatctgtgataacgcctgttttatattcaaatgaacaaataaaagcttttatttttgttgctctgaaaatagcagtttcttaattggtcccctggaaagatgtctgggacagctttaatcccgggaaggaagtgactcctacagggaaatgtatctgactctgtttacataatttgttgcattacttagtacagataatcatactttgaaaaatgtttaaattttgatgtgggcatttattgctaaaaataattcctatggcaacaaatgttttgtgaaatgttttttttaattcttttaaatatatctaaatatatttgttcacattttgctgcaa

SEQ ID NO: 8073 - protein, 1556 aa, Homo sapiens; identical to SEQ ID NO: 1138

SEQ ID NO: 8074 - DNA, 7624 bp, Homo sapiens
ctcggtgcggttccgccgggcgcgaggagccgccgagacctccgcctgcgaacaaagaggaggccgtgcggggcgcggcgcccgcggagcatggcggaccgcagcctggagggcatggcgctgcccctggaggtgcgggcgcgcctggccgagctggagctggagctgtcggaaggtgacatcacacaaaaaggatatgaaaagaagaggtcaaagttaattggagcctaccttccgcagcctccgagggtggaccaagctttgccgcaagaacgccgggctcctgtcactccttcctccgcctctcgctaccaccgccgacggtcttcagggtcacgagatgagcgctatcggtcagacgtccacacggaagctgtccaggcggctctggccaaacacaaagagcggaagatggcagtgcctatgccttccaaacgcaggtccctggtcgtgcagacctcgatggacgcctacacccctccagatacctcttctggctcagaagatgaaggctcagtgcagggggactcccagggcacccccacctccagccagggcagcatcaatatggagcactggatcagccaggccatccacggctccaccacgtccaccacctcctcgtcctctacgcagagcgggggcagcggggctgcccacaggctggcggacgtcatggctcagacccacatagaaaatcattctgcacctcctgacgtaaccacgtacacctcagagcactcgatacaggtggagagaccgcagggttccacggggtcccggacagcgcccaagtacggcaacgccgagctcatggagaccggggatggagtaccagtaagtagccgggtgtcagcaaaaatccagcagcttgtcaataccctcaaacgaccgaaacgaccacctttacgagaattctttgtcgatgactttgaagaattattagaagttcaacaaccggatccgaaccaaccaaagccggagggggcccagatgctggccatgcgcggagagcagctgggcgtggtcacgaactggccgccgtcgctggaggccgcactgcagaggtggggcaccatctcgcccaaggcgccctgcctgaccaccatggacaccaacgggaagcccctctacatcctcacttacggcaagctgtggacaagaagtatgaaggtcgcttacagcattctacacaaattaggcacaaagcaggaacccatggtccggcctggagatagggtggcactggtgttccccaacaatgatccggctgccttcatggcggctttctacggctgcctgctggccgaggtggtccccgtgcccatcgaggtgccgctcaccaggaaggacgcagggagccagcagataggtttcttgcttggaagctgtggagttactgtagccttgactagtgacgcctgccataaaggacttccaaaaagcccaacgggagagatcccacagtttaaaggttggccaaagctgctgtggtttgtcacagagtctaaacatctctccaaaccgccccgagactggttcccacacattaaagatgccaataacgacactgcgtatattgagtacaagacgtgtaaggatggcagtgtgctgggtgtgacggtgacgaggactgcgctgctgacacactgccaggccctgacgcaggcgtgtggctacacggaagctgaaaccattgtgaatgtgctggatttcaagaaggacgtcgggctctggcatggcatcctgacaagcgtcatgaacatgatgcatgtgatcagcatcccgtactcgctgatgaaggtgaaccctctctcctggatccagaaggtctgccagtacaaagcaaaagtggcgtgtgtgaaatcgagggatatgcattgggcattagtagcacacagagatcagagagacatcaacctctcctctctgcgaatgctgatagtggcggacggcgcgaacccctggtctatttcttcttgcgatgcatttctcaatgtcttccaaagtaaaggccttcgacaggaggtcatctgtccttgtgccagctcgccagaggccctcactgtggccatccggaggcccacggatgacagtaaccagcccccgggccggggtgtcctctccatgcatggactgacctatggggtcattcgtgtggactcggaagagaagctgtccgtgctcaccgtgcaggatgtcggcctcgtgatgcctggagccatcatgtgttcagtgaagccagacggggttcctcagctgtgcagaacggatgagatcggggagctgtgtgtgtgtgcagttgcgacgggcacgtcctactatggcctctctggcatgaccaagaacacctttgaggtgtttcccatgacaagctccggggctccgatcagtgaatacccattcataaggacaggcttgctggggttcgtgggtcccggaggcctcgtcttcgtggtgggcaagatggatggcctcatggtggtcagcgggcgcaggcacaacgccgacgacatcgtggccactgcgctggccgtagaacccatgaagtttgtctaccggggaaggatagccgtgttctcggtgaccgtgctgcacgacgagaggatcgtgatcgtggctgagcagaggcctgactccacggaagaggacagtttccagtggatgagccgtgtgctgcaggcgattgacagtatacatcaagttggagtttattgcctggccttggtgccagcaaacaccctccccaaaaccccgcttggtgggatccatttatcagaaacaaaacagctttttctggagggctctctgcacccctgcaatgtcctaatgtgcccccacacctgcgtcacaaacttgcctaagcctcgacagaagcagccagaaatcggccctgcctctgtgatggtggggaacctggtctctgggaagagaatcgcccaggccagtggcagagacctgggtcagatcgaagataacgaccaggcacgcaagttcctgttcctctcagaggtcttgcagtggagagcacagaccaccccggaccacatcctctacacgctgctcaactgtcggggtgcgatagcgaactcgctgacctgcgtgcagctgcacaagagagctgagaagatcgccgtgatgctgatggagaggggccaccttcaggacggcgaccacgtggccttggtctaccccccaggaatagacctgatagcagcgttttatggttgcctgtacgcaggctgtgtgccaataaccgtccgtcccccgcacccacagaacatcgcgacgacgttgcctaccgtcaagatgattgtggaggtgagtcgctctgcctgtctgatgacgacacagctgatctgtaagttgctgcggtccagggaggcggcggcggctgtggacgtcaggacgtggcccctcatcctggacacagatgatttgccaaagaagcggcctgcccagatctgcaaaccttgcaacccagacactcttgcatatctcgacttcagcgtgtccacaactgggatgctagctggcgtaaagatgtctcacgcagccaccagtgccttctgccgttccattaagctgcagtgtgaactttacccctctagagaagtggccatctgcctggacccttactgtggactgggatttgtcctctggtgcctctgcagtgtgtattctgggcaccagtccatcctgatcccgccctctgagctggaaaccaaccccgccttgtggcttcttgccgtgagtcagtacaaagtccgagacacgttttgctcctactccgtgatggagctgtgcaccaaggggctgggctcgcaaacagagtccctcaaggcgcgagggctggacttgtcccgagtgaggacctgcgtggttgtggcggaagagaggcctcggatcgcactcacacagtcgttctcaaagctgtttaaggacctgggccttcacccgcgggccgtcagcacctcgttcggttgcagggtgaacctggcgatttgcttgcagggaacctcaggacctgacccaaccactgtctacgtggacatgagagccctgagacacgacagagtccgcttagtggaaagaggatcccctcatagtctgcccctgatggaatcgggaaagatacttccaggggttcggattataattgccaacccagaaacaaaaggaccgctgggggactcacaccttggagagatttgggttcacagtgcccacaatgccagcggttatttcactatttacggagacgaatccctccagtcagatcacttcaactcaagactaagttttggagacacccagaccatctgggcacgcacaggctacttggggttcctgcggagaactgagctcacagatgcaaatggagagcgccatgatgccctctacgtggtaggggcactggacgaagccatggagctgcggggcatgcggtaccacccaatcgacattgagacctcggtcatcagagcccataaaagcgttacggaatgtgctgtgtttacctggacaaatttgttggtggttgtggttgagctggatgggtcggaacaagaagccttggacctggttcccttggtgaccaacgtggtcctggaggagcactacctgatcgtcggagtggtggtcgtggtggacatcggcgtcatccccatcaactcccgtggggagaagcagcgcatgcacctgcgagacgggtttttggcagaccagctagaccccatctatgtggcctacaacatgtagtctcgtctcttggcttccatggacttttctagagatgtagacattgttctccgtgtccactgaagcgtgcagacacagggcaacactcaccagaatacagccatttgtggtgagagtggaggaggaagaggaggaggaagaggacttctcacagcagccacgattggcatgggggtgaaatgtgaatttaccactgaatttcgctcagaaggactttggattactgccttcagtttgttggaaaagcccatttcaaaactttcttttcttttctttcttttttaattattggataataagtgctttcttcgtaaatgtggtattttgttaagccgaaatagcaattaaaaaaatatcctgccctccagatgggttcttttaaacaatttatgtagtgtgacaaagaattgttttctctgttttaatgtgtcatgaaatcttaatgacatggatctgttactaatttaagccattgctagatctcatccttttaggaaagtttgaggtacgagaaaaccttccaaatagcaccttccaattagataatagcagctttctttgtcagaaatgtgctgaagaaacaaaggctggtatacggccttcgaagttagtatagaatgagaagaaattataaataaggtgtatttcggcaattatcttgcaaatatctttgtactaaactaaaaagataaaataagttaacttcctcaatatgtaattatgtacaaaacgtttaatttattttgatctctttagaactataaaagagaaaaacattcaagaatattaaagtcttgtaatgtttgctaatataaaaaagtgttgtattatcttgcgtggatagtatcacaacaaatatatatatatgaaatataaattcactaatgaacaaaggagattttaaagtttaagatgcagaacttgtcacttgcatggtgtgccccccgtactcacatacactctgctgttgccagcagtcgcagaccgcaggagccctgtctaaaagtttcttctagaaccagagaccagcaagtgaaattattgccatctcaaggatggcaaaagaattcaaagctcaatgtgcactatttttttctttgctgtgggacaacagtgaatgtgtttatgccagcgtgtgctgatgatactgaggggctttaggttggcaaatagcactgttttcttagctgcaagaattcattgcacaatgtttttcatcatttttgttaatgtcatctttttttggtccttgctacgaaaaggaatgcgattctgtggtcattcgcactgggttgcattgattccccctctgatggccaatgtggagtggacaaagtgtccggaactcacatcggtgatcgtcccctcgtcttaagacccagcccgctctgtgtgagcctctggggctccctcgctcagtgagcacagttccccgggggttcatgccagagctccggctgaagcaagaagtcctccagctgcgtcgtttgccgcctgtggacgagtgcgccccagtttctgccctggcagctcctggccacaccttctcagagctcacctgtgcacttctaaattgaattggcccacggtgtccaaccaagaaggagcatctgcactccgagaaagatgtgttctgtaactgccccagtgtgaccccgcagtggctctcggtgctagatatgcatgactaagattgatgctgggcaaaatgtagatgatctttcattatgttgtgggcagcgtctttctctgcctttgctatatgcagtcagcagtaagccttttgctaaaagagttttgtttgacttctgagatccaaggctgattgttgttaaaaaaaaaaaaaaaaaaaaagtggcacatttaaaaaaatgtgtctgcatatgtggtgcatccttccatctccacaaaccatttgattcttgaaatattgtttgacctcattgctgtgtgtgaatatttctccacatgcttcagatgcacattcctagtctctgcttcctaaggggggaaccaccacacattggggggaaaaaagacattttcctacacccacccaccttgttgaaagggaggtaggtttggggcttcaggccaggcactgactatgaaacattagctgcagtgtgcaggacagctttgaggtccagctgaagtcaggaagcaaaacaaatgtagatgtcacttcaaacataatttcaactgtcaccagatcaactctacattcaaggagtgtggacgctgcagtgcagttgtgagggcagttagcagccgcctcttctgcatcctgtcaactctgattagttagagtttaggctcaaaagagttggtggactgagattgaaatttggttgtgcaagagaaaggaaaggagacacttagtaccaccagtttcagcaataaagaagggtcattctgtattcaaaattgtactgtagataaatcattcatgagattgtaaaaaatgtttgtcttgtgaccttgtgcttttgaagtcagacaaaaccgtgtaatcaacttgcacaaaaagagggtacacagtgaacatataaacacagacctaatcaaacaggagcagattcctcatggtgcttgtttattatatatatttaatcctgcttgacactttacccaagggagatggtcccttttatcagttgaatgttagcagcgttatttcagagtgtggtgactggttagagaaactcatgtactcaaccagccacagtttcaaacaaaatttttatgtgcaaaggacagcaaccttcttgtatgttaaaccaccagtacgctttgtacatctgtgataacgcctgttttatattcaaatgaacaaataaaagcttttatttttgttgctctg

SEQ ID NO: 8075 - protein, 1556 aa, Homo sapiens; identical to SEQ ID NO: 1138

SEQ ID NO: 8076 - DNA, 5145 bp, Homo sapiens
ctcggtgcggttccgccgggcgcgaggagccgccgagacctccgcctgcgaacaaagaggaggccgtgcggggcgcggcgcccgcggagcatggcggaccgcagcctggagggcatggcgctgcccctggaggtgcgggcgcgcctggccgagctggagctggagctgtcggaaggtgacatcacacaaaaaggatatgaaaagaagaggtcaaagttaattggagcctaccttccgcagcctccgagggtggaccaagctttgccgcaagaacgccgggctcctgtcactccttcctccgcctctcgctaccaccgccgacggtcttcagggtcacgagatgagcgctatcggtcagacgtccacacggaagctgtccaggcggctctggccaaacacaaagagcggaagatggcagtgcctatgccttccaaacgcaggtccctggtcgtgcagacctcgatggacgcctacacccctccagatacctcttctggctcagaagatgaaggctcagtgcagggggactcccagggcacccccacctccagccagggcagcatcaatatggagcactggatcagccaggccatccacggctccaccacgtccaccacctcctcgtcctctacgcagagcgggggcagcggggctgcccacaggctggcggacgtcatggctcagacccacatagaaaatcattctgcacctcctgacgtaaccacgtacacctcagagcactcgatacaggtggagagaccgcagggttccacggggtcccggacagcgcccaagtacggcaacgccgagctcatggagaccggggatggagtaccagtaagtagccgggtgtcagcaaaaatccagcagcttgtcaataccctcaaacgaccgaaacgaccacctttacgagaattctttgtcgatgactttgaagaattattagaagttcaacaaccggatccgaaccaaccaaagccggagggggcccagatgctggccatgcgcggagagcagctgggcgtggtcacgaactggccgccgtcgctggaggccgcactgcagaggtggggcaccatctcgcccaaggcgccctgcctgaccaccatggacaccaacgggaagcccctctacatcctcacttacggcaagctgtggacaagaagtatgaaggtcgcttacagcattctacacaaattaggcacaaagcaggaacccatggtccggcctggagatagggtggcactggtgttccccaacaatgatccggctgccttcatggcggctttctacggctgcctgctggccgaggtggtccccgtgcccatcgaggtgccgctcaccaggaaggacgcagggagccagcagataggtttcttgcttggaagctgtggagttactgtagccttgactagtgacgcctgccataaaggacttccaaaaagcccaacgggagagatcccacagtttaaaggttggccaaagctgctgtggtttgtcacagagtctaaacatctctccaaaccgccccgagactggttcccacacattaaagatgccaataacgacactgcgtatattgagtacaagacgtgtaaggatggcagtgtgctgggtgtgacggtgacgaggactgcgctgctgacacactgccaggccctgacgcaggcgtgtggctacacggaagctgaaaccattgtgaatgtgctggatttcaagaaggacgtcgggctctggcatggcatcctgacaagcgtcatgaacatgatgcatgtgatcagcatcccgtactcgctgatgaaggtgaaccctctctcctggatccagaaggtctgccagtacaaagcaaaagtggcgtgtgtgaaatcgagggatatgcattgggcattagtagcacacagagatcagagagacatcaacctctcctctctgcgaatgctgatagtggcggacggcgcgaacccctggtctatttcttcttgcgatgcatttctcaatgtcttccaaagtaaaggccttcgacaggaggtcatctgtccttgtgccagctcgccagaggccctcactgtggccatccggaggcccacggatgacagtaaccagcccccgggccggggtgtcctctccatgcatggactgacctatggggtcattcgtgtggactcggaagagaagctgtccgtgctcaccgtgcaggatgtcggcctcgtgatgcctggagccatcatgtgttcagtgaagccagacggggttcctcagctgtgcagaacggatgagatcggggagctgtgtgtgtgtgcagttgcgacgggcacgtcctactatggcctctctggcatgaccaagaacacctttgaggtgtttcccatgacaagctccggggctccgatcagtgaatacccattcataaggacaggcttgctggggttcgtgggtcccggaggcctcgtcttcgtggtgggcaagatggatggcctcatggtggtcagcgggcgcaggcacaacgccgacgacatcgtggccactgcgctggccgtagaacccatgaagtttgtctaccggggaaggatagccgtgttctcggtgaccgtgctgcacgacgagaggatcgtgatcgtggctgagcagaggcctgactccacggaagaggacagtttccagtggatgagccgtgtgctgcaggcgattgacagtatacatcaagttggagtttattgcctggccttggtgccagcaaacaccctccccaaaaccccgcttggtgggatccatttatcagaaacaaaacagctttttctggagggctctctgcacccctgcaatgtcctaatgtgcccccacacctgcgtcacaaacttgcctaagcctcgacagaagcagccagaaatcggccctgcctctgtgatggtggggaacctggtctctgggaagagaatcgcccaggccagtggcagagacctgggtcagatcgaagataacgaccaggcacgcaagttcctgttcctctcagaggtcttgcagtggagagcacagaccaccccggaccacatcctctacacgctgctcaactgtcggggtgcgatagcgaactcgctgacctgcgtgcagctgcacaagagagctgagaagatcgccgtgatgctgatggagaggggccaccttcaggacggcgaccacgtggccttggtctaccccccaggaatagacctgatagcagcgttttatggttgcctgtacgcaggctgtgtgccaataaccgtccgtcccccgcacccacagaacatcgcgacgacgttgcctaccgtcaagatgattgtggaggtgagtcgctctgcctgtctgatgacgacacagctgatctgtaagttgctgcggtccagggaggcggcggcggctgtggacgtcaggacgtggcccctcatcctggacacagatgatttgccaaagaagcggcctgcccagatctgcaaaccttgcaacccagacactcttgcatatctcgacttcagcgtgtccacaactgggatgctagctggcgtaaagatgtctcacgcagccaccagtgccttctgccgttccattaagctgcagtgtgaactttacccctctagagaagtggccatctgcctggacccttactgtggactgggatttgtcctctggtgcctctgcagtgtgtattctgggcaccagtccatcctgatcccgccctctgagctggaaaccaaccccgccttgtggcttcttgccgtgagtcagtacaaagtccgagacacgttttgctcctactccgtgatggagctgtgcaccaaggggctgggctcgcaaacagagtccctcaaggcgcgagggctggacttgtcccgagtgaggacctgcgtggttgtggcggaagagaggcctcggatcgcactcacacagtcgttctcaaagctgtttaaggacctgggccttcacccgcgggccgtcagcacctcgttcggttgcagggtgaacctggcgatttgcttgcagggaacctcaggacctgacccaaccactgtctacgtggacatgagagccctgagacacgacagagtccgcttagtggaaagaggatcccctcatagtctgcccctgatggaatcgggaaagatacttccaggggttcggattataattgccaacccagaaacaaaaggaccgctgggggactcacaccttggagagatttgggttcacagtgcccacaatgccagcggttatttcactatttacggagacgaatccctccagtcagatcacttcaactcaagactaagttttggagacacccagaccatctgggcacgcacaggctacttggggttcctgcggagaactgagctcacagatgcaaatggagagcgccatgatgccctctacgtggtaggggcactggacgaagccatggagctgcggggcatgcggtaccacccaatcgacattgagacctcggtcatcagagcccataaaagcgttacggaatgtgctgtgtttacctggacaaatttgttggtggttgtggttgagctggatgggtcggaacaagaagccttggacctggttcccttggtgaccaacgtggtcctggaggagcactacctgatcgtcggagtggtggtcgtggtggacatcggcgtcatccccatcaactcccgtggggagaagcagcgcatgcacctgcgagacgggtttttggcagaccagctagaccccatctatgtggcctacaacatgtagtctcgtctcttggcttccatggacttttctagagatgtagacattgttctccgtgtccactgaagcgtgcagacacagggcaacactcaccagaatacagccatttgtggtgagagtggaggaggaagaggaggaggaagaggacttctcacagcagccacgattggcatgggggtgaaatgtgaatttaccactgaatttcgctcagaaggactttggattactgccttcagtttgttggaaaagcccatttcaaaactttcttttcttttctttcttttttaattattggataataagtgctttcttcgtaaatgtggtattttgttaagccgaaatagcaattaaaaaaatatcctgccctccagatgggttcttttaaac

SEQ ID NO: 8077 - protein, 1556 aa, Homo sapiens; identical to SEQ ID NO: 1138

SEQ ID NO: 8078 - DNA, 3606 bp, Homo sapiens
tgcgctgggagcccagagcaggaggcagagcccgcgggaagctcggagcactcaggacgccgcgcgcccttccccgccctccctgaccagggagcagctcgctccaggcgcccagccgaggcccccagcccagtgggagcaagtcatagagaacaattcgagagacagagagacggagcgcgctttcctgctcagtcctgaaaagtgagccgctcccgggtttgcaacctcaagcttcgcagcagcggcggcggcggctgccgggaaggaggcaggtgcaggtgcaggagggaggcggctctgggctccgcgcctgggtctcggccatggcctcggtcctggggagcggcagagggtctggagggctgagcagtcaactcaaatgcaagtccaagaggaggaggaggcggaggtccaagcggaaagataaagtaagcatattgtcaaccttcctcgctcctttcaagcacctgagtcctggcatcacaaacacggaggatgacgacaccctcagtaccagcagcgcggaggtgaaggagaaccgcaacgtgggcaacctggccgcgcggccaccgccctccggggaccgggcccggggcggcgcgcccggcgcgaagaggaagcggccgctggaggaggggaatgggggccacttgtgcaaactgcagctggtctggaagaagctgtcgtggtcggtggcgcccaagaacgcgctggtgcagctgcacgagctgaggccgggcctgcagtaccggacagtgtcgcagacgggcccggtgcatgccccggtcttcgcggtagcggtggaggtgaacgggctcacgttcgagggcacaggccccaccaagaagaaggccaagatgcgcgcggcggagctggcactcaggtccttcgtgcagttccccaacgcctgccaggcgcacctggccatgggcgggggcccgggccccggcacggacttcacctccgaccaggccgatttccccgacacgctcttccaggagttcgagcccccggcgccgcgccccggactcgcgggaggccgccccggggacgccgcgcttctgtccgcggcctacgggcgacggcggctgctgtgccgcgcgctggacctggtgggcccgacccccgccacccccgcggccccgggcgagcgcaaccccgtggtgctgctgaaccgcctgcgcgccgggctgcgctacgtgtgtctggcagaaccggccgagcggcgcgcgcggagcttcgtgatggccgtgagcgtggacggcaggacgttcgagggctcggggcgcagcaagaagctggcccggggtcaggccgcgcaggccgcactgcaggagctgttcgacatccagatgcccggccacgcgcccggcagggccaggaggacgccaatgccgcaggaattcgcagactccatatcccagctggtcacacagaagttccgcgaggtgacgacggacctcacgcccatgcacgcccgccataaagcgctggcaggaatcgtcatgaccaaaggcctggatgctcggcaggcgcaggtcgtggccctgtcctcggggaccaagtgcatcagcggcgagcacctcagtgaccaggggctggtggtgaatgactgccacgcggaggtcgtggcccggcgggcgttcctgcacttcctctacacgcagctggagctgcacctgagcaagcggcgcgaggactcagagcgatcgatattcgtgcggttaaaagaaggtggctaccggctgcgagagaacatcctcttccatctctacgtgagcacctccccctgtggagacgcaagactccactctccctacgagatcaccacagacctgcacagcagcaaacacctcgtcaggaagttccgcgggcacctgcgcaccaagatcgagtccggggaagggacggtccccgtgcgtggccccagcgcagtgcagacctgggacggcgtcctgctgggggagcagctgatcaccatgtcctgcacggacaagatcgccaggtggaacgtcctggggctgcagggcgcgctcctgtcccacttcgtggagcccgtgtacctgcagagcatcgtggtgggcagcctgcaccacacgggccacctcgcacgcgtcatgagccaccgcatggagggtgtcggccagctgcccgcctcctaccggcacaaccggcctctcctcagcggcgtgagtgacgccgaggcgcgccagccggggaagtcgccccccttcagcatgaactgggtcgtgggcagcgcggacctggagattatcaacgccaccactgggcggaggagctgtgggggcccatcccggctctgcaagcacgtgctgtctgcacggtgggcgcggctgtatggcaggctgagcacacggacacccagccctggagacacgccctccatgtactgtgaggccaagctgggggcgcacacctaccagtctgtgaaacagcagctgttcaaggcctttcagaaggctggcctgggcacctgggtgaggaaaccaccggagcagcagcagtttctactgactctctaggctgcgggctcctggctgctggagctgagcgggacgctggagggatgggaccgtgtctggggggcgacgtggcgggtcggccggttccctgcattcgttttactttggtgtcccagaaacacgcgagtgtgcaatgtttggacgagcaacaacacaaattcagaacgtgcctctttccagatcgctggccccagaaccctgtcccccacacccaggggcacatgcactgttgagttagcgccgactcttcctgtggagtctgagggaggggctccattcaggcaaaggggttttagctgcagccttggaaggaggcaccgacacgacaccaggcaggagtgagcctcaggccccgtccctgcaccccacccctgcgtgcgcctcttggtgatgctggggtctcactagcttgagggggcacatgaagataagccacaaatgaagagaaaagccatgcccaccccagccccagagaaaccaataagaatcctctattattttcactattcatttaggtttttatactccacctcctttcaaaaaagatttaagatgtacgacattaccgaacacctaaaatagaaccagagaaacgaaagccattcccacaaagtgaaggaacagtttccaaaacccctgcgaggcagagttaagacctgtgacgtggggagcctggaaacacccggcccacgcgtgctgcagatgtggggagcctggaaacacccggcccacgcgtgctgcagatgtggggagcctggaaacacccggcccacgcgtgctgcagatgtggggagtctggaaacacccggcccacgcgtgctgcagatgtggggagcccggaaacacctggcccatgcctgttcagtccgtcatggcgtttggtttatggtggccgatactaagagccactgaggtctgggttgtgtaagggttagctaccaccctataacctccctaccaggtaataaggagaccaagtctttgatcaaattctgattttttaactaaattttcattagaaagcaagcacaaaataaaatcaaaacaacctttaccttca

SEQ ID NO: 8079 - protein, 739 aa, Homo sapiens; identical to SEQ ID NO: 1140

SEQ ID NO: 8080 - DNA, 3433 bp, Homo sapiens
gaggaggaggggacccgccgccgggggctggctgcttcgctccgagccgacttttcgccaatggtccaaagggacatgtccaagtcgcctcccacagcggcggcggcggtggcgcaggagatccagatggaactgctagagaacgtggctcccgcgggggcgctcggagccgccgcacagtcatatggaaaaggagccagaaggaaaaacagatttaaaggatctgatggaagcacgtcatctgatactacctcaaatagttttgttcgccagggttcggcagactcctacactagccgtccatccgattccgatgtatctctggaggaggaccgggaggcagtgcgcagagaagcggagcggcaggcccaggcacagttggaaaaagcaaagacaaagcccgttgcatttgcggttcggacaaatgtcagctacagtgcggcccatgaagatgatgttccagtgcctggcatggccatctcattcgaagcaaaagattttctgcatgttaaggaaaaatttaacaatgactggtggatagggcgattggtaaaagaaggctgtgaaatcggattcattccaagcccagtcaaactagaaaacatgaggctgcagcatgaacagagagccaagcaagggaaattctactccagtaaatcaggaggaaattcatcatccagtttgggtgacatagtacctagttccagaaaatcaacacctccatcatctgctatagacatagatgctactggcttagatgcagaagaaaatgatattccagcaaaccaccgctcccctaaacccagtgcaaacagtgtaacgtcaccccactccaaagagaaaagaatgcccttctttaagaagacagagcacactcctccgtatgatgtggtaccttccatgcgaccagtggtcctagtgggcccttctctgaagggctacgaggtcacagatatgatgcaaaaagcgctgtttgattttttaaaacacagatttgaagggcggatatccatcacaagggtcaccgctgacatctcgcttgccaaacgctcggtattaaacaatcccagtaagcacgcaataatagaaagatccaacacaaggtcaagcttagcggaagttcagagtgaaatcgaaaggatttttgaacttgcaagaacattgcagttggtggtccttgacgcggatacaattaatcatccagctcaactcagtaaaacctccttggcccctattatagtatatgtaaagatttcttctcctaaggttttacaaaggttaataaaatctcgagggaaatctcaagctaaacacctcaacgtccagatggtagcagctgataaactggctcagtgtcctccagagctgttcgatgtgatcttggatgagaaccagcttgaggatgcctgtgagcaccttgccgactatctggaggcctactggaaggccacccatcctcccagcagtagcctccccaaccctctccttagccgtacattagccacttcaagtctgcctcttagccccaccctagcctctaattcacagggttctcaaggtgatcagaggactgatcgctccgctcctatccgttctgcttcccaagctgaagaagaacctagtgtggaaccagtcaagaaatcccagcaccgctcttcctcctcagccccacaccacaaccatcgcagtgggacaagtcgcggcctctccaggcaagagacatttgactcggaaacccaggagagtcgagactctgcctacgtagagccaaaggaagattattcccatgaccacgtggaccactatgcctcacaccgtgaccacaaccacagagacgagacccacgggagcagtgaccacagacacagggagtcccggcaccgttcccgggacgtggatcgagagcaggaccacaacgagtgcaacaagcagcgcagccgtcataaatccaaggatcgctactgtgaaaaggatggagaagtgatatcaaaaaaacggaatgaggctggggagtggaacagggatgtttacatccgccaatgagttttgcccgtttgtgtttttttttttttttttttgaagtcttgtataactaacagcatccccaaaacaaagtctttggggtctacactgcaatcatatgtgatctgtcttgtaatattttgtattattgctgttgcttgaatagcaatagcatggatagagtattgagatactttttcttttgtaagtgctacataaattggcctggtatggctgcagtcctccggttgcatactggactcttcaaaaactgttttgggtagctgccacttgaacaaaatctgttgccacccaggtgatgttagtgttttaagaaatgtagttgatgtatccaacaagccagaatcagcacagataaaaagtggaatttcttgtttctccagatttttaatacgttaatacgcaggcatctgatttgcatattcattcatggaccactgtttcttgcttgtacctctggctgactaaatttggggacagattcagtcttgccttacacaaaggggatcataaagttagaatctattttctatgtactagtactgtgtactgtatagacagtttgtaaatgttatttctgcaaacaaacaccttcttattatatatataatatatatatatatcagtttgatcacactattttagagtcttaatgccaagtcagcagatttgctttatgaattacagggactagaaatgcccacattcaggaaatttgtaataacattgtctagacacctatcctcattctagtagaaagtgtgtacatactgtaaatatgtgtgattgcttgacttgaaaaggtttgaattctgaatgttataccatccttgtaagtaagtttgtaatttccaccataaattatggtaaatataaaactccagaggttgttctactccatacagttcacactgattgtgacacattcttagtagctagtgtctgttctagtcactgcactggagtctacgagccggaactcgctatatgcacgtgtgtgtgtccgtatgtaagaaagtgtgcaccgagtgactgaatggttgagatgaattggaatgctgaagactaacgaagaaactagagactgatatcgagcattctgcccacctcgctctgtatttaattaattgtgctatatgttgctttaacaacccattgagcagtcagggaatgtgagtaagcttgctgccaaaggtaactaggaaagcattcatctgctgcctccttgtttttgctcctagagagtgaaaatacaggcaattttactgtgagtgtttcactggaaatgtacaatctttgtgtgttagagtatttgttttagtaagaaatgtttacacagcttgtggaattatttcgtgggaaaataaatttttataacttctcccacttc

SEQ ID NO: 8081 - protein, 660 aa, Homo sapiens
MVQRDMSKSPPTAAAAVAQEIQMELLENVAPAGALGAAAQSYGKGARRKNRFKGSDGSTSSDTTSNSFVRQGSADSYTSRPSDSDVSLEEDREAVRREAERQAQAQLEKAKTKPVAFAVRTNVSYSAAHEDDVPVPGMAISFEAKDFLHVKEKFNNDWWIGRLVKEGCEIGFIPSPVKLENMRLQHEQRAKQGKFYSSKSGGNSSSSLGDIVPSSRKSTPPSSAIDIDATGLDAEENDIPANHRSPKPSANSVTSPHSKEKRMPFFKKTEHTPPYDVVPSMRPVVLVGPSLKGYEVTDMMQKALFDFLKHRFEGRISITRVTADISLAKRSVLNNPSKHAIIERSNTRSSLAEVQSEIERIFELARTLQLVVLDADTINHPAQLSKTSLAPIIVYVKISSPKVLQRLIKSRGKSQAKHLNVQMVAADKLAQCPPELFDVILDENQLEDACEHLADYLEAYWKATHPPSSSLPNPLLSRTLATSSLPLSPTLASNSQGSQGDQRTDRSAPIRSASQAEEEPSVEPVKKSQHRSSSSAPHHNHRSGTSRGLSRQETFDSETQESRDSAYVEPKEDYSHDHVDHYASHRDHNHRDETHGSSDHRHRESRHRSRDVDREQDHNECNKQRSRHKSKDRYCEKDGEVISKKRNEAGEWNRDVYIRQ

SEQ ID NO: 8082 - DNA, 3361 bp, Homo sapiens
gaggaggaggggacccgccgccgggggctggctgcttcgctccgagccgacttttcgccaatggtccaaagggacatgtccaagtcgcctcccacagcggcggcggcggtggcgcaggagatccagatggaactgctagagaacgtggctcccgcgggggcgctcggagccgccgcacagtcatatggaaaaggagccagaaggaaaaacagatttaaaggatctgatggaagcacgtcatctgatactacctcaaatagttttgttcgccagggttcggcagactcctacactagccgtccatccgattccgatgtatctctggaggaggaccgggaggcagtgcgcagagaagcggagcggcaggcccaggcacagttggaaaaagcaaagacaaagcccgttgcatttgcggttcggacaaatgtcagctacagtgcggcccatgaagatgatgttccagtgcctggcatggccatctcattcgaagcaaaagattttctgcatgttaaggaaaaatttaacaatgactggtggatagggcgattggtaaaagaaggctgtgaaatcggattcattccaagcccagtcaaactagaaaacatgaggctgcagcatgaacagagagccaagcaagggaaattctactccagtaaatcaggaggaaattcatcatccagtttgggtgacatagtacctagttccagaaaatcaacacctccatcatctggtgcaaaatctgcagatgaacaagaccagtggaaaactgcaggcttgttttggcggtttactacagagcacactcctccgtatgatgtggtaccttccatgcgaccagtggtcctagtgggcccttctctgaagggctacgaggtcacagatatgatgcaaaaagcgctgtttgattttttaaaacacagatttgaagggcggatatccatcacaagggtcaccgctgacatctcgcttgccaaacgctcggtattaaacaatcccagtaagcacgcaataatagaaagatccaacacaaggtcaagcttagcggaagttcagagtgaaatcgaaaggatttttgaacttgcaagaacattgcagttggtggtccttgacgcggatacaattaatcatccagctcaactcagtaaaacctccttggcccctattatagtatatgtaaagatttcttctcctaaggttttacaaaggttaataaaatctcgagggaaatctcaagctaaacacctcaacgtccagatggtagcagctgataaactggctcagtgtcctccagagctgttcgatgtgatcttggatgagaaccagcttgaggatgcctgtgagcaccttgccgactatctggaggcctactggaaggccacccatcctcccagcagtagcctccccaaccctctccttagccgtacattagccacttcaagtctgcctcttagccccaccctagcctctaattcacagggttctcaaggtgatcagaggactgatcgctccgctcctatccgttctgcttcccaagctgaagaagaacctagtgtggaaccagtcaagaaatcccagcaccgctcttcctcctcagccccacaccacaaccatcgcagtgggacaagtcgcggcctctccaggcaagagacatttgactcggaaacccaggagagtcgagactctgcctacgtagagccaaaggaagattattcccatgaccacgtggaccactatgcctcacaccgtgaccacaaccacagagacgagacccacgggagcagtgaccacagacacagggagtcccggcaccgttcccgggacgtggatcgagagcaggaccacaacgagtgcaacaagcagcgcagccgtcataaatccaaggatcgctactgtgaaaaggatggagaagtgatatcaaaaaaacggaatgaggctggggagtggaacagggatgtttacatccgccaatgagttttgcccgtttgtgtttttttttttttttttttgaagtcttgtataactaacagcatccccaaaacaaagtctttggggtctacactgcaatcatatgtgatctgtcttgtaatattttgtattattgctgttgcttgaatagcaatagcatggatagagtattgagatactttttcttttgtaagtgctacataaattggcctggtatggctgcagtcctccggttgcatactggactcttcaaaaactgttttgggtagctgccacttgaacaaaatctgttgccacccaggtgatgttagtgttttaagaaatgtagttgatgtatccaacaagccagaatcagcacagataaaaagtggaatttcttgtttctccagatttttaatacgttaatacgcaggcatctgatttgcatattcattcatggaccactgtttcttgcttgtacctctggctgactaaatttggggacagattcagtcttgccttacacaaaggggatcataaagttagaatctattttctatgtactagtactgtgtactgtatagacagtttgtaaatgttatttctgcaaacaaacaccttcttattatatatataatatatatatatatcagtttgatcacactattttagagtcttaatgccaagtcagcagatttgctttatgaattacagggactagaaatgcccacattcaggaaatttgtaataacattgtctagacacctatcctcattctagtagaaagtgtgtacatactgtaaatatgtgtgattgcttgacttgaaaaggtttgaattctgaatgttataccatccttgtaagtaagtttgtaatttccaccataaattatggtaaatataaaactccagaggttgttctactccatacagttcacactgattgtgacacattcttagtagctagtgtctgttctagtcactgcactggagtctacgagccggaactcgctatatgcacgtgtgtgtgtccgtatgtaagaaagtgtgcaccgagtgactgaatggttgagatgaattggaatgctgaagactaacgaagaaactagagactgatatcgagcattctgcccacctcgctctgtatttaattaattgtgctatatgttgctttaacaacccattgagcagtcagggaatgtgagtaagcttgctgccaaaggtaactaggaaagcattcatctgctgcctccttgtttttgctcctagagagtgaaaatacaggcaattttactgtgagtgtttcactggaaatgtacaatctttgtgtgttagagtatttgttttagtaagaaatgtttacacagcttgtggaattatttcgtgggaaaataaatttttataacttctcccacttc

SEQ ID NO: 8083 - protein, 636 aa, Homo sapiens; identical to SEQ ID NO: 1156

SEQ ID NO: 8084 - DNA, 3317 bp, Homo sapiens
gaggaggaggggacccgccgccgggggctggctgcttcgctccgagccgacttttcgccaatggtccaaagggacatgtccaagtcgcctcccacagcggcggcggcggtggcgcaggagatccagatggaactgctagagaacgtggctcccgcgggggcgctcggagccgccgcacagtcatatggaaaaggagccagaaggaaaaacagatttaaaggatctgatggaagcacgtcatctgatactacctcaaatagttttgttcgccagggttcggcagactcctacactagccgtccatccgattccgatgtatctctggaggaggaccgggaggcagtgcgcagagaagcggagcggcaggcccaggcacagttggaaaaagcaaagacaaagcccgttgcatttgcggttcggacaaatgtcagctacagtgcggcccatgaagatgatgttccagtgcctggcatggccatctcattcgaagcaaaagattttctgcatgttaaggaaaaatttaacaatgactggtggatagggcgattggtaaaagaaggctgtgaaatcggattcattccaagcccagtcaaactagaaaacatgaggctgcagcatgaacagagagccaagcaagggaaattctactccagtaaatcaggaggaaattcatcatccagtttgggtgacatagtacctagttccagaaaatcaacacctccatcatctggtaagtaggtgataaatgctgaagcacactcctccgtatgatgtggtaccttccatgcgaccagtggtcctagtgggcccttctctgaagggctacgaggtcacagatatgatgcaaaaagcgctgtttgattttttaaaacacagatttgaagggcggatatccatcacaagggtcaccgctgacatctcgcttgccaaacgctcggtattaaacaatcccagtaagcacgcaataatagaaagatccaacacaaggtcaagcttagcggaagttcagagtgaaatcgaaaggatttttgaacttgcaagaacattgcagttggtggtccttgacgcggatacaattaatcatccagctcaactcagtaaaacctccttggcccctattatagtatatgtaaagatttcttctcctaaggttttacaaaggttaataaaatctcgagggaaatctcaagctaaacacctcaacgtccagatggtagcagctgataaactggctcagtgtcctccagagctgttcgatgtgatcttggatgagaaccagcttgaggatgcctgtgagcaccttgccgactatctggaggcctactggaaggccacccatcctcccagcagtagcctccccaaccctctccttagccgtacattagccacttcaagtctgcctcttagccccaccctagcctctaattcacagggttctcaaggtgatcagaggactgatcgctccgctcctatccgttctgcttcccaagctgaagaagaacctagtgtggaaccagtcaagaaatcccagcaccgctcttcctcctcagccccacaccacaaccatcgcagtgggacaagtcgcggcctctccaggcaagagacatttgactcggaaacccaggagagtcgagactctgcctacgtagagccaaaggaagattattcccatgaccacgtggaccactatgcctcacaccgtgaccacaaccacagagacgagacccacgggagcagtgaccacagacacagggagtcccggcaccgttcccgggacgtggatcgagagcaggaccacaacgagtgcaacaagcagcgcagccgtcataaatccaaggatcgctactgtgaaaaggatggagaagtgatatcaaaaaaacggaatgaggctggggagtggaacagggatgtttacatccgccaatgagttttgcccgtttgtgtttttttttttttttttttgaagtcttgtataactaacagcatccccaaaacaaagtctttggggtctacactgcaatcatatgtgatctgtcttgtaatattttgtattattgctgttgcttgaatagcaatagcatggatagagtattgagatactttttcttttgtaagtgctacataaattggcctggtatggctgcagtcctccggttgcatactggactcttcaaaaactgttttgggtagctgccacttgaacaaaatctgttgccacccaggtgatgttagtgttttaagaaatgtagttgatgtatccaacaagccagaatcagcacagataaaaagtggaatttcttgtttctccagatttttaatacgttaatacgcaggcatctgatttgcatattcattcatggaccactgtttcttgcttgtacctctggctgactaaatttggggacagattcagtcttgccttacacaaaggggatcataaagttagaatctattttctatgtactagtactgtgtactgtatagacagtttgtaaatgttatttctgcaaacaaacaccttcttattatatatataatatatatatatatcagtttgatcacactattttagagtcttaatgccaagtcagcagatttgctttatgaattacagggactagaaatgcccacattcaggaaatttgtaataacattgtctagacacctatcctcattctagtagaaagtgtgtacatactgtaaatatgtgtgattgcttgacttgaaaaggtttgaattctgaatgttataccatccttgtaagtaagtttgtaatttccaccataaattatggtaaatataaaactccagaggttgttctactccatacagttcacactgattgtgacacattcttagtagctagtgtctgttctagtcactgcactggagtctacgagccggaactcgctatatgcacgtgtgtgtgtccgtatgtaagaaagtgtgcaccgagtgactgaatggttgagatgaattggaatgctgaagactaacgaagaaactagagactgatatcgagcattctgcccacctcgctctgtatttaattaattgtgctatatgttgctttaacaacccattgagcagtcagggaatgtgagtaagcttgctgccaaaggtaactaggaaagcattcatctgctgcctccttgtttttgctcctagagagtgaaaatacaggcaattttactgtgagtgtttcactggaaatgtacaatctttgtgtgttagagtatttgttttagtaagaaatgtttacacagcttgtggaattatttcgtgggaaaataaatttttataacttctcccacttc

SEQ ID NO: 8085 - protein, 393 aa, Homo sapiens
MLKHTPPYDVVPSMRPVVLVGPSLKGYEVTDMMQKALFDFLKHRFEGRISITRVTADISLAKRSVLNNPSKHAIIERSNTRSSLAEVQSEIERIFELARTLQLVVLDADTINHPAQLSKTSLAPIIVYVKISSPKVLQRLIKSRGKSQAKHLNVQMVAADKLAQCPPELFDVILDENQLEDACEHLADYLEAYWKATHPPSSSLPNPLLSRTLATSSLPLSPTLASNSQGSQGDQRTDRSAPIRSASQAEEEPSVEPVKKSQHRSSSSAPHHNHRSGTSRGLSRQETFDSETQESRDSAYVEPKEDYSHDHVDHYASHRDHNHRDETHGSSDHRHRESRHRSRDVDREQDHNECNKQRSRHKSKDRYCEKDGEVISKKRNEAGEWNRDVYIRQ

SEQ ID NO: 8086 - DNA, 4019 bp, Homo sapiens
aatggtccaaagggacatgtccaagtcgcctcccacagcggcggcggcggtggcgcaggagatccagatggaactgctagagaacgtggctcccgcgggggcgctcggagccgccgcacagtcatatggaaaaggagccagaaggaaaaacagatttaaaggatctgatggaagcacgtcatctgatactacctcaaatagttttgttcgccagggttcggcagactcctacactagccgtccatccgattccgatgtatctctggaggaggaccgggaggcagtgcgcagagaagcggagcggcaggcccaggcacagttggaaaaagcaaagacaaagcccgttgcatttgcggttcggacaaatgtcagctacagtgcggcccatgaagatgatgttccagtgcctggcatggccatctcattcgaagcaaaagattttctgcatgttaaggaaaaatttaacaatgactggtggatagggcgattggtaaaagaaggctgtgaaatcggattcattccaagcccagtcaaactagaaaacatgaggctgcagcatgaacagagagccaagcaagggaaattctactccagtaaatcaggaggaaattcatcatccagtttgggtgacatagtacctagttccagaaaatcaacacctccatcatctgctatagacatagatgctactggcttagatgcagaagaaaatgatattccagcaaaccaccgctcccctaaacccagtgcaaacagtgtaacgtcaccccactccaaagagaaaagaatgcccttctttaagaagacagagcacactcctccgtatgatgtggtaccttccatgcgaccagtggtcctagtgggcccttctctgaagggctacgaggtcacagatatgatgcaaaaagcgctgtttgattttttaaaacacagatttgaagggcggatatccatcacaagggtcaccgctgacatctcgcttgccaaacgctcggtattaaacaatcccagtaagcacgcaataatagaaagatccaacacaaggtcaagcttagcggaagttcagagtgaaatcgaaaggatttttgaacttgcaagaacattgcagttggtggtccttgacgcggatacaattaatcatccagctcaactcagtaaaacctccttggcccctattatagtatatgtaaagatttcttctcctaaggttttacaaaggttaataaaatctcgagggaaatctcaagctaaacacctcaacgtccagatggtagcagctgataaactggctcagtgtcctccagagctgttcgatgtgatcttggatgagaaccagcttgaggatgcctgtgagcaccttgccgactatctggaggcctactggaaggccacccatcctcccagcagtagcctccccaaccctctccttagccgtacattagccacttcaagtctgcctcttagccccaccctagcctctaattcacagggttctcaaggtgatcagaggactgatcgctccgctcctatccgttctgcttcccaagctgaagaagaacctagtgtggaaccagtcaagaaatcccagcaccgctcttcctcctcagccccacaccacaaccatcgcagtgggacaagtcgcggcctctccaggcaagagacatttgactcggaaacccaggagagtcgagactctgcctacgtagagccaaaggaagattattcccatgaccacgtggaccactatgcctcacaccgtgaccacaaccacagagacgagacccacgggagcagtgaccacagacacagggagtcccggcaccgttcccgggacgtggatcgagagcaggaccacaacgagtgcaacaagcagcgcagccgtcataaatccaaggatcgctactgtgaaaaggatggagaagtgatatcaaaaaaacggaatgaggctggggagtggaacagggatgtttacatccgccaatgagttttgcccgtttgtgtttttttttttttttttttgaagtcttgtataactaacagcatccccaaaacaaagtctttggggtctacactgcaatcatatgtgatctgtcttgtaatattttgtattattgctgttgcttgaatagcaatagcatggatagagtattgagatactttttcttttgtaagtgctacataaattggcctggtatggctgcagtcctccggttgcatactggactcttcaaaaactgttttgggtagctgccacttgaacaaaatctgttgccacccaggtgatgttagtgttttaagaaatgtagttgatgtatccaacaagccagaatcagcacagataaaaagtggaatttcttgtttctccagatttttaatacgttaatacgcaggcatctgatttgcatattcattcatggaccactgtttcttgcttgtacctctggctgactaaatttggggacagattcagtcttgccttacacaaaggggatcataaagttagaatctattttctatgtactagtactgtgtactgtatagacagtttgtaaatgttatttctgcaaacaaacaccttcttattatatatataatatatatatatatcagtttgatcacactattttagagtcttaatgccaagtcagcagatttgctttatgaattacagggactagaaatgcccacattcaggaaatttgtaataacattgtctagacacctatcctcattctagtagaaagtgtgtacatactgtaaatatgtgtgattgcttgacttgaaaaggtttgaattctgaatgttataccatccttgtaagtaagtttgtaatttccaccataaattatggtaaatataaaactccagaggttgttctactccatacagttcacactgattgtgacacattcttagtagctagtgtctgttctagtcactgcactggagtctacgagccggaactcgctatatgcacgtgtgtgtgtccgtatgtaagaaagtgtgcaccgagtgactgaatggttgagatgaattggaatgctgaagactaacgaagaaactagagactgatatcgagcattctgcccacctcgctctgtatttaattaattgtgctatatgttgctttaacaacccattgagcagtcagggaatgtgagtaagcttgctgccaaaggtaactaggaaagcattcatctgctgcctccttgtttttgctcctagagagtgaaaatacaggcaattttactgtgagtgtttcactggaaatgtacaatctttgtgtgttagagtatttgttttagtaagaaatgtttacacagcttgtggaattatttcgtgggaaaataaatttttataacttctcccacttcaatttctaaccttgcctattgttcctgttgtttgtttacctcccagttacctaccattcctccccaccaccgactccagcaggttcactgtctgtcagaacccagaagtgcttcttataaccaaagtttctgttcttcagaagaaatcagggcaaaatggggtgacttgaagtgaataaaatgttaagaatattatcctacataagacatgtacacagaaggggaaccttgaagacattatctccatgcctcaattacactgctgtaagaagcttacaatgtcatcatgtttaaggctaagaccttttccgtgtctcaagtgtatattttgtccagttataactggatggtaagacagtattaagagtgcaagtacctggcacttgaagtttgtcccaggaaaatgcctgtgtataattacctaacttcagatctgcacattaacttatttaacaaaataaatcagccgggcgcagtggctcatgcctgtaatcccagcaatttgggaggctgaggagggtggatcacctgaggtcaggagttcaagaccagcctggccaacgtggcgaaaccccgtctctactaaaaagataaaaaattagccaggtgtggtggtgcacacctgtaatcccagctacttgggag

SEQ ID NO: 8087 - protein, 660 aa, Homo sapiens; identical to SEQ ID NO: 8081

SEQ ID NO: 8088 - DNA, 3946 bp, Homo sapiens
atggtccaaagggacatgtccaagtcgcctcccacagcggcggcggcggtggcgcaggagatccagatggaactgctagagaacgtggctcccgcgggggcgctcggagccgccgcacagtcatatggaaaaggagccagaaggaaaaacagatttaaaggatctgatggaagcacgtcatctgatactacctcaaatagttttgttcgccagggttcggcagactcctacactagccgtccatccgattccgatgtatctctggaggaggaccgggaggcagtgcgcagagaagcggagcggcaggcccaggcacagttggaaaaagcaaagacaaagcccgttgcatttgcggttcggacaaatgtcagctacagtgcggcccatgaagatgatgttccagtgcctggcatggccatctcattcgaagcaaaagattttctgcatgttaaggaaaaatttaacaatgactggtggatagggcgattggtaaaagaaggctgtgaaatcggattcattccaagcccagtcaaactagaaaacatgaggctgcagcatgaacagagagccaagcaagggaaattctactccagtaaatcaggaggaaattcatcatccagtttgggtgacatagtacctagttccagaaaatcaacacctccatcatctggtgcaaaatctgcagatgaacaagaccagtggaaaactgcaggcttgttttggcggtttactacagagcacactcctccgtatgatgtggtaccttccatgcgaccagtggtcctagtgggcccttctctgaagggctacgaggtcacagatatgatgcaaaaagcgctgtttgattttttaaaacacagatttgaagggcggatatccatcacaagggtcaccgctgacatctcgcttgccaaacgctcggtattaaacaatcccagtaagcacgcaataatagaaagatccaacacaaggtcaagcttagcggaagttcagagtgaaatcgaaaggatttttgaacttgcaagaacattgcagttggtggtccttgacgcggatacaattaatcatccagctcaactcagtaaaacctccttggcccctattatagtatatgtaaagatttcttctcctaaggttttacaaaggttaataaaatctcgagggaaatctcaagctaaacacctcaacgtccagatggtagcagctgataaactggctcagtgtcctccagagctgttcgatgtgatcttggatgagaaccagcttgaggatgcctgtgagcaccttgccgactatctggaggcctactggaaggccacccatcctcccagcagtagcctccccaaccctctccttagccgtacattagccacttcaagtctgcctcttagccccaccctagcctctaattcacagggttctcaaggtgatcagaggactgatcgctccgctcctatccgttctgcttcccaagctgaagaagaacctagtgtggaaccagtcaagaaatcccagcaccgctcttcctcctcagccccacaccacaaccatcgcagtgggacaagtcgcggcctctccaggcaagagacatttgactcggaaacccaggagagtcgagactctgcctacgtagagccaaaggaagattattcccatgaccacgtggaccactatgcctcacaccgtgaccacaaccacagagacgagacccacgggagcagtgaccacagacacagggagtcccggcaccgttcccgggacgtggatcgagagcaggaccacaacgagtgcaacaagcagcgcagccgtcataaatccaaggatcgctactgtgaaaaggatggagaagtgatatcaaaaaaacggaatgaggctggggagtggaacagggatgtttacatccgccaatgagttttgcccgtttgtgtttttttttttttttttttgaagtcttgtataactaacagcatccccaaaacaaagtctttggggtctacactgcaatcatatgtgatctgtcttgtaatattttgtattattgctgttgcttgaatagcaatagcatggatagagtattgagatactttttcttttgtaagtgctacataaattggcctggtatggctgcagtcctccggttgcatactggactcttcaaaaactgttttgggtagctgccacttgaacaaaatctgttgccacccaggtgatgttagtgttttaagaaatgtagttgatgtatccaacaagccagaatcagcacagataaaaagtggaatttcttgtttctccagatttttaatacgttaatacgcaggcatctgatttgcatattcattcatggaccactgtttcttgcttgtacctctggctgactaaatttggggacagattcagtcttgccttacacaaaggggatcataaagttagaatctattttctatgtactagtactgtgtactgtatagacagtttgtaaatgttatttctgcaaacaaacaccttcttattatatatataatatatatatatatcagtttgatcacactattttagagtcttaatgccaagtcagcagatttgctttatgaattacagggactagaaatgcccacattcaggaaatttgtaataacattgtctagacacctatcctcattctagtagaaagtgtgtacatactgtaaatatgtgtgattgcttgacttgaaaaggtttgaattctgaatgttataccatccttgtaagtaagtttgtaatttccaccataaattatggtaaatataaaactccagaggttgttctactccatacagttcacactgattgtgacacattcttagtagctagtgtctgttctagtcactgcactggagtctacgagccggaactcgctatatgcacgtgtgtgtgtccgtatgtaagaaagtgtgcaccgagtgactgaatggttgagatgaattggaatgctgaagactaacgaagaaactagagactgatatcgagcattctgcccacctcgctctgtatttaattaattgtgctatatgttgctttaacaacccattgagcagtcagggaatgtgagtaagcttgctgccaaaggtaactaggaaagcattcatctgctgcctccttgtttttgctcctagagagtgaaaatacaggcaattttactgtgagtgtttcactggaaatgtacaatctttgtgtgttagagtatttgttttagtaagaaatgtttacacagcttgtggaattatttcgtgggaaaataaatttttataacttctcccacttcaatttctaaccttgcctattgttcctgttgtttgtttacctcccagttacctaccattcctccccaccaccgactccagcaggttcactgtctgtcagaacccagaagtgcttcttataaccaaagtttctgttcttcagaagaaatcagggcaaaatggggtgacttgaagtgaataaaatgttaagaatattatcctacataagacatgtacacagaaggggaaccttgaagacattatctccatgcctcaattacactgctgtaagaagcttacaatgtcatcatgtttaaggctaagaccttttccgtgtctcaagtgtatattttgtccagttataactggatggtaagacagtattaagagtgcaagtacctggcacttgaagtttgtcccaggaaaatgcctgtgtataattacctaacttcagatctgcacattaacttatttaacaaaataaatcagccgggcgcagtggctcatgcctgtaatcccagcaatttgggaggctgaggagggtggatcacctgaggtcaggagttcaagaccagcctggccaacgtggcgaaaccccgtctctactaaaaagataaaaaattagccaggtgtggtggtgcacacctgtaatcccagctacttgggag

SEQ ID NO: 8089 - protein, 636 aa, Homo sapiens; identical to SEQ ID NO: 1156

SEQ ID NO: 8090 - DNA, 3289 bp, Homo sapiens
atgaatcaggggagtggactggacctgctgaagatctcatatggaaaaggagccagaaggaaaaacagatttaaaggatctgatggaagcacgtcatctgatactacctcaaatagttttgttcgccagggttcggcagactcctacactagccgtccatccgattccgatgtatctctggaggaggaccgggaggcagtgcgcagagaagcggagcggcaggcccaggcacagttggaaaaagcaaagacaaagcccgttgcatttgcggttcggacaaatgtcagctacagtgcggcccatgaagatgatgttccagtgcctggcatggccatctcattcgaagcaaaagattttctgcatgttaaggaaaaatttaacaatgactggtggatagggcgattggtaaaagaaggctgtgaaatcggattcattccaagcccagtcaaactagaaaacatgaggctgcagcatgaacagagagccaagcaagggaaattctactccagtaaatcaggaggaaattcatcatccagtttgggtgacatagtacctagttccagaaaatcaacacctccatcatctgctatagacatagatgctactggcttagatgcagaagaaaatgatattccagcaaaccaccgctcccctaaacccagtgcaaacagtgtaacgtcaccccactccaaagagaaaagaatgcccttctttaagaagacagagcacactcctccgtatgatgtggtaccttccatgcgaccagtggtcctagtgggcccttctctgaagggctacgaggtcacagatatgatgcaaaaagcgctgtttgattttttaaaacacagatttgaagggcggatatccatcacaagggtcaccgctgacatctcgcttgccaaacgctcggtattaaacaatcccagtaagcacgcaataatagaaagatccaacacaaggtcaagcttagcggaagttcagagtgaaatcgaaaggatttttgaacttgcaagaacattgcagttggtggtccttgacgcggatacaattaatcatccagctcaactcagtaaaacctccttggcccctattatagtatatgtaaagatttcttctcctaaggttttacaaaggttaataaaatctcgagggaaatctcaagctaaacacctcaacgtccagatggtagcagctgataaactggctcagtgtcctccagagctgttcgatgtgatcttggatgagaaccagcttgaggatgcctgtgagcaccttgccgactatctggaggcctactggaaggccacccatcctcccagcagtagcctccccaaccctctccttagccgtacattagccacttcaagtctgcctcttagccccaccctagcctctaattcacagggttctcaaggtgatcagaggactgatcgctccgctcctatccgttctgcttcccaagctgaagaagaacctagtgtggaaccagtcaagaaatcccagcaccgctcttcctcctcagccccacaccacaaccatcgcagtgggacaagtcgcggcctctccaggcaagagacatttgactcggaaacccaggagagtcgagactctgcctacgtagagccaaaggaagattattcccatgaccacgtggaccactatgcctcacaccgtgaccacaaccacagagacgagacccacgggagcagtgaccacagacacagggagtcccggcaccgttcccgggacgtggatcgagagcaggaccacaacgagtgcaacaagcagcgcagccgtcataaatccaaggatcgctactgtgaaaaggatggagaagtgatatcaaaaaaacggaatgaggctggggagtggaacagggatgtttacatccgccaatgagttttgcccgtttgtgtttttttttttttttttttgaagtcttgtataactaacagcatccccaaaacaaagtctttggggtctacactgcaatcatatgtgatctgtcttgtaatattttgtattattgctgttgcttgaatagcaatagcatggatagagtattgagatactttttcttttgtaagtgctacataaattggcctggtatggctgcagtcctccggttgcatactggactcttcaaaaactgttttgggtagctgccacttgaacaaaatctgttgccacccaggtgatgttagtgttttaagaaatgtagttgatgtatccaacaagccagaatcagcacagataaaaagtggaatttcttgtttctccagatttttaatacgttaatacgcaggcatctgatttgcatattcattcatggaccactgtttcttgcttgtacctctggctgactaaatttggggacagattcagtcttgccttacacaaaggggatcataaagttagaatctattttctatgtactagtactgtgtactgtatagacagtttgtaaatgttatttctgcaaacaaacaccttcttattatatatataatatatatatatatcagtttgatcacactattttagagtcttaatgccaagtcagcagatttgctttatgaattacagggactagaaatgcccacattcaggaaatttgtaataacattgtctagacacctatcctcattctagtagaaagtgtgtacatactgtaaatatgtgtgattgcttgacttgaaaaggtttgaattctgaatgttataccatccttgtaagtaagtttgtaatttccaccataaattatggtaaatataaaactccagaggttgttctactccatacagttcacactgattgtgacacattcttagtagctagtgtctgttctagtcactgcactggagtctacgagccggaactcgctatatgcacgtgtgtgtgtccgtatgtaagaaagtgtgcaccgagtgactgaatggttgagatgaattggaatgctgaagactaacgaagaaactagagactgatatcgagcattctgcccacctcgctctgtatttaattaattgtgctatatgttgctttaacaacccattgagcagtcagggaatgtgagtaagcttgctgccaaaggtaactaggaaagcattcatctgctgcctccttgtttttgctcctagagagtgaaaatacaggcaattttactgtgagtgtttcactggaaatgtacaatctttgtgtgttagagtatttgttttagtaagaaatgtttacacagcttgtggaattatttcgtgggaaaataaatttttataacttctcccacttc

SEQ ID NO: 8091 - protein, 632 aa, Homo sapiens
MNQGSGLDLLKISYGKGARRKNRFKGSDGSTSSDTTSNSFVRQGSADSYTSRPSDSDVSLEEDREAVRREAERQAQAQLEKAKTKPVAFAVRTNVSYSAAHEDDVPVPGMAISFEAKDFLHVKEKFNNDWWIGRLVKEGCEIGFIPSPVKLENMRLQHEQRAKQGKFYSSKSGGNSSSSLGDIVPSSRKSTPPSSAIDIDATGLDAEENDIPANHRSPKPSANSVTSPHSKEKRMPFFKKTEHTPPYDVVPSMRPVVLVGPSLKGYEVTDMMQKALFDFLKHRFEGRISITRVTADISLAKRSVLNNPSKHAIIERSNTRSSLAEVQSEIERIFELARTLQLVVLDADTINHPAQLSKTSLAPIIVYVKISSPKVLQRLIKSRGKSQAKHLNVQMVAADKLAQCPPELFDVILDENQLEDACEHLADYLEAYWKATHPPSSSLPNPLLSRTLATSSLPLSPTLASNSQGSQGDQRTDRSAPIRSASQAEEEPSVEPVKKSQHRSSSSAPHHNHRSGTSRGLSRQETFDSETQESRDSAYVEPKEDYSHDHVDHYASHRDHNHRDETHGSSDHRHRESRHRSRDVDREQDHNECNKQRSRHKSKDRYCEKDGEVISKKRNEAGEWNRDVYIRQ

SEQ ID NO: 8092 - DNA, 3217 bp, Homo sapiens
atgaatcaggggagtggactggacctgctgaagatctcatatggaaaaggagccagaaggaaaaacagatttaaaggatctgatggaagcacgtcatctgatactacctcaaatagttttgttcgccagggttcggcagactcctacactagccgtccatccgattccgatgtatctctggaggaggaccgggaggcagtgcgcagagaagcggagcggcaggcccaggcacagttggaaaaagcaaagacaaagcccgttgcatttgcggttcggacaaatgtcagctacagtgcggcccatgaagatgatgttccagtgcctggcatggccatctcattcgaagcaaaagattttctgcatgttaaggaaaaatttaacaatgactggtggatagggcgattggtaaaagaaggctgtgaaatcggattcattccaagcccagtcaaactagaaaacatgaggctgcagcatgaacagagagccaagcaagggaaattctactccagtaaatcaggaggaaattcatcatccagtttgggtgacatagtacctagttccagaaaatcaacacctccatcatctggtgcaaaatctgcagatgaacaagaccagtggaaaactgcaggcttgttttggcggtttactacagagcacactcctccgtatgatgtggtaccttccatgcgaccagtggtcctagtgggcccttctctgaagggctacgaggtcacagatatgatgcaaaaagcgctgtttgattttttaaaacacagatttgaagggcggatatccatcacaagggtcaccgctgacatctcgcttgccaaacgctcggtattaaacaatcccagtaagcacgcaataatagaaagatccaacacaaggtcaagcttagcggaagttcagagtgaaatcgaaaggatttttgaacttgcaagaacattgcagttggtggtccttgacgcggatacaattaatcatccagctcaactcagtaaaacctccttggcccctattatagtatatgtaaagatttcttctcctaaggttttacaaaggttaataaaatctcgagggaaatctcaagctaaacacctcaacgtccagatggtagcagctgataaactggctcagtgtcctccagagctgttcgatgtgatcttggatgagaaccagcttgaggatgcctgtgagcaccttgccgactatctggaggcctactggaaggccacccatcctcccagcagtagcctccccaaccctctccttagccgtacattagccacttcaagtctgcctcttagccccaccctagcctctaattcacagggttctcaaggtgatcagaggactgatcgctccgctcctatccgttctgcttcccaagctgaagaagaacctagtgtggaaccagtcaagaaatcccagcaccgctcttcctcctcagccccacaccacaaccatcgcagtgggacaagtcgcggcctctccaggcaagagacatttgactcggaaacccaggagagtcgagactctgcctacgtagagccaaaggaagattattcccatgaccacgtggaccactatgcctcacaccgtgaccacaaccacagagacgagacccacgggagcagtgaccacagacacagggagtcccggcaccgttcccgggacgtggatcgagagcaggaccacaacgagtgcaacaagcagcgcagccgtcataaatccaaggatcgctactgtgaaaaggatggagaagtgatatcaaaaaaacggaatgaggctggggagtggaacagggatgtttacatccgccaatgagttttgcccgtttgtgtttttttttttttttttttgaagtcttgtataactaacagcatccccaaaacaaagtctttggggtctacactgcaatcatatgtgatctgtcttgtaatattttgtattattgctgttgcttgaatagcaatagcatggatagagtattgagatactttttcttttgtaagtgctacataaattggcctggtatggctgcagtcctccggttgcatactggactcttcaaaaactgttttgggtagctgccacttgaacaaaatctgttgccacccaggtgatgttagtgttttaagaaatgtagttgatgtatccaacaagccagaatcagcacagataaaaagtggaatttcttgtttctccagatttttaatacgttaatacgcaggcatctgatttgcatattcattcatggaccactgtttcttgcttgtacctctggctgactaaatttggggacagattcagtcttgccttacacaaaggggatcataaagttagaatctattttctatgtactagtactgtgtactgtatagacagtttgtaaatgttatttctgcaaacaaacaccttcttattatatatataatatatatatatatcagtttgatcacactattttagagtcttaatgccaagtcagcagatttgctttatgaattacagggactagaaatgcccacattcaggaaatttgtaataacattgtctagacacctatcctcattctagtagaaagtgtgtacatactgtaaatatgtgtgattgcttgacttgaaaaggtttgaattctgaatgttataccatccttgtaagtaagtttgtaatttccaccataaattatggtaaatataaaactccagaggttgttctactccatacagttcacactgattgtgacacattcttagtagctagtgtctgttctagtcactgcactggagtctacgagccggaactcgctatatgcacgtgtgtgtgtccgtatgtaagaaagtgtgcaccgagtgactgaatggttgagatgaattggaatgctgaagactaacgaagaaactagagactgatatcgagcattctgcccacctcgctctgtatttaattaattgtgctatatgttgctttaacaacccattgagcagtcagggaatgtgagtaagcttgctgccaaaggtaactaggaaagcattcatctgctgcctccttgtttttgctcctagagagtgaaaatacaggcaattttactgtgagtgtttcactggaaatgtacaatctttgtgtgttagagtatttgttttagtaagaaatgtttacacagcttgtggaattatttcgtgggaaaataaatttttataacttctcccacttc

SEQ ID NO: 8093 - protein, 608 aa, Homo sapiens
MNQGSGLDLLKISYGKGARRKNRFKGSDGSTSSDTTSNSFVRQGSADSYTSRPSDSDVSLEEDREAVRREAERQAQAQLEKAKTKPVAFAVRTNVSYSAAHEDDVPVPGMAISFEAKDFLHVKEKFNNDWWIGRLVKEGCEIGFIPSPVKLENMRLQHEQRAKQGKFYSSKSGGNSSSSLGDIVPSSRKSTPPSSGAKSADEQDQWKTAGLFWRFTTEHTPPYDVVPSMRPVVLVGPSLKGYEVTDMMQKALFDFLKHRFEGRISITRVTADISLAKRSVLNNPSKHAIIERSNTRSSLAEVQSEIERIFELARTLQLVVLDADTINHPAQLSKTSLAPIIVYVKISSPKVLQRLIKSRGKSQAKHLNVQMVAADKLAQCPPELFDVILDENQLEDACEHLADYLEAYWKATHPPSSSLPNPLLSRTLATSSLPLSPTLASNSQGSQGDQRTDRSAPIRSASQAEEEPSVEPVKKSQHRSSSSAPHHNHRSGTSRGLSRQETFDSETQESRDSAYVEPKEDYSHDHVDHYASHRDHNHRDETHGSSDHRHRESRHRSRDVDREQDHNECNKQRSRHKSKDRYCEKDGEVISKKRNEAGEWNRDVYIRQ

SEQ ID NO: 8094 - DNA, 3862 bp, Homo sapiens
atgaatcaggggagtggactggacctgctgaagatctcatatggaaaaggagccagaaggaaaaacagatttaaaggatctgatggaagcacgtcatctgatactacctcaaatagttttgttcgccagggttcggcagactcctacactagccgtccatccgattccgatgtatctctggaggaggaccgggaggcagtgcgcagagaagcggagcggcaggcccaggcacagttggaaaaagcaaagacaaagcccgttgcatttgcggttcggacaaatgtcagctacagtgcggcccatgaagatgatgttccagtgcctggcatggccatctcattcgaagcaaaagattttctgcatgttaaggaaaaatttaacaatgactggtggatagggcgattggtaaaagaaggctgtgaaatcggattcattccaagcccagtcaaactagaaaacatgaggctgcagcatgaacagagagccaagcaagggaaattctactccagtaaatcaggaggaaattcatcatccagtttgggtgacatagtacctagttccagaaaatcaacacctccatcatctggtgcaaaatctgcagatgaacaagaccagtggaaaactgcaggcttgttttggcggtttactacagagcacactcctccgtatgatgtggtaccttccatgcgaccagtggtcctagtgggcccttctctgaagggctacgaggtcacagatatgatgcaaaaagcgctgtttgattttttaaaacacagatttgaagggcggatatccatcacaagggtcaccgctgacatctcgcttgccaaacgctcggtattaaacaatcccagtaagcacgcaataatagaaagatccaacacaaggtcaagcttagcggaagttcagagtgaaatcgaaaggatttttgaacttgcaagaacattgcagttggtggtccttgacgcggatacaattaatcatccagctcaactcagtaaaacctccttggcccctattatagtatatgtaaagatttcttctcctaaggttttacaaaggttaataaaatctcgagggaaatctcaagctaaacacctcaacgtccagatggtagcagctgataaactggctcagtgtcctccagagctgttcgatgtgatcttggatgagaaccagcttgaggatgcctgtgagcaccttgccgactatctggaggcctactggaaggccacccatcctcccagcagtagcctccccaaccctctccttagccgtacattagccacttcaagtctgcctcttagccccaccctagcctctaattcacagggttctcaaggtgatcagaggactgatcgctccgctcctatccgttctgcttcccaagctgaagaagaacctagtgtggaaccagtcaagaaatcccagcaccgctcttcctcctcagccccacaccacaaccatcgcagtgggacaagtcgcggcctctccaggcaagagacatttgactcggaaacccaggagagtcgagactctgcctacgtagagccaaaggaagattattcccatgaccacgtggaccactatgcctcacaccgtgaccacaaccacagagacgagacccacgggagcagtgaccacagacacagggagtcccggcaccgttcccgggacgtggatcgagagcaggaccacaacgagtgcaacaagcagcgcagccgtcataaatccaaggatcgctactgtgaaaaggatggagaagtgatatcaaaaaaacggaatgaggctggggagtggaacagggatgtttacatccgccaatgagttttgcccgtttgtgtttttttttttttttttttgaagtcttgtataactaacagcatccccaaaacaaagtctttggggtctacactgcaatcatatgtgatctgtcttgtaatattttgtattattgctgttgcttgaatagcaatagcatggatagagtattgagatactttttcttttgtaagtgctacataaattggcctggtatggctgcagtcctccggttgcatactggactcttcaaaaactgttttgggtagctgccacttgaacaaaatctgttgccacccaggtgatgttagtgttttaagaaatgtagttgatgtatccaacaagccagaatcagcacagataaaaagtggaatttcttgtttctccagatttttaatacgttaatacgcaggcatctgatttgcatattcattcatggaccactgtttcttgcttgtacctctggctgactaaatttggggacagattcagtcttgccttacacaaaggggatcataaagttagaatctattttctatgtactagtactgtgtactgtatagacagtttgtaaatgttatttctgcaaacaaacaccttcttattatatatataatatatatatatatcagtttgatcacactattttagagtcttaatgccaagtcagcagatttgctttatgaattacagggactagaaatgcccacattcaggaaatttgtaataacattgtctagacacctatcctcattctagtagaaagtgtgtacatactgtaaatatgtgtgattgcttgacttgaaaaggtttgaattctgaatgttataccatccttgtaagtaagtttgtaatttccaccataaattatggtaaatataaaactccagaggttgttctactccatacagttcacactgattgtgacacattcttagtagctagtgtctgttctagtcactgcactggagtctacgagccggaactcgctatatgcacgtgtgtgtgtccgtatgtaagaaagtgtgcaccgagtgactgaatggttgagatgaattggaatgctgaagactaacgaagaaactagagactgatatcgagcattctgcccacctcgctctgtatttaattaattgtgctatatgttgctttaacaacccattgagcagtcagggaatgtgagtaagcttgctgccaaaggtaactaggaaagcattcatctgctgcctccttgtttttgctcctagagagtgaaaatacaggcaattttactgtgagtgtttcactggaaatgtacaatctttgtgtgttagagtatttgttttagtaagaaatgtttacacagcttgtggaattatttcgtgggaaaataaatttttataacttctcccacttcaatttctaaccttgcctattgttcctgttgtttgtttacctcccagttacctaccattcctccccaccaccgactccagcaggttcactgtctgtcagaacccagaagtgcttcttataaccaaagtttctgttcttcagaagaaatcagggcaaaatggggtgacttgaagtgaataaaatgttaagaatattatcctacataagacatgtacacagaaggggaaccttgaagacattatctccatgcctcaattacactgctgtaagaagcttacaatgtcatcatgtttaaggctaagaccttttccgtgtctcaagtgtatattttgtccagttataactggatggtaagacagtattaagagtgcaagtacctggcacttgaagtttgtcccaggaaaatgcctgtgtataattacctaacttcagatctgcacattaacttatttaacaaaataaatcagccgggcgcagtggctcatgcctgtaatcccagcaatttgggaggctgaggagggtggatcacctgaggtcaggagttcaagaccagcctggccaacgtggcgaaaccccgtctctactaaaaagataaaaaattagccaggtgtggtggtgcacacctgtaatcccagctacttgggag

SEQ ID NO: 8095 - protein, 608 aa, Homo sapiens; identical to SEQ ID NO: 8093

SEQ ID NO: 8096 - DNA, 3934 bp, Homo sapiens
atgaatcaggggagtggactggacctgctgaagatctcatatggaaaaggagccagaaggaaaaacagatttaaaggatctgatggaagcacgtcatctgatactacctcaaatagttttgttcgccagggttcggcagactcctacactagccgtccatccgattccgatgtatctctggaggaggaccgggaggcagtgcgcagagaagcggagcggcaggcccaggcacagttggaaaaagcaaagacaaagcccgttgcatttgcggttcggacaaatgtcagctacagtgcggcccatgaagatgatgttccagtgcctggcatggccatctcattcgaagcaaaagattttctgcatgttaaggaaaaatttaacaatgactggtggatagggcgattggtaaaagaaggctgtgaaatcggattcattccaagcccagtcaaactagaaaacatgaggctgcagcatgaacagagagccaagcaagggaaattctactccagtaaatcaggaggaaattcatcatccagtttgggtgacatagtacctagttccagaaaatcaacacctccatcatctgctatagacatagatgctactggcttagatgcagaagaaaatgatattccagcaaaccaccgctcccctaaacccagtgcaaacagtgtaacgtcaccccactccaaagagaaaagaatgcccttctttaagaagacagagcacactcctccgtatgatgtggtaccttccatgcgaccagtggtcctagtgggcccttctctgaagggctacgaggtcacagatatgatgcaaaaagcgctgtttgattttttaaaacacagatttgaagggcggatatccatcacaagggtcaccgctgacatctcgcttgccaaacgctcggtattaaacaatcccagtaagcacgcaataatagaaagatccaacacaaggtcaagcttagcggaagttcagagtgaaatcgaaaggatttttgaacttgcaagaacattgcagttggtggtccttgacgcggatacaattaatcatccagctcaactcagtaaaacctccttggcccctattatagtatatgtaaagatttcttctcctaaggttttacaaaggttaataaaatctcgagggaaatctcaagctaaacacctcaacgtccagatggtagcagctgataaactggctcagtgtcctccagagctgttcgatgtgatcttggatgagaaccagcttgaggatgcctgtgagcaccttgccgactatctggaggcctactggaaggccacccatcctcccagcagtagcctccccaaccctctccttagccgtacattagccacttcaagtctgcctcttagccccaccctagcctctaattcacagggttctcaaggtgatcagaggactgatcgctccgctcctatccgttctgcttcccaagctgaagaagaacctagtgtggaaccagtcaagaaatcccagcaccgctcttcctcctcagccccacaccacaaccatcgcagtgggacaagtcgcggcctctccaggcaagagacatttgactcggaaacccaggagagtcgagactctgcctacgtagagccaaaggaagattattcccatgaccacgtggaccactatgcctcacaccgtgaccacaaccacagagacgagacccacgggagcagtgaccacagacacagggagtcccggcaccgttcccgggacgtggatcgagagcaggaccacaacgagtgcaacaagcagcgcagccgtcataaatccaaggatcgctactgtgaaaaggatggagaagtgatatcaaaaaaacggaatgaggctggggagtggaacagggatgtttacatccgccaatgagttttgcccgtttgtgtttttttttttttttttttgaagtcttgtataactaacagcatccccaaaacaaagtctttggggtctacactgcaatcatatgtgatctgtcttgtaatattttgtattattgctgttgcttgaatagcaatagcatggatagagtattgagatactttttcttttgtaagtgctacataaattggcctggtatggctgcagtcctccggttgcatactggactcttcaaaaactgttttgggtagctgccacttgaacaaaatctgttgccacccaggtgatgttagtgttttaagaaatgtagttgatgtatccaacaagccagaatcagcacagataaaaagtggaatttcttgtttctccagatttttaatacgttaatacgcaggcatctgatttgcatattcattcatggaccactgtttcttgcttgtacctctggctgactaaatttggggacagattcagtcttgccttacacaaaggggatcataaagttagaatctattttctatgtactagtactgtgtactgtatagacagtttgtaaatgttatttctgcaaacaaacaccttcttattatatatataatatatatatatatcagtttgatcacactattttagagtcttaatgccaagtcagcagatttgctttatgaattacagggactagaaatgcccacattcaggaaatttgtaataacattgtctagacacctatcctcattctagtagaaagtgtgtacatactgtaaatatgtgtgattgcttgacttgaaaaggtttgaattctgaatgttataccatccttgtaagtaagtttgtaatttccaccataaattatggtaaatataaaactccagaggttgttctactccatacagttcacactgattgtgacacattcttagtagctagtgtctgttctagtcactgcactggagtctacgagccggaactcgctatatgcacgtgtgtgtgtccgtatgtaagaaagtgtgcaccgagtgactgaatggttgagatgaattggaatgctgaagactaacgaagaaactagagactgatatcgagcattctgcccacctcgctctgtatttaattaattgtgctatatgttgctttaacaacccattgagcagtcagggaatgtgagtaagcttgctgccaaaggtaactaggaaagcattcatctgctgcctccttgtttttgctcctagagagtgaaaatacaggcaattttactgtgagtgtttcactggaaatgtacaatctttgtgtgttagagtatttgttttagtaagaaatgtttacacagcttgtggaattatttcgtgggaaaataaatttttataacttctcccacttcaatttctaaccttgcctattgttcctgttgtttgtttacctcccagttacctaccattcctccccaccaccgactccagcaggttcactgtctgtcagaacccagaagtgcttcttataaccaaagtttctgttcttcagaagaaatcagggcaaaatggggtgacttgaagtgaataaaatgttaagaatattatcctacataagacatgtacacagaaggggaaccttgaagacattatctccatgcctcaattacactgctgtaagaagcttacaatgtcatcatgtttaaggctaagaccttttccgtgtctcaagtgtatattttgtccagttataactggatggtaagacagtattaagagtgcaagtacctggcacttgaagtttgtcccaggaaaatgcctgtgtataattacctaacttcagatctgcacattaacttatttaacaaaataaatcagccgggcgcagtggctcatgcctgtaatcccagcaatttgggaggctgaggagggtggatcacctgaggtcaggagttcaagaccagcctggccaacgtggcgaaaccccgtctctactaaaaagataaaaaattagccaggtgtggtggtgcacacctgtaatcccagctacttgggag

SEQ ID NO: 8097 - protein, 632 aa, Homo sapiens; identical to SEQ ID NO: 8091

SEQ ID NO: 8098 - DNA, 3911 bp, Homo sapiens
tggaggatgtttctgtagtcctaggaatccacagtgaattcgagtctagactcagtcatttttcagggtcaggggaggagggagaagtagcaaatcagatatgcccaaaacgttacagaggtaacagtgaatccaggatgctgctgtcagcctgtgcattgtgaagaaggcaatcataggcgagcagccgcgggagcaggaacagcagcgtgctaagaagcagtcacataaacagcagcaggagtaggcctcctgcttttcaaaagcagagtactgcagggtcgcgaaatgcaagacactcagatgtttgaaaatctcccgagttgagaatggctactgtaaaagcgtcaccaagaaactctgacgatctggacagtcctaactctgtgttagcaatacttacttccggaaaattaatgctacttcttgtagatttttgcaaataggaaacccccttgaagaagatctcaaattacgccccccacccccaaaaaaagacaaacaggggagaacaaagttttggcatgcctgcaggaacggtggcttttttagaaactacctaggaggcagaagctaagtgatttgctcatgcctcttacctgggagtagaaggtgggaagaaatggaccgaggctgtgacgagaagacaaggcacagtgcagcttggtgaagccacacgctgactgcgttctgccccctcttcatgcagtgctgcgggctggtgcatcgccggcgagtacgggtgtcctatggttcggcagactcctacactagccgtccatccgattccgatgtatctctggaggaggaccgggaggcagtgcgcagagaagcggagcggcaggcccaggcacagttggaaaaagcaaagacaaagcccgttgcatttgcggttcggacaaatgtcagctacagtgcggcccatgaagatgatgttccagtgcctggcatggccatctcattcgaagcaaaagattttctgcatgttaaggaaaaatttaacaatgactggtggatagggcgattggtaaaagaaggctgtgaaatcggattcattccaagcccagtcaaactagaaaacatgaggctgcagcatgaacagagagccaagcaagggaaattctactccagtaaatcaggaggaaattcatcatccagtttgggtgacatagtacctagttccagaaaatcaacacctccatcatctgctatagacatagatgctactggcttagatgcagaagaaaatgatattccagcaaaccaccgctcccctaaacccagtgcaaacagtgtaacgtcaccccactccaaagagaaaagaatgcccttctttaagaagacagagcacactcctccgtatgatgtggtaccttccatgcgaccagtggtcctagtgggcccttctctgaagggctacgaggtcacagatatgatgcaaaaagcgctgtttgattttttaaaacacagatttgaagggcggatatccatcacaagggtcaccgctgacatctcgcttgccaaacgctcggtattaaacaatcccagtaagcacgcaataatagaaagatccaacacaaggtcaagcttagcggaagttcagagtgaaatcgaaaggatttttgaacttgcaagaacattgcagttggtggtccttgacgcggatacaattaatcatccagctcaactcagtaaaacctccttggcccctattatagtatatgtaaagatttcttctcctaaggttttacaaaggttaataaaatctcgagggaaatctcaagctaaacacctcaacgtccagatggtagcagctgataaactggctcagtgtcctccagagctgttcgatgtgatcttggatgagaaccagcttgaggatgcctgtgagcaccttgccgactatctggaggcctactggaaggccacccatcctcccagcagtagcctccccaaccctctccttagccgtacattagccacttcaagtctgcctcttagccccaccctagcctctaattcacagggttctcaaggtgatcagaggactgatcgctccgctcctatccgttctgcttcccaagctgaagaagaacctagtgtggaaccagtcaagaaatcccagcaccgctcttcctcctcagccccacaccacaaccatcgcagtgggacaagtcgcggcctctccaggcaagagacatttgactcggaaacccaggagagtcgagactctgcctacgtagagccaaaggaagattattcccatgaccacgtggaccactatgcctcacaccgtgaccacaaccacagagacgagacccacgggagcagtgaccacagacacagggagtcccggcaccgttcccgggacgtggatcgagagcaggaccacaacgagtgcaacaagcagcgcagccgtcataaatccaaggatcgctactgtgaaaaggatggagaagtgatatcaaaaaaacggaatgaggctggggagtggaacagggatgtttacatccgccaatgagttttgcccgtttgtgtttttttttttttttttttgaagtcttgtataactaacagcatccccaaaacaaagtctttggggtctacactgcaatcatatgtgatctgtcttgtaatattttgtattattgctgttgcttgaatagcaatagcatggatagagtattgagatactttttcttttgtaagtgctacataaattggcctggtatggctgcagtcctccggttgcatactggactcttcaaaaactgttttgggtagctgccacttgaacaaaatctgttgccacccaggtgatgttagtgttttaagaaatgtagttgatgtatccaacaagccagaatcagcacagataaaaagtggaatttcttgtttctccagatttttaatacgttaatacgcaggcatctgatttgcatattcattcatggaccactgtttcttgcttgtacctctggctgactaaatttggggacagattcagtcttgccttacacaaaggggatcataaagttagaatctattttctatgtactagtactgtgtactgtatagacagtttgtaaatgttatttctgcaaacaaacaccttcttattatatatataatatatatatatatcagtttgatcacactattttagagtcttaatgccaagtcagcagatttgctttatgaattacagggactagaaatgcccacattcaggaaatttgtaataacattgtctagacacctatcctcattctagtagaaagtgtgtacatactgtaaatatgtgtgattgcttgacttgaaaaggtttgaattctgaatgttataccatccttgtaagtaagtttgtaatttccaccataaattatggtaaatataaaactccagaggttgttctactccatacagttcacactgattgtgacacattcttagtagctagtgtctgttctagtcactgcactggagtctacgagccggaactcgctatatgcacgtgtgtgtgtccgtatgtaagaaagtgtgcaccgagtgactgaatggttgagatgaattggaatgctgaagactaacgaagaaactagagactgatatcgagcattctgcccacctcgctctgtatttaattaattgtgctatatgttgctttaacaacccattgagcagtcagggaatgtgagtaagcttgctgccaaaggtaactaggaaagcattcatctgctgcctccttgtttttgctcctagagagtgaaaatacaggcaattttactgtgagtgtttcactggaaatgtacaatctttgtgtgttagagtatttgttttagtaagaaatgtttacacagcttgtggaattatttcgtgggaaaataaatttttataacttctcccacttc

SEQ ID NO: 8099 - protein, 605 aa, Homo sapiens
MQCCGLVHRRRVRVSYGSADSYTSRPSDSDVSLEEDREAVRREAERQAQAQLEKAKTKPVAFAVRTNVSYSAAHEDDVPVPGMAISFEAKDFLHVKEKFNNDWWIGRLVKEGCEIGFIPSPVKLENMRLQHEQRAKQGKFYSSKSGGNSSSSLGDIVPSSRKSTPPSSAIDIDATGLDAEENDIPANHRSPKPSANSVTSPHSKEKRMPFFKKTEHTPPYDVVPSMRPVVLVGPSLKGYEVTDMMQKALFDFLKHRFEGRISITRVTADISLAKRSVLNNPSKHAIIERSNTRSSLAEVQSEIERIFELARTLQLVVLDADTINHPAQLSKTSLAPIIVYVKISSPKVLQRLIKSRGKSQAKHLNVQMVAADKLAQCPPELFDVILDENQLEDACEHLADYLEAYWKATHPPSSSLPNPLLSRTLATSSLPLSPTLASNSQGSQGDQRTDRSAPIRSASQAEEEPSVEPVKKSQHRSSSSAPHHNHRSGTSRGLSRQETFDSETQESRDSAYVEPKEDYSHDHVDHYASHRDHNHRDETHGSSDHRHRESRHRSRDVDREQDHNECNKQRSRHKSKDRYCEKDGEVISKKRNEAGEWNRDVYIRQ

SEQ ID NO: 8100 - DNA, 4556 bp, Homo sapiens
tggaggatgtttctgtagtcctaggaatccacagtgaattcgagtctagactcagtcatttttcagggtcaggggaggagggagaagtagcaaatcagatatgcccaaaacgttacagaggtaacagtgaatccaggatgctgctgtcagcctgtgcattgtgaagaaggcaatcataggcgagcagccgcgggagcaggaacagcagcgtgctaagaagcagtcacataaacagcagcaggagtaggcctcctgcttttcaaaagcagagtactgcagggtcgcgaaatgcaagacactcagatgtttgaaaatctcccgagttgagaatggctactgtaaaagcgtcaccaagaaactctgacgatctggacagtcctaactctgtgttagcaatacttacttccggaaaattaatgctacttcttgtagatttttgcaaataggaaacccccttgaagaagatctcaaattacgccccccacccccaaaaaaagacaaacaggggagaacaaagttttggcatgcctgcaggaacggtggcttttttagaaactacctaggaggcagaagctaagtgatttgctcatgcctcttacctgggagtagaaggtgggaagaaatggaccgaggctgtgacgagaagacaaggcacagtgcagcttggtgaagccacacgctgactgcgttctgccccctcttcatgcagtgctgcgggctggtgcatcgccggcgagtacgggtgtcctatggttcggcagactcctacactagccgtccatccgattccgatgtatctctggaggaggaccgggaggcagtgcgcagagaagcggagcggcaggcccaggcacagttggaaaaagcaaagacaaagcccgttgcatttgcggttcggacaaatgtcagctacagtgcggcccatgaagatgatgttccagtgcctggcatggccatctcattcgaagcaaaagattttctgcatgttaaggaaaaatttaacaatgactggtggatagggcgattggtaaaagaaggctgtgaaatcggattcattccaagcccagtcaaactagaaaacatgaggctgcagcatgaacagagagccaagcaagggaaattctactccagtaaatcaggaggaaattcatcatccagtttgggtgacatagtacctagttccagaaaatcaacacctccatcatctgctatagacatagatgctactggcttagatgcagaagaaaatgatattccagcaaaccaccgctcccctaaacccagtgcaaacagtgtaacgtcaccccactccaaagagaaaagaatgcccttctttaagaagacagagcacactcctccgtatgatgtggtaccttccatgcgaccagtggtcctagtgggcccttctctgaagggctacgaggtcacagatatgatgcaaaaagcgctgtttgattttttaaaacacagatttgaagggcggatatccatcacaagggtcaccgctgacatctcgcttgccaaacgctcggtattaaacaatcccagtaagcacgcaataatagaaagatccaacacaaggtcaagcttagcggaagttcagagtgaaatcgaaaggatttttgaacttgcaagaacattgcagttggtggtccttgacgcggatacaattaatcatccagctcaactcagtaaaacctccttggcccctattatagtatatgtaaagatttcttctcctaaggttttacaaaggttaataaaatctcgagggaaatctcaagctaaacacctcaacgtccagatggtagcagctgataaactggctcagtgtcctccagagctgttcgatgtgatcttggatgagaaccagcttgaggatgcctgtgagcaccttgccgactatctggaggcctactggaaggccacccatcctcccagcagtagcctccccaaccctctccttagccgtacattagccacttcaagtctgcctcttagccccaccctagcctctaattcacagggttctcaaggtgatcagaggactgatcgctccgctcctatccgttctgcttcccaagctgaagaagaacctagtgtggaaccagtcaagaaatcccagcaccgctcttcctcctcagccccacaccacaaccatcgcagtgggacaagtcgcggcctctccaggcaagagacatttgactcggaaacccaggagagtcgagactctgcctacgtagagccaaaggaagattattcccatgaccacgtggaccactatgcctcacaccgtgaccacaaccacagagacgagacccacgggagcagtgaccacagacacagggagtcccggcaccgttcccgggacgtggatcgagagcaggaccacaacgagtgcaacaagcagcgcagccgtcataaatccaaggatcgctactgtgaaaaggatggagaagtgatatcaaaaaaacggaatgaggctggggagtggaacagggatgtttacatccgccaatgagttttgcccgtttgtgtttttttttttttttttttgaagtcttgtataactaacagcatccccaaaacaaagtctttggggtctacactgcaatcatatgtgatctgtcttgtaatattttgtattattgctgttgcttgaatagcaatagcatggatagagtattgagatactttttcttttgtaagtgctacataaattggcctggtatggctgcagtcctccggttgcatactggactcttcaaaaactgttttgggtagctgccacttgaacaaaatctgttgccacccaggtgatgttagtgttttaagaaatgtagttgatgtatccaacaagccagaatcagcacagataaaaagtggaatttcttgtttctccagatttttaatacgttaatacgcaggcatctgatttgcatattcattcatggaccactgtttcttgcttgtacctctggctgactaaatttggggacagattcagtcttgccttacacaaaggggatcataaagttagaatctattttctatgtactagtactgtgtactgtatagacagtttgtaaatgttatttctgcaaacaaacaccttcttattatatatataatatatatatatatcagtttgatcacactattttagagtcttaatgccaagtcagcagatttgctttatgaattacagggactagaaatgcccacattcaggaaatttgtaataacattgtctagacacctatcctcattctagtagaaagtgtgtacatactgtaaatatgtgtgattgcttgacttgaaaaggtttgaattctgaatgttataccatccttgtaagtaagtttgtaatttccaccataaattatggtaaatataaaactccagaggttgttctactccatacagttcacactgattgtgacacattcttagtagctagtgtctgttctagtcactgcactggagtctacgagccggaactcgctatatgcacgtgtgtgtgtccgtatgtaagaaagtgtgcaccgagtgactgaatggttgagatgaattggaatgctgaagactaacgaagaaactagagactgatatcgagcattctgcccacctcgctctgtatttaattaattgtgctatatgttgctttaacaacccattgagcagtcagggaatgtgagtaagcttgctgccaaaggtaactaggaaagcattcatctgctgcctccttgtttttgctcctagagagtgaaaatacaggcaattttactgtgagtgtttcactggaaatgtacaatctttgtgtgttagagtatttgttttagtaagaaatgtttacacagcttgtggaattatttcgtgggaaaataaatttttataacttctcccacttcaatttctaaccttgcctattgttcctgttgtttgtttacctcccagttacctaccattcctccccaccaccgactccagcaggttcactgtctgtcagaacccagaagtgcttcttataaccaaagtttctgttcttcagaagaaatcagggcaaaatggggtgacttgaagtgaataaaatgttaagaatattatcctacataagacatgtacacagaaggggaaccttgaagacattatctccatgcctcaattacactgctgtaagaagcttacaatgtcatcatgtttaaggctaagaccttttccgtgtctcaagtgtatattttgtccagttataactggatggtaagacagtattaagagtgcaagtacctggcacttgaagtttgtcccaggaaaatgcctgtgtataattacctaacttcagatctgcacattaacttatttaacaaaataaatcagccgggcgcagtggctcatgcctgtaatcccagcaatttgggaggctgaggagggtggatcacctgaggtcaggagttcaagaccagcctggccaacgtggcgaaaccccgtctctactaaaaagataaaaaattagccaggtgtggtggtgcacacctgtaatcccagctacttgggag

SEQ ID NO: 8101 - protein, 605 aa, Homo sapiens; identical to SEQ ID NO: 8099

SEQ ID NO: 8102 - DNA, 820 bp, Homo sapiens
ggttctggaacagagagctgttgtgatccgacgaactttagaaagtcacactaactaagactacacaccccaagccagcaagaaaaaggaaagcagttgctatgctgttcagcaaagcaagacttggctgccttttagctagtcctgaattcttgctcctgtgaagaaaattcctgctggagtgctgggcgcacttggaattggtctagcatgcttgacagacgccttatagctcctcaaactaaatacattattcctgggggttcggcagactcctacactagccgtccatccgattccgatgtatctctggaggaggaccgggaggcagtgcgcagagaagcggagcggcaggcccaggcacagttggaaaaagcaaagacaaagcccgttgcatttgcggttcggacaaatgtcagctacagtgcggcccatgaagatgatgttccagtgcctggcatggccatctcattcgaagcaaaagattttctgcatgttaaggaagtaaggagaataatttcattttctaacagcatgatgtttcaccttgacataccatttcttatttcctattcatatgccgtttctgtgaagtagcattgcacatcgctgcagttgtataacacacataactaaatcaatggctctcaacctctgctaatataaatataccttttaaagtggaaagaagtcacaggcctcttgcaataacttcagcgctccctggggctctgtggcccagaaattgggaactgctagagtagatgatccttttttatgcttaacctatacttttttttaatgtttcaccttgactagg

SEQ ID NO: 8103 - protein, 128 aa, Homo sapiens
MLDRRLIAPQTKYIIPGGSADSYTSRPSDSDVSLEEDREAVRREAERQAQAQLEKAKTKPVAFAVRTNVSYSAAHEDDVPVPGMAISFEAKDFLHVKEVRRIISFSNSMMFHLDIPFLISYSYAVSVK

SEQ ID NO: 8104 - DNA, 3374 bp, Homo sapiens
acactaactaagactacacaccccaagccagcaagaaaaaggaaagcagttgctatgctgttcagcaaagcaagacttggctgccttttagctagtcctgaattcttgctcctgtgaagaaaattcctgctggagtgctgggcgcacttggaattggtctagcatgcttgacagacgccttatagctcctcaaactaaatacattattcctgggggttcggcagactcctacactagccgtccatccgattccgatgtatctctggaggaggaccgggaggcagtgcgcagagaagcggagcggcaggcccaggcacagttggaaaaagcaaagacaaagcccgttgcatttgcggttcggacaaatgtcagctacagtgcggcccatgaagatgatgttccagtgcctggcatggccatctcattcgaagcaaaagattttctgcatgttaaggaaaaatttaacaatgactggtggatagggcgattggtaaaagaaggctgtgaaatcggattcattccaagcccagtcaaactagaaaacatgaggctgcagcatgaacagagagccaagcaagggaaattctactccagtaaatcaggaggaaattcatcatccagtttgggtgacatagtacctagttccagaaaatcaacacctccatcatctgctatagacatagatgctactggcttagatgcagaagaaaatgatattccagcaaaccaccgctcccctaaacccagtgcaaacagtgtaacgtcaccccactccaaagagaaaagaatgcccttctttaagaagacagagcacactcctccgtatgatgtggtaccttccatgcgaccagtggtcctagtgggcccttctctgaagggctacgaggtcacagatatgatgcaaaaagcgctgtttgattttttaaaacacagatttgaagggcggatatccatcacaagggtcaccgctgacatctcgcttgccaaacgctcggtattaaacaatcccagtaagcacgcaataatagaaagatccaacacaaggtcaagcttagcggaagttcagagtgaaatcgaaaggatttttgaacttgcaagaacattgcagttggtggtccttgacgcggatacaattaatcatccagctcaactcagtaaaacctccttggcccctattatagtatatgtaaagatttcttctcctaaggttttacaaaggttaataaaatctcgagggaaatctcaagctaaacacctcaacgtccagatggtagcagctgataaactggctcagtgtcctccagagctgttcgatgtgatcttggatgagaaccagcttgaggatgcctgtgagcaccttgccgactatctggaggcctactggaaggccacccatcctcccagcagtagcctccccaaccctctccttagccgtacattagccacttcaagtctgcctcttagccccaccctagcctctaattcacagggttctcaaggtgatcagaggactgatcgctccgctcctatccgttctgcttcccaagctgaagaagaacctagtgtggaaccagtcaagaaatcccagcaccgctcttcctcctcagccccacaccacaaccatcgcagtgggacaagtcgcggcctctccaggcaagagacatttgactcggaaacccaggagagtcgagactctgcctacgtagagccaaaggaagattattcccatgaccacgtggaccactatgcctcacaccgtgaccacaaccacagagacgagacccacgggagcagtgaccacagacacagggagtcccggcaccgttcccgggacgtggatcgagagcaggaccacaacgagtgcaacaagcagcgcagccgtcataaatccaaggatcgctactgtgaaaaggatggagaagtgatatcaaaaaaacggaatgaggctggggagtggaacagggatgtttacatccgccaatgagttttgcccgtttgtgtttttttttttttttttttgaagtcttgtataactaacagcatccccaaaacaaagtctttggggtctacactgcaatcatatgtgatctgtcttgtaatattttgtattattgctgttgcttgaatagcaatagcatggatagagtattgagatactttttcttttgtaagtgctacataaattggcctggtatggctgcagtcctccggttgcatactggactcttcaaaaactgttttgggtagctgccacttgaacaaaatctgttgccacccaggtgatgttagtgttttaagaaatgtagttgatgtatccaacaagccagaatcagcacagataaaaagtggaatttcttgtttctccagatttttaatacgttaatacgcaggcatctgatttgcatattcattcatggaccactgtttcttgcttgtacctctggctgactaaatttggggacagattcagtcttgccttacacaaaggggatcataaagttagaatctattttctatgtactagtactgtgtactgtatagacagtttgtaaatgttatttctgcaaacaaacaccttcttattatatatataatatatatatatatcagtttgatcacactattttagagtcttaatgccaagtcagcagatttgctttatgaattacagggactagaaatgcccacattcaggaaatttgtaataacattgtctagacacctatcctcattctagtagaaagtgtgtacatactgtaaatatgtgtgattgcttgacttgaaaaggtttgaattctgaatgttataccatccttgtaagtaagtttgtaatttccaccataaattatggtaaatataaaactccagaggttgttctactccatacagttcacactgattgtgacacattcttagtagctagtgtctgttctagtcactgcactggagtctacgagccggaactcgctatatgcacgtgtgtgtgtccgtatgtaagaaagtgtgcaccgagtgactgaatggttgagatgaattggaatgctgaagactaacgaagaaactagagactgatatcgagcattctgcccacctcgctctgtatttaattaattgtgctatatgttgctttaacaacccattgagcagtcagggaatgtgagtaagcttgctgccaaaggtaactaggaaagcattcatctgctgcctccttgtttttgctcctagagagtgaaaatacaggcaattttactgtgagtgtttcactggaaatgtacaatctttgtgtgttagagtatttgttttagtaagaaatgtttacacagcttgtggaattatttcgtgggaaaataaatttttataacttctcccacttc

SEQ ID NO: 8105 - protein, 606 aa, Homo sapiens
MLDRRLIAPQTKYIIPGGSADSYTSRPSDSDVSLEEDREAVRREAERQAQAQLEKAKTKPVAFAVRTNVSYSAAHEDDVPVPGMAISFEAKDFLHVKEKFNNDWWIGRLVKEGCEIGFIPSPVKLENMRLQHEQRAKQGKFYSSKSGGNSSSSLGDIVPSSRKSTPPSSAIDIDATGLDAEENDIPANHRSPKPSANSVTSPHSKEKRMPFFKKTEHTPPYDVVPSMRPVVLVGPSLKGYEVTDMMQKALFDFLKHRFEGRISITRVTADISLAKRSVLNNPSKHAIIERSNTRSSLAEVQSEIERIFELARTLQLVVLDADTINHPAQLSKTSLAPIIVYVKISSPKVLQRLIKSRGKSQAKHLNVQMVAADKLAQCPPELFDVILDENQLEDACEHLADYLEAYWKATHPPSSSLPNPLLSRTLATSSLPLSPTLASNSQGSQGDQRTDRSAPIRSASQAEEEPSVEPVKKSQHRSSSSAPHHNHRSGTSRGLSRQETFDSETQESRDSAYVEPKEDYSHDHVDHYASHRDHNHRDETHGSSDHRHRESRHRSRDVDREQDHNECNKQRSRHKSKDRYCEKDGEVISKKRNEAGEWNRDVYIRQ

SEQ ID NO: 8106 - DNA, 3302 bp, Homo sapiens
acactaactaagactacacaccccaagccagcaagaaaaaggaaagcagttgctatgctgttcagcaaagcaagacttggctgccttttagctagtcctgaattcttgctcctgtgaagaaaattcctgctggagtgctgggcgcacttggaattggtctagcatgcttgacagacgccttatagctcctcaaactaaatacattattcctgggggttcggcagactcctacactagccgtccatccgattccgatgtatctctggaggaggaccgggaggcagtgcgcagagaagcggagcggcaggcccaggcacagttggaaaaagcaaagacaaagcccgttgcatttgcggttcggacaaatgtcagctacagtgcggcccatgaagatgatgttccagtgcctggcatggccatctcattcgaagcaaaagattttctgcatgttaaggaaaaatttaacaatgactggtggatagggcgattggtaaaagaaggctgtgaaatcggattcattccaagcccagtcaaactagaaaacatgaggctgcagcatgaacagagagccaagcaagggaaattctactccagtaaatcaggaggaaattcatcatccagtttgggtgacatagtacctagttccagaaaatcaacacctccatcatctggtgcaaaatctgcagatgaacaagaccagtggaaaactgcaggcttgttttggcggtttactacagagcacactcctccgtatgatgtggtaccttccatgcgaccagtggtcctagtgggcccttctctgaagggctacgaggtcacagatatgatgcaaaaagcgctgtttgattttttaaaacacagatttgaagggcggatatccatcacaagggtcaccgctgacatctcgcttgccaaacgctcggtattaaacaatcccagtaagcacgcaataatagaaagatccaacacaaggtcaagcttagcggaagttcagagtgaaatcgaaaggatttttgaacttgcaagaacattgcagttggtggtccttgacgcggatacaattaatcatccagctcaactcagtaaaacctccttggcccctattatagtatatgtaaagatttcttctcctaaggttttacaaaggttaataaaatctcgagggaaatctcaagctaaacacctcaacgtccagatggtagcagctgataaactggctcagtgtcctccagagctgttcgatgtgatcttggatgagaaccagcttgaggatgcctgtgagcaccttgccgactatctggaggcctactggaaggccacccatcctcccagcagtagcctccccaaccctctccttagccgtacattagccacttcaagtctgcctcttagccccaccctagcctctaattcacagggttctcaaggtgatcagaggactgatcgctccgctcctatccgttctgcttcccaagctgaagaagaacctagtgtggaaccagtcaagaaatcccagcaccgctcttcctcctcagccccacaccacaaccatcgcagtgggacaagtcgcggcctctccaggcaagagacatttgactcggaaacccaggagagtcgagactctgcctacgtagagccaaaggaagattattcccatgaccacgtggaccactatgcctcacaccgtgaccacaaccacagagacgagacccacgggagcagtgaccacagacacagggagtcccggcaccgttcccgggacgtggatcgagagcaggaccacaacgagtgcaacaagcagcgcagccgtcataaatccaaggatcgctactgtgaaaaggatggagaagtgatatcaaaaaaacggaatgaggctggggagtggaacagggatgtttacatccgccaatgagttttgcccgtttgtgtttttttttttttttttttgaagtcttgtataactaacagcatccccaaaacaaagtctttggggtctacactgcaatcatatgtgatctgtcttgtaatattttgtattattgctgttgcttgaatagcaatagcatggatagagtattgagatactttttcttttgtaagtgctacataaattggcctggtatggctgcagtcctccggttgcatactggactcttcaaaaactgttttgggtagctgccacttgaacaaaatctgttgccacccaggtgatgttagtgttttaagaaatgtagttgatgtatccaacaagccagaatcagcacagataaaaagtggaatttcttgtttctccagatttttaatacgttaatacgcaggcatctgatttgcatattcattcatggaccactgtttcttgcttgtacctctggctgactaaatttggggacagattcagtcttgccttacacaaaggggatcataaagttagaatctattttctatgtactagtactgtgtactgtatagacagtttgtaaatgttatttctgcaaacaaacaccttcttattatatatataatatatatatatatcagtttgatcacactattttagagtcttaatgccaagtcagcagatttgctttatgaattacagggactagaaatgcccacattcaggaaatttgtaataacattgtctagacacctatcctcattctagtagaaagtgtgtacatactgtaaatatgtgtgattgcttgacttgaaaaggtttgaattctgaatgttataccatccttgtaagtaagtttgtaatttccaccataaattatggtaaatataaaactccagaggttgttctactccatacagttcacactgattgtgacacattcttagtagctagtgtctgttctagtcactgcactggagtctacgagccggaactcgctatatgcacgtgtgtgtgtccgtatgtaagaaagtgtgcaccgagtgactgaatggttgagatgaattggaatgctgaagactaacgaagaaactagagactgatatcgagcattctgcccacctcgctctgtatttaattaattgtgctatatgttgctttaacaacccattgagcagtcagggaatgtgagtaagcttgctgccaaaggtaactaggaaagcattcatctgctgcctccttgtttttgctcctagagagtgaaaatacaggcaattttactgtgagtgtttcactggaaatgtacaatctttgtgtgttagagtatttgttttagtaagaaatgtttacacagcttgtggaattatttcgtgggaaaataaatttttataacttctcccacttc

SEQ ID NO: 8107 - protein, 582 aa, Homo sapiens
MLDRRLIAPQTKYIIPGGSADSYTSRPSDSDVSLEEDREAVRREAERQAQAQLEKAKTKPVAFAVRTNVSYSAAHEDDVPVPGMAISFEAKDFLHVKEKFNNDWWIGRLVKEGCEIGFIPSPVKLENMRLQHEQRAKQGKFYSSKSGGNSSSSLGDIVPSSRKSTPPSSGAKSADEQDQWKTAGLFWRFTTEHTPPYDVVPSMRPVVLVGPSLKGYEVTDMMQKALFDFLKHRFEGRISITRVTADISLAKRSVLNNPSKHAIIERSNTRSSLAEVQSEIERIFELARTLQLVVLDADTINHPAQLSKTSLAPIIVYVKISSPKVLQRLIKSRGKSQAKHLNVQMVAADKLAQCPPELFDVILDENQLEDACEHLADYLEAYWKATHPPSSSLPNPLLSRTLATSSLPLSPTLASNSQGSQGDQRTDRSAPIRSASQAEEEPSVEPVKKSQHRSSSSAPHHNHRSGTSRGLSRQETFDSETQESRDSAYVEPKEDYSHDHVDHYASHRDHNHRDETHGSSDHRHRESRHRSRDVDREQDHNECNKQRSRHKSKDRYCEKDGEVISKKRNEAGEWNRDVYIRQ

SEQ ID NO: 8108 - DNA, 3947 bp, Homo sapiens
acactaactaagactacacaccccaagccagcaagaaaaaggaaagcagttgctatgctgttcagcaaagcaagacttggctgccttttagctagtcctgaattcttgctcctgtgaagaaaattcctgctggagtgctgggcgcacttggaattggtctagcatgcttgacagacgccttatagctcctcaaactaaatacattattcctgggggttcggcagactcctacactagccgtccatccgattccgatgtatctctggaggaggaccgggaggcagtgcgcagagaagcggagcggcaggcccaggcacagttggaaaaagcaaagacaaagcccgttgcatttgcggttcggacaaatgtcagctacagtgcggcccatgaagatgatgttccagtgcctggcatggccatctcattcgaagcaaaagattttctgcatgttaaggaaaaatttaacaatgactggtggatagggcgattggtaaaagaaggctgtgaaatcggattcattccaagcccagtcaaactagaaaacatgaggctgcagcatgaacagagagccaagcaagggaaattctactccagtaaatcaggaggaaattcatcatccagtttgggtgacatagtacctagttccagaaaatcaacacctccatcatctggtgcaaaatctgcagatgaacaagaccagtggaaaactgcaggcttgttttggcggtttactacagagcacactcctccgtatgatgtggtaccttccatgcgaccagtggtcctagtgggcccttctctgaagggctacgaggtcacagatatgatgcaaaaagcgctgtttgattttttaaaacacagatttgaagggcggatatccatcacaagggtcaccgctgacatctcgcttgccaaacgctcggtattaaacaatcccagtaagcacgcaataatagaaagatccaacacaaggtcaagcttagcggaagttcagagtgaaatcgaaaggatttttgaacttgcaagaacattgcagttggtggtccttgacgcggatacaattaatcatccagctcaactcagtaaaacctccttggcccctattatagtatatgtaaagatttcttctcctaaggttttacaaaggttaataaaatctcgagggaaatctcaagctaaacacctcaacgtccagatggtagcagctgataaactggctcagtgtcctccagagctgttcgatgtgatcttggatgagaaccagcttgaggatgcctgtgagcaccttgccgactatctggaggcctactggaaggccacccatcctcccagcagtagcctccccaaccctctccttagccgtacattagccacttcaagtctgcctcttagccccaccctagcctctaattcacagggttctcaaggtgatcagaggactgatcgctccgctcctatccgttctgcttcccaagctgaagaagaacctagtgtggaaccagtcaagaaatcccagcaccgctcttcctcctcagccccacaccacaaccatcgcagtgggacaagtcgcggcctctccaggcaagagacatttgactcggaaacccaggagagtcgagactctgcctacgtagagccaaaggaagattattcccatgaccacgtggaccactatgcctcacaccgtgaccacaaccacagagacgagacccacgggagcagtgaccacagacacagggagtcccggcaccgttcccgggacgtggatcgagagcaggaccacaacgagtgcaacaagcagcgcagccgtcataaatccaaggatcgctactgtgaaaaggatggagaagtgatatcaaaaaaacggaatgaggctggggagtggaacagggatgtttacatccgccaatgagttttgcccgtttgtgtttttttttttttttttttgaagtcttgtataactaacagcatccccaaaacaaagtctttggggtctacactgcaatcatatgtgatctgtcttgtaatattttgtattattgctgttgcttgaatagcaatagcatggatagagtattgagatactttttcttttgtaagtgctacataaattggcctggtatggctgcagtcctccggttgcatactggactcttcaaaaactgttttgggtagctgccacttgaacaaaatctgttgccacccaggtgatgttagtgttttaagaaatgtagttgatgtatccaacaagccagaatcagcacagataaaaagtggaatttcttgtttctccagatttttaatacgttaatacgcaggcatctgatttgcatattcattcatggaccactgtttcttgcttgtacctctggctgactaaatttggggacagattcagtcttgccttacacaaaggggatcataaagttagaatctattttctatgtactagtactgtgtactgtatagacagtttgtaaatgttatttctgcaaacaaacaccttcttattatatatataatatatatatatatcagtttgatcacactattttagagtcttaatgccaagtcagcagatttgctttatgaattacagggactagaaatgcccacattcaggaaatttgtaataacattgtctagacacctatcctcattctagtagaaagtgtgtacatactgtaaatatgtgtgattgcttgacttgaaaaggtttgaattctgaatgttataccatccttgtaagtaagtttgtaatttccaccataaattatggtaaatataaaactccagaggttgttctactccatacagttcacactgattgtgacacattcttagtagctagtgtctgttctagtcactgcactggagtctacgagccggaactcgctatatgcacgtgtgtgtgtccgtatgtaagaaagtgtgcaccgagtgactgaatggttgagatgaattggaatgctgaagactaacgaagaaactagagactgatatcgagcattctgcccacctcgctctgtatttaattaattgtgctatatgttgctttaacaacccattgagcagtcagggaatgtgagtaagcttgctgccaaaggtaactaggaaagcattcatctgctgcctccttgtttttgctcctagagagtgaaaatacaggcaattttactgtgagtgtttcactggaaatgtacaatctttgtgtgttagagtatttgttttagtaagaaatgtttacacagcttgtggaattatttcgtgggaaaataaatttttataacttctcccacttcaatttctaaccttgcctattgttcctgttgtttgtttacctcccagttacctaccattcctccccaccaccgactccagcaggttcactgtctgtcagaacccagaagtgcttcttataaccaaagtttctgttcttcagaagaaatcagggcaaaatggggtgacttgaagtgaataaaatgttaagaatattatcctacataagacatgtacacagaaggggaaccttgaagacattatctccatgcctcaattacactgctgtaagaagcttacaatgtcatcatgtttaaggctaagaccttttccgtgtctcaagtgtatattttgtccagttataactggatggtaagacagtattaagagtgcaagtacctggcacttgaagtttgtcccaggaaaatgcctgtgtataattacctaacttcagatctgcacattaacttatttaacaaaataaatcagccgggcgcagtggctcatgcctgtaatcccagcaatttgggaggctgaggagggtggatcacctgaggtcaggagttcaagaccagcctggccaacgtggcgaaaccccgtctctactaaaaagataaaaaattagccaggtgtggtggtgcacacctgtaatcccagctacttgggag

SEQ ID NO: 8109 - protein, 582 aa, Homo sapiens; identical to SEQ ID NO: 8107

SEQ ID NO: 8110 - DNA, 4019 bp, Homo sapiens
acactaactaagactacacaccccaagccagcaagaaaaaggaaagcagttgctatgctgttcagcaaagcaagacttggctgccttttagctagtcctgaattcttgctcctgtgaagaaaattcctgctggagtgctgggcgcacttggaattggtctagcatgcttgacagacgccttatagctcctcaaactaaatacattattcctgggggttcggcagactcctacactagccgtccatccgattccgatgtatctctggaggaggaccgggaggcagtgcgcagagaagcggagcggcaggcccaggcacagttggaaaaagcaaagacaaagcccgttgcatttgcggttcggacaaatgtcagctacagtgcggcccatgaagatgatgttccagtgcctggcatggccatctcattcgaagcaaaagattttctgcatgttaaggaaaaatttaacaatgactggtggatagggcgattggtaaaagaaggctgtgaaatcggattcattccaagcccagtcaaactagaaaacatgaggctgcagcatgaacagagagccaagcaagggaaattctactccagtaaatcaggaggaaattcatcatccagtttgggtgacatagtacctagttccagaaaatcaacacctccatcatctgctatagacatagatgctactggcttagatgcagaagaaaatgatattccagcaaaccaccgctcccctaaacccagtgcaaacagtgtaacgtcaccccactccaaagagaaaagaatgcccttctttaagaagacagagcacactcctccgtatgatgtggtaccttccatgcgaccagtggtcctagtgggcccttctctgaagggctacgaggtcacagatatgatgcaaaaagcgctgtttgattttttaaaacacagatttgaagggcggatatccatcacaagggtcaccgctgacatctcgcttgccaaacgctcggtattaaacaatcccagtaagcacgcaataatagaaagatccaacacaaggtcaagcttagcggaagttcagagtgaaatcgaaaggatttttgaacttgcaagaacattgcagttggtggtccttgacgcggatacaattaatcatccagctcaactcagtaaaacctccttggcccctattatagtatatgtaaagatttcttctcctaaggttttacaaaggttaataaaatctcgagggaaatctcaagctaaacacctcaacgtccagatggtagcagctgataaactggctcagtgtcctccagagctgttcgatgtgatcttggatgagaaccagcttgaggatgcctgtgagcaccttgccgactatctggaggcctactggaaggccacccatcctcccagcagtagcctccccaaccctctccttagccgtacattagccacttcaagtctgcctcttagccccaccctagcctctaattcacagggttctcaaggtgatcagaggactgatcgctccgctcctatccgttctgcttcccaagctgaagaagaacctagtgtggaaccagtcaagaaatcccagcaccgctcttcctcctcagccccacaccacaaccatcgcagtgggacaagtcgcggcctctccaggcaagagacatttgactcggaaacccaggagagtcgagactctgcctacgtagagccaaaggaagattattcccatgaccacgtggaccactatgcctcacaccgtgaccacaaccacagagacgagacccacgggagcagtgaccacagacacagggagtcccggcaccgttcccgggacgtggatcgagagcaggaccacaacgagtgcaacaagcagcgcagccgtcataaatccaaggatcgctactgtgaaaaggatggagaagtgatatcaaaaaaacggaatgaggctggggagtggaacagggatgtttacatccgccaatgagttttgcccgtttgtgtttttttttttttttttttgaagtcttgtataactaacagcatccccaaaacaaagtctttggggtctacactgcaatcatatgtgatctgtcttgtaatattttgtattattgctgttgcttgaatagcaatagcatggatagagtattgagatactttttcttttgtaagtgctacataaattggcctggtatggctgcagtcctccggttgcatactggactcttcaaaaactgttttgggtagctgccacttgaacaaaatctgttgccacccaggtgatgttagtgttttaagaaatgtagttgatgtatccaacaagccagaatcagcacagataaaaagtggaatttcttgtttctccagatttttaatacgttaatacgcaggcatctgatttgcatattcattcatggaccactgtttcttgcttgtacctctggctgactaaatttggggacagattcagtcttgccttacacaaaggggatcataaagttagaatctattttctatgtactagtactgtgtactgtatagacagtttgtaaatgttatttctgcaaacaaacaccttcttattatatatataatatatatatatatcagtttgatcacactattttagagtcttaatgccaagtcagcagatttgctttatgaattacagggactagaaatgcccacattcaggaaatttgtaataacattgtctagacacctatcctcattctagtagaaagtgtgtacatactgtaaatatgtgtgattgcttgacttgaaaaggtttgaattctgaatgttataccatccttgtaagtaagtttgtaatttccaccataaattatggtaaatataaaactccagaggttgttctactccatacagttcacactgattgtgacacattcttagtagctagtgtctgttctagtcactgcactggagtctacgagccggaactcgctatatgcacgtgtgtgtgtccgtatgtaagaaagtgtgcaccgagtgactgaatggttgagatgaattggaatgctgaagactaacgaagaaactagagactgatatcgagcattctgcccacctcgctctgtatttaattaattgtgctatatgttgctttaacaacccattgagcagtcagggaatgtgagtaagcttgctgccaaaggtaactaggaaagcattcatctgctgcctccttgtttttgctcctagagagtgaaaatacaggcaattttactgtgagtgtttcactggaaatgtacaatctttgtgtgttagagtatttgttttagtaagaaatgtttacacagcttgtggaattatttcgtgggaaaataaatttttataacttctcccacttcaatttctaaccttgcctattgttcctgttgtttgtttacctcccagttacctaccattcctccccaccaccgactccagcaggttcactgtctgtcagaacccagaagtgcttcttataaccaaagtttctgttcttcagaagaaatcagggcaaaatggggtgacttgaagtgaataaaatgttaagaatattatcctacataagacatgtacacagaaggggaaccttgaagacattatctccatgcctcaattacactgctgtaagaagcttacaatgtcatcatgtttaaggctaagaccttttccgtgtctcaagtgtatattttgtccagttataactggatggtaagacagtattaagagtgcaagtacctggcacttgaagtttgtcccaggaaaatgcctgtgtataattacctaacttcagatctgcacattaacttatttaacaaaataaatcagccgggcgcagtggctcatgcctgtaatcccagcaatttgggaggctgaggagggtggatcacctgaggtcaggagttcaagaccagcctggccaacgtggcgaaaccccgtctctactaaaaagataaaaaattagccaggtgtggtggtgcacacctgtaatcccagctacttgggag

SEQ ID NO: 8111 - protein, 606 aa, Homo sapiens; identical to SEQ ID NO: 8105

SEQ ID NO: 8112 - DNA, 3229 bp, Homo sapiens
atgaaggccacctggatcaggcttctgaaaagagccaagggaggaaggctgaagaattctgatatctgtggttcggcagactcctacactagccgtccatccgattccgatgtatctctggaggaggaccgggaggcagtgcgcagagaagcggagcggcaggcccaggcacagttggaaaaagcaaagacaaagcccgttgcatttgcggttcggacaaatgtcagctacagtgcggcccatgaagatgatgttccagtgcctggcatggccatctcattcgaagcaaaagattttctgcatgttaaggaaaaatttaacaatgactggtggatagggcgattggtaaaagaaggctgtgaaatcggattcattccaagcccagtcaaactagaaaacatgaggctgcagcatgaacagagagccaagcaagggaaattctactccagtaaatcaggaggaaattcatcatccagtttgggtgacatagtacctagttccagaaaatcaacacctccatcatctgctatagacatagatgctactggcttagatgcagaagaaaatgatattccagcaaaccaccgctcccctaaacccagtgcaaacagtgtaacgtcaccccactccaaagagaaaagaatgcccttctttaagaagacagagcacactcctccgtatgatgtggtaccttccatgcgaccagtggtcctagtgggcccttctctgaagggctacgaggtcacagatatgatgcaaaaagcgctgtttgattttttaaaacacagatttgaagggcggatatccatcacaagggtcaccgctgacatctcgcttgccaaacgctcggtattaaacaatcccagtaagcacgcaataatagaaagatccaacacaaggtcaagcttagcggaagttcagagtgaaatcgaaaggatttttgaacttgcaagaacattgcagttggtggtccttgacgcggatacaattaatcatccagctcaactcagtaaaacctccttggcccctattatagtatatgtaaagatttcttctcctaaggttttacaaaggttaataaaatctcgagggaaatctcaagctaaacacctcaacgtccagatggtagcagctgataaactggctcagtgtcctccagagctgttcgatgtgatcttggatgagaaccagcttgaggatgcctgtgagcaccttgccgactatctggaggcctactggaaggccacccatcctcccagcagtagcctccccaaccctctccttagccgtacattagccacttcaagtctgcctcttagccccaccctagcctctaattcacagggttctcaaggtgatcagaggactgatcgctccgctcctatccgttctgcttcccaagctgaagaagaacctagtgtggaaccagtcaagaaatcccagcaccgctcttcctcctcagccccacaccacaaccatcgcagtgggacaagtcgcggcctctccaggcaagagacatttgactcggaaacccaggagagtcgagactctgcctacgtagagccaaaggaagattattcccatgaccacgtggaccactatgcctcacaccgtgaccacaaccacagagacgagacccacgggagcagtgaccacagacacagggagtcccggcaccgttcccgggacgtggatcgagagcaggaccacaacgagtgcaacaagcagcgcagccgtcataaatccaaggatcgctactgtgaaaaggatggagaagtgatatcaaaaaaacggaatgaggctggggagtggaacagggatgtttacatccgccaatgagttttgcccgtttgtgtttttttttttttttttttgaagtcttgtataactaacagcatccccaaaacaaagtctttggggtctacactgcaatcatatgtgatctgtcttgtaatattttgtattattgctgttgcttgaatagcaatagcatggatagagtattgagatactttttcttttgtaagtgctacataaattggcctggtatggctgcagtcctccggttgcatactggactcttcaaaaactgttttgggtagctgccacttgaacaaaatctgttgccacccaggtgatgttagtgttttaagaaatgtagttgatgtatccaacaagccagaatcagcacagataaaaagtggaatttcttgtttctccagatttttaatacgttaatacgcaggcatctgatttgcatattcattcatggaccactgtttcttgcttgtacctctggctgactaaatttggggacagattcagtcttgccttacacaaaggggatcataaagttagaatctattttctatgtactagtactgtgtactgtatagacagtttgtaaatgttatttctgcaaacaaacaccttcttattatatatataatatatatatatatcagtttgatcacactattttagagtcttaatgccaagtcagcagatttgctttatgaattacagggactagaaatgcccacattcaggaaatttgtaataacattgtctagacacctatcctcattctagtagaaagtgtgtacatactgtaaatatgtgtgattgcttgacttgaaaaggtttgaattctgaatgttataccatccttgtaagtaagtttgtaatttccaccataaattatggtaaatataaaactccagaggttgttctactccatacagttcacactgattgtgacacattcttagtagctagtgtctgttctagtcactgcactggagtctacgagccggaactcgctatatgcacgtgtgtgtgtccgtatgtaagaaagtgtgcaccgagtgactgaatggttgagatgaattggaatgctgaagactaacgaagaaactagagactgatatcgagcattctgcccacctcgctctgtatttaattaattgtgctatatgttgctttaacaacccattgagcagtcagggaatgtgagtaagcttgctgccaaaggtaactaggaaagcattcatctgctgcctccttgtttttgctcctagagagtgaaaatacaggcaattttactgtgagtgtttcactggaaatgtacaatctttgtgtgttagagtatttgttttagtaagaaatgtttacacagcttgtggaattatttcgtgggaaaataaatttttataacttctcccacttc

SEQ ID NO: 8113 - protein, 612 aa, Homo sapiens; identical to SEQ ID NO: 1144

SEQ ID NO: 8114 - DNA, 3874 bp, Homo sapiens
atgaaggccacctggatcaggcttctgaaaagagccaagggaggaaggctgaagaattctgatatctgtggttcggcagactcctacactagccgtccatccgattccgatgtatctctggaggaggaccgggaggcagtgcgcagagaagcggagcggcaggcccaggcacagttggaaaaagcaaagacaaagcccgttgcatttgcggttcggacaaatgtcagctacagtgcggcccatgaagatgatgttccagtgcctggcatggccatctcattcgaagcaaaagattttctgcatgttaaggaaaaatttaacaatgactggtggatagggcgattggtaaaagaaggctgtgaaatcggattcattccaagcccagtcaaactagaaaacatgaggctgcagcatgaacagagagccaagcaagggaaattctactccagtaaatcaggaggaaattcatcatccagtttgggtgacatagtacctagttccagaaaatcaacacctccatcatctgctatagacatagatgctactggcttagatgcagaagaaaatgatattccagcaaaccaccgctcccctaaacccagtgcaaacagtgtaacgtcaccccactccaaagagaaaagaatgcccttctttaagaagacagagcacactcctccgtatgatgtggtaccttccatgcgaccagtggtcctagtgggcccttctctgaagggctacgaggtcacagatatgatgcaaaaagcgctgtttgattttttaaaacacagatttgaagggcggatatccatcacaagggtcaccgctgacatctcgcttgccaaacgctcggtattaaacaatcccagtaagcacgcaataatagaaagatccaacacaaggtcaagcttagcggaagttcagagtgaaatcgaaaggatttttgaacttgcaagaacattgcagttggtggtccttgacgcggatacaattaatcatccagctcaactcagtaaaacctccttggcccctattatagtatatgtaaagatttcttctcctaaggttttacaaaggttaataaaatctcgagggaaatctcaagctaaacacctcaacgtccagatggtagcagctgataaactggctcagtgtcctccagagctgttcgatgtgatcttggatgagaaccagcttgaggatgcctgtgagcaccttgccgactatctggaggcctactggaaggccacccatcctcccagcagtagcctccccaaccctctccttagccgtacattagccacttcaagtctgcctcttagccccaccctagcctctaattcacagggttctcaaggtgatcagaggactgatcgctccgctcctatccgttctgcttcccaagctgaagaagaacctagtgtggaaccagtcaagaaatcccagcaccgctcttcctcctcagccccacaccacaaccatcgcagtgggacaagtcgcggcctctccaggcaagagacatttgactcggaaacccaggagagtcgagactctgcctacgtagagccaaaggaagattattcccatgaccacgtggaccactatgcctcacaccgtgaccacaaccacagagacgagacccacgggagcagtgaccacagacacagggagtcccggcaccgttcccgggacgtggatcgagagcaggaccacaacgagtgcaacaagcagcgcagccgtcataaatccaaggatcgctactgtgaaaaggatggagaagtgatatcaaaaaaacggaatgaggctggggagtggaacagggatgtttacatccgccaatgagttttgcccgtttgtgtttttttttttttttttttgaagtcttgtataactaacagcatccccaaaacaaagtctttggggtctacactgcaatcatatgtgatctgtcttgtaatattttgtattattgctgttgcttgaatagcaatagcatggatagagtattgagatactttttcttttgtaagtgctacataaattggcctggtatggctgcagtcctccggttgcatactggactcttcaaaaactgttttgggtagctgccacttgaacaaaatctgttgccacccaggtgatgttagtgttttaagaaatgtagttgatgtatccaacaagccagaatcagcacagataaaaagtggaatttcttgtttctccagatttttaatacgttaatacgcaggcatctgatttgcatattcattcatggaccactgtttcttgcttgtacctctggctgactaaatttggggacagattcagtcttgccttacacaaaggggatcataaagttagaatctattttctatgtactagtactgtgtactgtatagacagtttgtaaatgttatttctgcaaacaaacaccttcttattatatatataatatatatatatatcagtttgatcacactattttagagtcttaatgccaagtcagcagatttgctttatgaattacagggactagaaatgcccacattcaggaaatttgtaataacattgtctagacacctatcctcattctagtagaaagtgtgtacatactgtaaatatgtgtgattgcttgacttgaaaaggtttgaattctgaatgttataccatccttgtaagtaagtttgtaatttccaccataaattatggtaaatataaaactccagaggttgttctactccatacagttcacactgattgtgacacattcttagtagctagtgtctgttctagtcactgcactggagtctacgagccggaactcgctatatgcacgtgtgtgtgtccgtatgtaagaaagtgtgcaccgagtgactgaatggttgagatgaattggaatgctgaagactaacgaagaaactagagactgatatcgagcattctgcccacctcgctctgtatttaattaattgtgctatatgttgctttaacaacccattgagcagtcagggaatgtgagtaagcttgctgccaaaggtaactaggaaagcattcatctgctgcctccttgtttttgctcctagagagtgaaaatacaggcaattttactgtgagtgtttcactggaaatgtacaatctttgtgtgttagagtatttgttttagtaagaaatgtttacacagcttgtggaattatttcgtgggaaaataaatttttataacttctcccacttcaatttctaaccttgcctattgttcctgttgtttgtttacctcccagttacctaccattcctccccaccaccgactccagcaggttcactgtctgtcagaacccagaagtgcttcttataaccaaagtttctgttcttcagaagaaatcagggcaaaatggggtgacttgaagtgaataaaatgttaagaatattatcctacataagacatgtacacagaaggggaaccttgaagacattatctccatgcctcaattacactgctgtaagaagcttacaatgtcatcatgtttaaggctaagaccttttccgtgtctcaagtgtatattttgtccagttataactggatggtaagacagtattaagagtgcaagtacctggcacttgaagtttgtcccaggaaaatgcctgtgtataattacctaacttcagatctgcacattaacttatttaacaaaataaatcagccgggcgcagtggctcatgcctgtaatcccagcaatttgggaggctgaggagggtggatcacctgaggtcaggagttcaagaccagcctggccaacgtggcgaaaccccgtctctactaaaaagataaaaaattagccaggtgtggtggtgcacacctgtaatcccagctacttgggag

SEQ ID NO: 8115 - protein, 612 aa, Homo sapiens; identical to SEQ ID NO: 1144

SEQ ID NO: 8116 - DNA, 1381 bp, Homo sapiens
agaagacatgttgcgtctggctaataaggactctataggtttttttattgcaaaatttgtaaaatgcaaaagcacataggagagggatggatgctcagaaatgaaaattccaaacatttgctgtctgtggtttttttttttttaaccaaagtgttgtcaggccaactgaatgatgatgtggttgctatggaaacagaaaaggctgccagctgttttaccagggatccagagacatagaggaagtagggggtggtatgagattatattttctgtttttaaaagattttttttttttatgtatttagtagagtataaagaaaagcagatgcctatagatgtctggagcatattttcatttgtgatctaatgttttaatttgtaaagtgtacaagtcatttttaatgttaaaaattagtgaatctaacaaaaggaataaattagcaatatttgatgtggttatgaaaagttgtttttgtttctaggttcctagtttcttaaggattcagggcatgggaagtaaaacattgactatgtgccaataatggaggttgtcaccaggctggagtgcattggtacagtcacggttcactgcagcctccacctcctgggctcaagggatcctcctatctcagcctcccaagtagctgggtctacagaacagaaactttggttataagaagcacttctgggttctgacagacagtgaacctgctggagtcggtggtggggaggaatggttcttcttcagcttgggaagcagaacggataggagcggagcgatcagtcctctgatcaccttgagaaccctggcagcgaaaggagcacaccaggcgttaaccaagactatggaaatgatgtcagacaaaaagcgaatttgagtgactttcttattcgagttcaaaatgggtcgtaaagcagtggagacaacttgcaatatcaacaatgcatttggcccaggaactgctaatgaacgtacagtgcggtggtggttcacgaagctttgcaaaggagacgagggacttgaagatgaggagcatagtggctgaccattggaagttgacagcgactactcaagaacaataatcaaagctgattctcttacaactacacgagaagttgctgaagaattcaacattgaccattctatggtctttctacatttgaagcaaatcggaaaggtgaaaaaactcaataagtaggtgcctcatgagccaagcaaaaataaattgttgtttggaagcatcttctcttattctgtgcaacaacaatgaaccatttctcagtcggattgtgacgtgggacgaaaattggattttatatgacaaccactgacaaccagctcagctgttggactgagaagctccaaagccaaacttgcacc

SEQ ID NO: 8117 - protein, 44 aa, Homo sapiens
MEVVTRLECIGTVTVHCSLHLLGSRDPPISASQVAGSTEQKLWL

SEQ ID NO: 8118 - DNA, 415 bp, Homo sapiens
aaatattctctgtatgtggtccagcgtggcagcagctaatgggctactgagcacttgaacaggcgtgtaaatttttaaaatttaataaataggcagaagctactattactaggcagcataggtctataaagcatagtacatagctttcacttcccactgcagtcgtggaggttgaattccatgagacttttatgctagcaaatgtggatttacaattaccttttaattcctcttaggccgttggattcttgccagaagcttcctggagataattttaactagtaccttattgaagaaaagttgtcctagctaatgaaagaatgcagctcagcatcttgaagacggggcaagccttcctcatctccccacatcccacagtttcttatacccactgaattaaactgaaaaatgaaca

SEQ ID NO: 8119 - DNA, 652 bp, Homo sapiens
ttaggaatttctcataactatttattgtatccataaggattgcaaggtctcttggatcaggttgtcaccaggctggagtgcattggtacagtcacggttcactgcagcctccacctcctgggctcaagggatcctcctatctcagcctcccaagtagctgggtctacaggtatactctaccaccccagcttaatcatttttaatattgcgttttcttgggggtaagggaaataaggagttaaatgtaaaacagttttacttataaaaggctaagaatatttggtaagaacttggaataatcaaggaagcaaaacaaagtagattttataattttgctggatagttttttttgttttttgtttttttttcttttttggagatggagtctcactctgtcacccaggctggagtacagtggtgtgatcttggcttactgcaggctccacctcctgggttcaagcaattctcctgcctcagcctcccaagtagctgggattacaggtgtgcaccaccacacctggctaattttttatctttttagtagagacggggtttcgccacgttggccaggctggtcttgaactcctgacctcaggtgatccaccctcctcagcctcccaaattgctgggattacaggcatgagccactgcg

SEQ ID NO: 8120 - protein, 53 aa, Homo sapiens
MESHSVTQAGVQWCDLGLLQAPPPGFKQFSCLSLPSSWDYRCAPPHLANFLSF

SEQ ID NO: 8121 - DNA, 812 bp, Homo sapiens
tgtggtggtctgtttttgtgaaacaaagttaacttttgctactttgatgtttaaactactgacagcaatctccatagcagcgttcattacaatagccaaaaggcggttcagctgctgaagccagagggtgtgctggtttatagcacgtgcactataacactggccgaaaatgaagaacaggttgcctgggccctgacaaaatttccttgccttcagcttcagccccaggaaccgcagattggaggagaaggaatgaggggagctgggctctcatgtgaacagttgaaacagctgcagcgatttgatccatcggctgtgccattaccggacactgacatggactctcttagagaggccagaagagaagacatgttgcgtctggctaataaggactctataggtttttttattgcaaaatttgtaaaatgcaaaagcacataggagagggatggatgctcagaaatgaaaattccaaacatttgctgtctgtggtttttttttttttaaccaaagtgttgtcaggccaactgaatgatgatgtggttgctatggaaacagaaaaggctgccagctgttttaccagggatccagagacatagaggaagtagggggtggtatgagattatattttctgtttttaaaagattttttttttttatgtatttagtagagtataaagaaaagcagatgcctatagatgtctggagcatattttcatttgtgatctaatgttttaatttgtaaagtgtacaagtcatttttaatgttaaaaattagtgaatctaacaaaaggaataaattagcaatatttg

SEQ ID NO: 8122 - protein, 65 aa, Homo sapiens [sequence omitted]

SEQ ID NO: 8123 - DNA, 2759 bp, Homo sapiens
caactatgatacaagtagcagttagccttataactaactgtaaacactgtctgtgggttttaagttttacctgagcattggatattaacagaccattagcccaactttcaaaaatatgaaccctatgaacttcacaactgaagtcagatctgtatgcctgagagaggtaaaatcatgtcatgaaatcaaacggtggctgatgcgcccaaattctggcctcatcctctaactggaggacatctggcaggacagcaactgggctgtgccttttttcagtccagcaacatcttccactcaacccacgccatttggctgtttccccattgcccctggcacctagccctccggtaccgggaactaaatatctttgaccatcccgcccgcggggtctgcctacttaacctgaggcaggtgaaagagcctcacgcagggttaggaacctccgggggcgtggcgtagcgtaacgcagtgttggggaaacttgcggctgtggattgggggaccggaaagggaggggtgggccgcaggcgccggacgtgacgtaagccggaagcgactttccgccgagaaatagggggcgcgtgtttggaaattgatagaaaagataaagggaccgagctgctgtcagcctggcttactgatctgcgtccgtttcaccacggattcagttactaagcatttttttctttttttggttctttgcaacgtgagtggcattggctcagtgatttccatgagcatctctaccagaaaacattgcctcgatgaggtgtggtggaagcccggcagccccttctaatcggctaggcttgagaaagcgtgtacctctgcatttccgaaattaactcagcgtgatcggcaagattttcctcagcatctggtgtcaagacactcgtcactattaattcggaaagaaaaaaaaaaacaaaacaccgttttccagcatttctcttggtggagaactaaacaacaggaaaaatgtctattttccctaagatatctttgagacctgaggttgaaaactatcttaaggaaggctttatgaataaggagattgtgactgctttaggtaaacaagaagcagaaaggaagtttgaaactttgttaaagcacctgtcacatcctccatcatttacaactgtcagagtgaatacacatttagcctcagtacaacatgtgaaaaatctgttacttgatgaacttcagaagcagtttaatggattaagtgttcctattcttcaacatccagaccttcaagatgtgttacttattcctgttattggacccagaaagaatattaaaaaacaacagtgtgaagccattgttggagcccagtgtggcaatgcagttttaagaggagcccatgtctatgccccaggaattgtgtcagcatcacaatttatgaaagctggagatgttatttctgtatactctgatattaaaggaaaatgtaagaaaggagccaaagaatttgatggaacaaaagtatttcttggaaatgggatttctgaactaagccgcaaagaaatcttcagtggattacctgaactgaaaggcatgggcataagaatgacagaaccagtatatctcagcccttcatttgacagtgtactgccccgttacttatttttacaaaatttgccatctgccttagtaagtcatgtactaaatcctcaacctggagagaagattctagacttgtgtgcagcacctggagggaaaacaacacacattgcagcactaatgcatgatcagggagaagttatagcactggataaaatcttcaacaaagtagaaaaaatcaaacagaatgccttattgttagggctgaattccatcagggcattttgttttgatggaacaaaggcggttaaacttgatatggtggaggacacagaaggagaacctccatttctaccagaatcctttgaccgaattcttctggatgcaccctgtagtggaatgggacagagaccaaacatggcctgtacttggtctgtgaaggaagtggcatcatatcagccattacagcgaaaactcttcactgcagcggttcagctgctgaagccagagggtgtgctggtttatagcacgtgcactataacactggccgaaaatgaagaacaggttgcctgggccctgacaaaatttccttgccttcagcttcagccccaggaaccgcagattggaggagaaggaatgaggggagctgggctctcatgtgaacagttgaaacagctgcagcgatttgatccatcggctgtgccattaccggacactgacatggactctcttagagaggccagaagagaagacatgttgcgtctggctaataaggactctataggtttttttattgcaaaatttgtaaaatgcaaaagcacataggagagggatggatgctcagaaatgaaaattccaaacatttgctgtctgtggtttttttttttttaaccaaagtgttgtcaggccaactgaatgatgatgtggttgctatggaaacagaaaaggctgccagctgttttaccagggatccagagacatagaggaagtagggggtggtatgagattatattttctgtttttaaaagattttttttttttatgtatttagtagagtataaagaaaagcagatgcctatagatgtctggagcatattttcatttgtgatctaatgttttaatttgtaaagtgtacaagtcatttttaatgttaaaaattagtgaatctaacaaaaggaataaattagcaatatttg

SEQ ID NO: 8124 - protein, 469 aa, Homo sapiens; identical to SEQ ID NO: 1158

SEQ ID NO: 8125 - DNA, 2876 bp, Homo sapiens
ggtgggaaggatacgagcaagataaagcagcgagggatttaagtctggcaacagttggactgctggattttcagagaagtgttccccaaagcaaattatagtgctaatttccaatgttccataagcgtggcaagaaaaatgggaagttctcggtaaggtatatagtattatttctagaaataaagatgaaccaatccaagattgattttttgtttgtttaatcctggcagtattcttaactaaattgtattcattcttccctttactttccagactttttaattttatttatttttttattttttgagacagagtcttgcccaggctggagtgcagtgccacaatcttggctcactgcaacctctgcctccctggttcaagcgtttctcctgcctcaccctcccaagtagctgggactacaggcacgtgccatcacgccaggctaatttttgcatttttagtacagatggggttttacatattgatcaggctggtcttggactcctgacttggtgatccacccgcctcagcctcccaaagtgttgggattacaggctgagctgagatagcaccactgcactccagcctgagcgacagaatgagactccatctcaaacaaacaaaaaagtctaaatgtcctcaattctgtccgtgtgtggcactagtgaagtaatttctggcaaatgctttatcagcattttctttccatagtttatagagatgttcatccatcttttcatttagtcattcagtaagtatttgagtgcccattatggattaggcttgggtacatagtggtgtgataaagtctctatccttgtggagtttaaaatgtagttcaacttgtttctcctcctttatcgctaaaatacagattctagccatcagtggtgctatggtcaccatgaaattcaggctacagaaattcctttggaaatgtctgatttagacatttatcactttcagatgttttagccatgaaagaatctcatggatttattgaagaaatatgctatggtcaaggacaaggtattggctctagaagccaaattactagtctttatcctggctttttatttgtgagaacatggagagttgtttcaaccctaggaaccttgatttactctttaaaacagagaaaatgggctgggcgtggtggctcacgcctgtaatcccagcactttgggaggctagagagtcagatcagttgaagtcaggagtttgagaccagcctggccagcatggtgaaaccccgtctctattaaaattacaaagattagctgggcctggtggcacatgcctgtaattttagctactcgggaggccaaggcaggagaatctcttgaaccaggaggtggaggttgcagtgagtcgagatcccaccattccactccagtctgggcgacagagactcaaaaaaaaaaaaaaaaaaagagcagagaaaatgataaacaacttgcaggttgttgtgtggtataatggtcattcattattttctactctttctggtaaagagttggtgtgtcatggaaagtacctgttctatgtgtgtgtgtctgtgtgtataattcggtgtgaaaattaaagagaaaaaaacaataaaaaaccctttcctatacttatgtgtaaattaccatggtgtgctgcaaaaaacatatgtcaaggtgatagaattattttgactttcctgtacagttataaaatgactcagtgagtttggttagatatcctcgttctttgaatctatatccttgtctgcttatgatgaaaaaaaagaaaaaaaaataatggcgagggtcttccaaactctaaagaatatgtcaactatgatacaagtagcagttagccttataactaactgtaaacactgtctgtgggttttaagttttacctgagcattggatattaacagaccattagcccaactttcaaaaatatgaaccctatgaacttcacaactgaagtcagatctgtatgcctgagagaggtaaaatcatgtcatgaaatcaaacggtggctgatgcgcccaaattctggcctcatcctctaactggaggacatctggcaggacagcaactgggctgtgccttttttcagtccagcaacatcttccactcaacccacgccatttggctgtttccccattgcccctggcacctagccctccggtaccgggaactaaatatctttgaccatcccgcccgcggggtctgcctacttaacctgaggcaggtgaaagagcctcacgcagggttaggaacctccgggggcgtggcgtagcgtaacgcagtgttggggaaacttgcggctgtggattgggggaccggaaagggaggggtgggccgcaggcgccggacgtgacgtaagccggaagcgactttccgccgagaaatagggggcgcgtgtttggaaattgatagaaaagataaagggaccgagctgctgtcagcctggcttactgatctgcgtccgtttcaccacggattcagttactaagcatttttttctttttttggttctttgcaacgtgagtggcattggctcagtgatttccatgagcatctctaccagaaaacattgcctcgatgaggtgtggtggaagcccggcagccccttctaatcggctaggcttgagaaagcgtgtacctctgcatttccgaaattaactcagcgtgatcggcaagattttcctcagcatctggtgtcaagacactcgtcactattaattcggaaagaaaaaaaaaaacaaaacaccgttttccagcatttctcttggtggagaactaaacaacaggaaaaatgtctattttccctaagatatctttgagacctgaggttgaaaactatcttaaggaaggctttatgaataaggaggt

SEQ ID NO: 8126 - protein, 64 aa, Homo sapiens [sequence omitted]

SEQ ID NO: 8127 - DNA, 531 bp, Homo sapiens
gccttcgacgtggcgttttcttcggtttcacttccggtgggaaggatacgagcaagataaagcagcgagggatttaagtctggcaacagttggactgctggattttcagagaagtgttccccaaagcaaattatagtgctaatttccaatgttccataagcgtggcaagaaaaatgggaagttctcgtggcattggctcagtgatttccatgagcatctctaccagaaaacattgcctcgatgaggtgtggtggaagcccggcagccccttctaatcggctaggcttgagaaagcgtgtacctctgcatttccgaaattaactcagcgtgatcggcaagattttcctcagcatctggtgtcaagacactcgtcactattaattcggaaagaaaaaaaaaaacaaaacaccgttttccagcatttctcttggtggagaactaaacaacaggaaaaatgtctattttccctaagatatctttgagacctgaggttgaaaactatcttaaggaaggctttatgaataaggaggt

SEQ ID NO: 8128 - protein, 33 aa, Homo sapiens
MGSSRGIGSVISMSISTRKHCLDEVWWKPGSPF

SEQ ID NO: 8129 - DNA, 689 bp, Homo sapiens
ggcgttttcttcggtttcacttccggtaggagagtcccaaacggccagcggctgggaatttgcggtgggaaggatacgagcaagataaagcagcgagggatttaagtctggcaacagttggactgctggattttcagagaagtgttccccaaagcaaattatagtgctaatttccaatgttccataagcgtggcaagaaaaatgggaagttctcggtaaggtatatagtattatttctagaaataaagatgaaccaatccaagattgattttttgtttgtttaatcctggcagtattcttaactaaattgtattcattcttccctttactttccagactttttaattttatttatttttttattttttgagacagagtcttgcccaggctggagtgcagtgccacaatcttggctcactgcaacctctgcctccctggttcaagcgtttctcctgcctcaccctcccaagtagctgggactacaggcacgtgccatcacgccaggctaatttttgcatttttagtacagatggggttttacatattgatcaggctggtcttggactcctgacttggtgatccacccgcctcagcctcccaaagtgttgggattacaggcatgagccactgcgccaggccactttccagatactatagtccctaatttattgtgtctcaaatgccaaata

SEQ ID NO: 8130 - protein, 35 aa, Homo sapiens
MFHKRGKKNGKFSVRYIVLFLEIKMNQSKIDFLFV

SEQ ID NO: 8131 - DNA, 886 bp, Homo sapiens
acttccggtaggagagtcccaaacggccagcggctgggaatttgcggttctagcattgaaaagaaaagcttcacagcctggcatgaaacgaaactgaatgtccttgaaaccagttgacggaggagcaagcttaaaatttttttagactctgacttcagtcagatggttggattttaaccttggcaacgtggccttttaacatgccaaactcttgagttaacctgtacaaggagaatgtatgacttacgtcctcccagtgctatggtttaaagaccctttaagacttagatgcaggataatatgctccaacgttacaacattaaaggtgggaaggatacgagcaagataaagcagcgagggatttaagtctggcaacagttggactgctggattttcagagaagtgttccccaaagcaaattatagtgctaatttccaatgttccataagcgtggcaagaaaaatgggaagttctcggtaaggtatatagtattatttctagaaataaagatgaaccaatccaagattgattttttgtttgtttaatcctggcagtattcttaactaaattgtattcattcttccctttactttccagactttttaattttatttatttttttattttttgagacagagtcttgcccaggctggagtgcagtgccacaatcttggctcactgcaacctctgcctccctggttcaagcgtttctcctgcctcaccctcccaagtagctgggactacaggcacgtgccatcacgccaggctaatttttgcatttttagtacagatggggttttacatattgatcaggctggtcttggactcctgacttggtgatccacccgcctcagcctcccaaagtgttgggattacaggcatgagc

SEQ ID NO: 8132 - protein, 36 aa, Homo sapiens
MTYVLPVLWFKDPLRLRCRIICSNVTTLKVGRIRAR

SEQ ID NO: 8133 - DNA, 1068 bp, Homo sapiens
aggtgggtacagaccgaggggactacgggtcggcgttgggctcagtgggctcgaaacaaagggctgtccggtggggattcgtcgcggcgccttctgagtggtcgggtcgaggcttctcggcctagcagtgccctcgctgcgcgatctcaggcgggttctcctcggctccgcgcagcccgcgccgcggtgggggacccggcgcagcggcacctgctgccgagggaccccgcggcccgccccggtgctcgtgatggggctgatcttcgccaaactgtggagcctcttctgtaaccaagaacacaaagtaattatagtgggactggataatgcagggaaaaccaccattctttaccaattcttaatgaatgaagtggttcatacttctccaaccataggaagcaatgttgaagaaatagttgtgaagaacactcattttcttatgtgggatattggtggtcaggagtctctgcgatcatcctggaacacatattactcaaatacagagttcatcattcttgttgttgatagcattgacagggaacgactagctattacaaaagaagaattatacagaatgttggctcatgaggatttacggaaggctgcagtccttatctttgcaaataaacaggatatgaaagggtgtatgacagcagctgaaatctcgaaatacctcacccttagttcaattaaggatcatccatggcacattcaatcctgctgtgctctcacaggagaagggttatgccaaggtctagagtggatgacctcccggattggtgtgagataacttttttgcttgaaagagactgctctatttattctgtgacatgaacattttttcctagtacctttggctgctaaggcagcagcatgtttaatttataacaacacaaacctctgagagcaacacttgaatcaagtgcagctgaactggaacataaaagattttttcttaactttttttttttaacacactaatcttcagttggatgaatgtaatgtataactatgttttcagcaacaattcttctgtttattctaattaatcagtgactgccttgtaag

SEQ ID NO: 8134 - protein, 179 aa, Homo sapiens; identical to SEQ ID NO: 1160

SEQ ID NO: 8135 - DNA, 2887 bp, Homo sapiens
aggtgggtacagaccgaggggactacgggtcggcgttgggctcagtgggctcgaaacaaagggctgtccggtggggattcgtcgcggcgccttctgagtggtcgggtcgaggcttctcggcctagcagtgccctcgctgcgcgatctcaggcgggttctcctcggctccgcgcagcccgcgccgcggtgggggacccggcgcagcggcacctgctgccgagggaccccgcggcccgccccggtgctcgtgatggggctgatcttcgccaaactgtggagcctcttctgtaaccaagaacacaaagtaattatagtgggactggataatgcagggaaaaccaccattctttaccaattcttaatgaatgaagtggttcatacttctccaaccataggaagcaatgttgaagaaatagttgtgaagaacactcattttcttatgtgggatattggtggtcaggagtctctgcgatcatcctggaacacatattactcaaatacagagttcatcattcttgttgttgatagcattgacagggaacgactagctattacaaaagaagaattatacagaatgttggctcatgaggatttacggaaggctgcagtccttatctttgcaaataaacaggatatgaaagggtgtatgacagcagctgaaatctcgaaatacctcacccttagttcaattaaggatcatccatggcacattcaatcctgctgtgctctcacaggagaagggttatgccaaggtctagagtggatgacctcccggattggtgtgagataacttttttgcttgaaagagactgctctatttattctgtgacatgaacattttttcctagtacctttggctgctaaggcagcagcatgtttaatttataacaacacaaacctctgagagcaacacttgaatcaagtgcagctgaactggaacataaaagattttttcttaactttttttttttaacacactaatcttcagttggatgaatgtaatgtataactatgttttcagcaacaattcttctgtttattctaattaatcagtgactgccttgtaagaaatgtttgtcatatgcgtgatgtcttctgaaatattcttataaccttaatgaccaattgctttcaattcttgaccagcactccctcccaaccagagaattactggtttgatagagtagtcttggaaaccatcaggtactgcctgcagacttctccagcactaaatatatttgttccctctataaaccattcatctttcggacagaacttactgtaaagaaagaaatctgcctagaggatatatgtaaggaagattccacatcatgagtacttgccttttaactttcccccacattactgttgagtcatggaataatgtttaagttgttatttgcatggaaattaagtaggctgtttatttatctaaaggaatcaagtccactcttctgcctgcaacatttgttcaaaaactaaccaaggtaaaatatttatttgaaagcccaactttgatgttaaatattcttgaataaatctgttattttaagaatatcacattattcaatgcatataaaactatcagaagttagtaaatcataccagcactaaaaataagacaattggaatatattttagcatcagtttacaaacaactttattatcaacagaaattttagctcttttctttgcaagatatatcacagctgctttgggcagtagctgaagccgaagtatgaacagtccattttgtttcttaaaatttgaagtcgtgtctgtcatagcatttttactaccagcagtatgttacttaaaaaactacatggctttccttgaatttatttgacggtattatgtaatagacttgaaacaattgccatctttgtagttatgccttgggttctaaaatgttataggaaactgctgaattgaatcctagcttttagaatattaataggagactcaaagttaatattcttaacaacttaaaattaaaaaaagtcataatctatcaaaagtttatttattggatggcattaaaacatttttgaggcagttgtctaatatgaacaataatctaaacaatatattccttaaattaagaggaaagacaagtgtcgtatttcgatcctgtttattcaaatgtgtgattttgctgaaatgaaagggataaaatgaatacttagagaataatacttcatttttgcagtactttttaattttgataaaaaagatacaaagttcataatatcaaaatatgtgttcaaaattggtattttaattttaatatttttgtaagttgatttaaattttgctcttttttcaggtgtgcttggtttattatatttagtcaagttaatttagtcgaatgtggtaacatttttctgatttatctttagttggagcacacccttgaactgaacagtggccaaaggaaagctttctgggctttggaaagtagttgtttaactttgttttaagccgttttcttagtgattctgtatcaagtagaggataagtgtagtttaacttagtttttaatataacccataatcaagaacatgagcgaaaagcagacataaatcgatatggatggtttgtggtgtgtgtgggatgtgggggaattaagaaaatgccatttacctaagcacagtttgcctgaatttctgcttggttgtgttgtttaccgtaagtactgagggtagtttccctaagtctgtcctgagaaaaagcatacttagtactcctgtatttgttcttatgaaatgactatctgccttcttgtatctagtaagattggctggctcaattttcttctgtcaaattatatggttattttttatattaccacatcagcattatattaaaagtgtttttaatagtt

SEQ ID NO: 8136 - protein, 179 aa, Homo sapiens; identical to SEQ ID NO: 1160

SEQ ID NO: 8137 - DNA, 3586 bp, Homo sapiens
aggtgggtacagaccgaggggactacgggtcggcgttgggctcagtgggctcgaaacaaagggctgtccggtggggattcgtcgcggcgccttctgagtggtcgggtcgaggcttctcggcctagcagtgccctcgctgcgcgatctcaggcgggttctcctcggctccgcgcagcccgcgccgcggtgggggacccggcgcagcggcacctgctgccgagggaccccgcggcccgccccggtgctcgtgatggggctgatcttcgccaaactgtggagcctcttctgtaaccaagaacacaaagtaattatagtgggactggataatgcagggaaaaccaccattctttaccaattcttaatgaatgaagtggttcatacttctccaaccataggaagcaatgttgaagaaatagttgtgaagaacactcattttcttatgtgggatattggtggtcaggagtctctgcgatcatcctggaacacatattactcaaatacagagttcatcattcttgttgttgatagcattgacagggaacgactagctattacaaaagaagaattatacagaatgttggctcatgaggatttacggaaggctgcagtccttatctttgcaaataaacaggatatgaaagggtgtatgacagcagctgaaatctcgaaatacctcacccttagttcaattaaggatcatccatggcacattcaatcctgctgtgctctcacaggagaagggttatgccaaggtctagagtggatgacctcccggattggtgtgagataacttttttgcttgaaagagactgctctatttattctgtgacatgaacattttttcctagtacctttggctgctaaggcagcagcatgtttaatttataacaacacaaacctctgagagcaacacttgaatcaagtgcagctgaactggaacataaaagattttttcttaactttttttttttaacacactaatcttcagttggatgaatgtaatgtataactatgttttcagcaacaattcttctgtttattctaattaatcagtgactgccttgtaagaaatgtttgtcatatgcgtgatgtcttctgaaatattcttataaccttaatgaccaattgctttcaattcttgaccagcactccctcccaaccagagaattactggtttgatagagtagtcttggaaaccatcaggtactgcctgcagacttctccagcactaaatatatttgttccctctataaaccattcatctttcggacagaacttactgtaaagaaagaaatctgcctagaggatatatgtaaggaagattccacatcatgagtacttgccttttaactttcccccacattactgttgagtcatggaataatgtttaagttgttatttgcatggaaattaagtaggctgtttatttatctaaaggaatcaagtccactcttctgcctgcaacatttgttcaaaaactaaccaaggtaaaatatttatttgaaagcccaactttgatgttaaatattcttgaataaatctgttattttaagaatatcacattattcaatgcatataaaactatcagaagttagtaaatcataccagcactaaaaataagacaattggaatatattttagcatcagtttacaaacaactttattatcaacagaaattttagctcttttctttgcaagatatatcacagctgctttgggcagtagctgaagccgaagtatgaacagtccattttgtttcttaaaatttgaagtcgtgtctgtcatagcatttttactaccagcagtatgttacttaaaaaactacatggctttccttgaatttatttgacggtattatgtaatagacttgaaacaattgccatctttgtagttatgccttgggttctaaaatgttataggaaactgctgaattgaatcctagcttttagaatattaataggagactcaaagttaatattcttaacaacttaaaattaaaaaaagtcataatctatcaaaagtttatttattggatggcattaaaacatttttgaggcagttgtctaatatgaacaataatctaaacaatatattccttaaattaagaggaaagacaagtgtcgtatttcgatcctgtttattcaaatgtgtgattttgctgaaatgaaagggataaaatgaatacttagagaataatacttcatttttgcagtactttttaattttgataaaaaagatacaaagttcataatatcaaaatatgtgttcaaaattggtattttaattttaatatttttgtaagttgatttaaattttgctcttttttcaggtgtgcttggtttattatatttagtcaagttaatttagtcgaatgtggtaacatttttctgatttatctttagttggagcacacccttgaactgaacagtggccaaaggaaagctttctgggctttggaaagtagttgtttaactttgttttaagccgttttcttagtgattctgtatcaagtagaggataagtgtagtttaacttagtttttaatataacccataatcaagaacatgagcgaaaagcagacataaatcgatatggatggtttgtggtgtgtgtgggatgtgggggaattaagaaaatgccatttacctaagcacagtttgcctgaatttctgcttggttgtgttgtttaccgtaagtactgagggtagtttccctaagtctgtcctgagaaaaagcatacttagtactcctgtatttgttcttatgaaatgactatctgccttcttgtatctagtaagattggctggctcaattttcttctgtcaaattatatggttattttttatattaccacatcagcattatattaaaagtgtttttaatagttgattgtattttgccaactactagtatagactcaaatttgctatttaatttttaaaatacaatttattttgtaaatcctttaaaaaatatttggttagttttggattagaaatgatttatgttagccatgtgttgaagatgaaattggcatcagtgtagacggtgctgattgggaaaagttcatgattaggaaattcatgtaagactttttaagagtattttttaggttttcactcaatctttcctgtcacagtaacgtgaaaactgattattctttactccaagagaatgttttaacccaagcaagtatctaatactagagcattggttctgacattcattgtaaatcagtgaactgtaagatactgtctaaaaaatgtacatttgtaattagtgcctttattcatattttgaaataagttcttagttttatattatacctgttctttagaagtcatgttagcagctaattatttcagtgatgaaataatttgtgttttatatcccccttcacctccatgtattggttagcacagtttatagtaagtgaaaagcaagggacccacctacattaccttcaggagactgttctaccttttaatttgaaaacaaggaaattaaattttaacagaaatcttttaagtatgttataaccaaagtgttcaattatccttgcaagttcaaatacagcatttttctt

SEQ ID NO: 8138 - protein, 179 aa, Homo sapiens; identical to SEQ ID NO: 1160

SEQ ID NO: 8139 - DNA, 7218 bp, Homo sapiens
aggtgggtacagaccgaggggactacgggtcggcgttgggctcagtgggctcgaaacaaagggctgtccggtggggattcgtcgcggcgccttctgagtggtcgggtcgaggcttctcggcctagcagtgccctcgctgcgcgatctcaggcgggttctcctcggctccgcgcagcccgcgccgcggtgggggacccggcgcagcggcacctgctgccgagggaccccgcggcccgccccggtgctcgtgatggggctgatcttcgccaaactgtggagcctcttctgtaaccaagaacacaaagtaattatagtgggactggataatgcagggaaaaccaccattctttaccaattcttaatgaatgaagtggttcatacttctccaaccataggaagcaatgttgaagaaatagttgtgaagaacactcattttcttatgtgggatattggtggtcaggagtctctgcgatcatcctggaacacatattactcaaatacagagttcatcattcttgttgttgatagcattgacagggaacgactagctattacaaaagaagaattatacagaatgttggctcatgaggatttacggaaggctgcagtccttatctttgcaaataaacaggatatgaaagggtgtatgacagcagctgaaatctcgaaatacctcacccttagttcaattaaggatcatccatggcacattcaatcctgctgtgctctcacaggagaagggttatgccaaggtctagagtggatgacctcccggattggtgtgagataacttttttgcttgaaagagactgctctatttattctgtgacatgaacattttttcctagtacctttggctgctaaggcagcagcatgtttaatttataacaacacaaacctctgagagcaacacttgaatcaagtgcagctgaactggaacataaaagattttttcttaactttttttttttaacacactaatcttcagttggatgaatgtaatgtataactatgttttcagcaacaattcttctgtttattctaattaatcagtgactgccttgtaagaaatgtttgtcatatgcgtgatgtcttctgaaatattcttataaccttaatgaccaattgctttcaattcttgaccagcactccctcccaaccagagaattactggtttgatagagtagtcttggaaaccatcaggtactgcctgcagacttctccagcactaaatatatttgttccctctataaaccattcatctttcggacagaacttactgtaaagaaagaaatctgcctagaggatatatgtaaggaagattccacatcatgagtacttgccttttaactttcccccacattactgttgagtcatggaataatgtttaagttgttatttgcatggaaattaagtaggctgtttatttatctaaaggaatcaagtccactcttctgcctgcaacatttgttcaaaaactaaccaaggtaaaatatttatttgaaagcccaactttgatgttaaatattcttgaataaatctgttattttaagaatatcacattattcaatgcatataaaactatcagaagttagtaaatcataccagcactaaaaataagacaattggaatatattttagcatcagtttacaaacaactttattatcaacagaaattttagctcttttctttgcaagatatatcacagctgctttgggcagtagctgaagccgaagtatgaacagtccattttgtttcttaaaatttgaagtcgtgtctgtcatagcatttttactaccagcagtatgttacttaaaaaactacatggctttccttgaatttatttgacggtattatgtaatagacttgaaacaattgccatctttgtagttatgccttgggttctaaaatgttataggaaactgctgaattgaatcctagcttttagaatattaataggagactcaaagttaatattcttaacaacttaaaattaaaaaaagtcataatctatcaaaagtttatttattggatggcattaaaacatttttgaggcagttgtctaatatgaacaataatctaaacaatatattccttaaattaagaggaaagacaagtgtcgtatttcgatcctgtttattcaaatgtgtgattttgctgaaatgaaagggataaaatgaatacttagagaataatacttcatttttgcagtactttttaattttgataaaaaagatacaaagttcataatatcaaaatatgtgttcaaaattggtattttaattttaatatttttgtaagttgatttaaattttgctcttttttcaggtgtgcttggtttattatatttagtcaagttaatttagtcgaatgtggtaacatttttctgatttatctttagttggagcacacccttgaactgaacagtggccaaaggaaagctttctgggctttggaaagtagttgtttaactttgttttaagccgttttcttagtgattctgtatcaagtagaggataagtgtagtttaacttagtttttaatataacccataatcaagaacatgagcgaaaagcagacataaatcgatatggatggtttgtggtgtgtgtgggatgtgggggaattaagaaaatgccatttacctaagcacagtttgcctgaatttctgcttggttgtgttgtttaccgtaagtactgagggtagtttccctaagtctgtcctgagaaaaagcatacttagtactcctgtatttgttcttatgaaatgactatctgccttcttgtatctagtaagattggctggctcaattttcttctgtcaaattatatggttattttttatattaccacatcagcattatattaaaagtgtttttaatagttgattgtattttgccaactactagtatagactcaaatttgctatttaatttttaaaatacaatttattttgtaaatcctttaaaaaatatttggttagttttggattagaaatgatttatgttagccatgtgttgaagatgaaattggcatcagtgtagacggtgctgattgggaaaagttcatgattaggaaattcatgtaagactttttaagagtattttttaggttttcactcaatctttcctgtcacagtaacgtgaaaactgattattctttactccaagagaatgttttaacccaagcaagtatctaatactagagcattggttctgacattcattgtaaatcagtgaactgtaagatactgtctaaaaaatgtacatttgtaattagtgcctttattcatattttgaaataagttcttagttttatattatacctgttctttagaagtcatgttagcagctaattatttcagtgatgaaataatttgtgttttatatcccccttcacctccatgtattggttagcacagtttatagtaagtgaaaagcaagggacccacctacattaccttcaggagactgttctaccttttaatttgaaaacaaggaaattaaattttaacagaaatcttttaagtatgttataaccaaagtgttcaattatccttgcaagttcaaatacagcatttttcttaattttgagcgtgtcatgtccttcatctttaaacccatcattcttattgaagcccatttgagaactcttagaattaatagaaccttttataagggaatatatggaatattttttattgttaatgtaacttaattccttaaaacctggaatattaatatatataatctattaaaagctgaagattaaatatgtaatttttgcttttagtttcttgtgttagtatgcttaaaggtatcaatacttttattctatattcattagaagaaaggtaataaatttaagtttcattgctgaaaaattttaaatgagtgccaccccatagccatagtcattttgattaagcataatttaactttcattatagcataaagagaaaataattattttagtatggaaacagtgataggcagtgctgtaaacaatattctctgaaaagttgtgggggtcacaaagaaaattttaaagaatatagaagcttttttaaaaaatctttttagtgtagtttcttagaacaaattataaacataatcattctgaataatcaatttttatttagtccttaactatgtaaaaccgtatcagtagaaaaatgtgctggtgtcgtgtctaaagatggataaatttctttggaatttatctttggagaccaactttatgaggcagactttttgtctacagctttggaaccaaaaaaacttcactctaattcagtcctaaaggctattttacattttgccggggtaaagtgacttcaagatacagcatggtgtcttgtatctagtagaatattgtgctagccatctaaaaaagtggatttgagccttaatttggccgtttctcaattgtctagttgaccttagacaattagtgtccatggctttccttttgtttttcccatactgaggaacttaaactacagctctaaaatgtcttttggttttaaaattctgaatgcttatatactactattaaaaattaaaaatccctcaaatagtagggcaatacaggtaatatgaaattaaatgtatttttatccattatttgattcccacctgttattttatttagaatacgaatacaaccaagtagggaaaaacgtatcagtaactgctattcaacttaaattcagcgaattaatagctgaatagaaatagctaatgacaatgcaaaagagaaaacaagccatattgctaagaaaaggatagtaagctgcttagaaagaaccagcctgtgttggaaataattctcttctagataatttaccttattttcttggcttgtactaattgaatggaagtggttaatttgttcagagtttattgccgtttgatgccaccccagtctatagttctgtgtgactttccatattgaaagagtagggttagtagccaggttgtcagtcttttacaaatgtctacataaatgtctacataaatctgaaagtggtttatattcaaggttagtttttcagtagcgtctcctccttattcattcacttttactgtgaagactgaaatccaaaagccaggttccccaaaaaagtatttttaaaaaattttaggggaccaaaataaatagaggaagaccaatataaaaaaatatgttcaactattccattttaaatttaaagcagaaaaaaaaattgtgcccctcagacctaaaggcagctttaaatgtatatagtttggtgaaacatttgggaaatattaatttggaggtttagaagcatacgaaaaacaaattcaaagcacttgaaagtaaagacaatatcatgaggtcgaaaaaacttcaaaaggatattaggtaagagaaaatgtgaatgaaagcagtgaatttctgcctctcctcgtatttagggtacttaaaattactaaaaaatactgtctttttaccatacagctagatggcctgtattattcttaatgtggccaaaggagtgaagactgattagggttttagaatttggaactgtagtcacataaaggcatcttttgcatttcttaaaccagtaatctacattttctcctggaaatggagaaatatgaaatgtgctgtgcatagcttttggaatagaaaacaaagttttaaaagaatggatatgttttcttgcacaacttgtaaaattttaattaaaaaattacctcatttttcaatccataaggtgctttgctcaagtttgtgggatgtttgtaccatcccataaaaacccccttcacccaaactgtatttgaaatatgcaaaattcataactaagggatagcattccttggagactttgttttgttttactcttgtttaccagctgggccaacatggtagatatatgagattcacatatggtttcattaaagcacataggaaagtgctcagtcaatatttaattagtttaattagataagggaaaggagaaatcctaaatttgatggattcttttatactgtgaatatatttccatcagtgttggtaagatatcaaatgactatcagttgatcccagtcatcagtgacttatttgcatatttaagccctattcacaagagaccataatcattttaatcttatattttccctcaggaaatttagggactctgaagcccctattttattctcttggagtaaactgttgagtgtagttacaaaaacttttatttatgacttaaaaaaagtttagctgctatttcagtgaaagtgtaaaataaaacggtcatgatttttttcaattacagaatagttacaaattttaccatgttcatctattccacagagcatgttaaaaacaacaacaacaaaaacctaacagcaattacaaccttggtgttgcgtttattctaatcagagtgaatgattataatcacactttgctattttaacataaattggtgctttagagcattaaagaggaagcagcaggccctgtactcagtatttattatttcttgcctcagaatgcaaaacaactttaaagtgtctatattcatatatatgtgcatttcttaagatttaaatacaaactgttgttactccttaagcttcaggctttctgcgaaagctctaagaatatcttcattactatgcttggtcaactggaagatggtattaataaggtcagaattaggaattggattgctctgtgggtcctccggtattgtgcagaggaaagaaaaatgtctttcacaccacaaactgtgtgtctgaaccccagccaaacaaatgtgttccattggtccaatatataagcattaacaacaacaacaaaaaatttaaaacaagtaaattaatgcattcacatgatcacttcttgaaaatggttcaaagcatgttttcctgatggtgggattgtttaaatgacatgttttaaagtttttaatactttattagttatgaagtgcttcttttatatgttaagtttaggttgccagtactcataatttttatttctgcaattatgttataatgagttgtttgcatgcctacttaacccaagtaaaacgatgctgtttgctctggaatgttcatcttttagacaggttttggctcatttccaatcatggtgcaatatagtgtaacattcatttgttttcattcaacagttttatttttgtcataataaataattacttttccaatacgaag

SEQ ID NO: 8140 - protein, 179 aa, Homo sapiens; identical to SEQ ID NO: 1160

SEQ ID NO: 8141 - DNA, 1669 bp, Homo sapiens
atggctgatacacaattctttgaggtagaagaagagaatgtttctttgcaagatgcgagtactgtcaaaacaaatattttgttaagaaaactgaaagagaaagaagaagttattaaagaattaaaagaagaactagaccaatataaagattttggatttcacaaaatggaatcttttgccaaagaaaccagctctccaaaatcaaacctagaaaaggaaaatttggagtacaaagtggaaaatgagaggctgcttcagatcatttcagagcttgaagaagaaatccagatcaatctaaaagaaaattcaggattagaagatgaacttataagtatgaaagagatggcagaaaaggatcacaaaactattcaaaagattaataaacagaaagaggacaaggaaatgagaaaaaagtatggcagcttaagtgtaaaggttgcaagatcagccaaggggagagaagcctctttgtccccatggcccaagtctccacccagcaccacagctttgaggccacattctgcgaccatgagtgtatcatctgctggggcccagaaagctaaaatgccaaagaaggctttaaaggaagaccaagctgtgtgctgctgcctggtgtattacatcgctgctcaccagagtcaagccggaggtggctgcacccctctagatgctggcagtggactgttgaccactgtctttggatttagcctggccaaacttgtcagtttctccaatcctagtctctccagatcccaactttctcctcaaaccctgggaataagtctatacatagtttctgctcagaatcttaaagccaggtacagttccactgtgactcttctcagggctgaggtggtgctagtcgtcaaagtctggaaggccatggtaggagtaaccctggtagcttttggatgcattcggcaggaacaccaaattgccagtgatcagaactggaacaacctagtctgtccccactttgctgatgtagcccaacagcaggagggagcctatgataatagaaagaatgagatgtttacaaggcacacactgtttcgtcagtttgcagtgcttgctgacacatccttcaattatattaaagtaaaacccttattagtgcagtctagaacgaccatgacagctatatcctcttcaagtcattgtacatcttcaatagacggtaagcatgtggatgtagtcagtgatcaggcagcccttcaactttcaccaaaagggaagttgtcggaatccccaaaagaagagtccttggaggagccctccatgcgccagagcagccccgcagagactgttgattaacccagcagaagcctgggctgcgcagacggggcctcagaaagagtggcctcgccgtcctggtgtaaggtgcctccctcggaaaggatactatctccaaggattttctaaactaattgtttaatctctccagattatgtatattaaccagcactgcgctcgaatagacctcaatgcgcgccttgtgcgcgctcctttccacgcctttaaggaaagccctggctggtgctgggtgagcggggcgcactgaacctccggggcaaccacatccattcaggagctccggggactcagaagagcccaggcgtctaagagtgggaagggacggactttaattaaaaagtttgactccctctct

SEQ ID NO: 8142 - protein, 437 aa, Homo sapiens
MADTQFFEVEEENVSLQDASTVKTNILLRKLKEKEEVIKELKEELDQYKDFGFHKMESFAKETSSPKSNLEKENLEYKVENERLLQIISELEEEIQINLKENSGLEDELISMKEMAEKDHKTIQKINKQKEDKEMRKKYGSLSVKVARSAKGREASLSPWPKSPPSTTALRPHSATMSVSSAGAQKAKMPKKALKEDQAVCCCLVYYIAAHQSQAGGGCTPLDAGSGLLTTVFGFSLAKLVSFSNPSLSRSQLSPQTLGISLYIVSAQNLKARYSSTVTLLRAEVVLVVKVWKAMVGVTLVAFGCIRQEHQIASDQNWNNLVCPHFADVAQQQEGAYDNRKNEMFTRHTLFRQFAVLADTSFNYIKVKPLLVQSRTTMTAISSSSHCTSSIDGKHVDVVSDQAALQLSPKGKLSESPKEESLEEPSMRQSSPAETVD

SEQ ID NO: 8143 - DNA, 440 bp, Homo sapiens
gcatgacaggatcctagaaattgaaaagcattatcaacagaatgaggataagatgagaaaatccttcaatcagcagttagctgatgccatagctgttatcaaaggaatgtaccaggcccacctatggctgcccattgaccaatcagcatgagcttcctcccctctgaagcccataaaaaccctagactcagccagactctggcagaagtggggatgacctgcctgcagagaggagttattcgctgtggggtcttctctcagctaagagctgaacagatatcaggatgacctgcctgcagaaaggagctacccactgtgggtcttctcttagctgggagctgagcagatgctgggatgacctgcttgcagaaaggagctacccacttcagatctcctgcaagctgtactgttgctcaataaagcacctctttgccttactc

SEQ ID NO: 8144 - protein, 32 aa, Homo sapiens
MRKSFNQQLADAIAVIKGMYQAHLWLPIDQSA

SEQ ID NO: 8145 - DNA, 2944 bp, Homo sapiens
attttgtccaggaacgcctacgtttgtggcaggtggagacagcttattaggcagcctgctctcctcttatgatggccttggtccgggatcgcagggctcattatgtcatgagcatagttattagatgggttcactgcttttcctcctccttgagggggacctttggcacacgctgggaggccatgaaagccaaggccaccgagctgcgggtctgctgcgcgcgtaggaagcgagaagctcgggaattcaagcccccgcaaatgcgcgggtccacgagacttaacatttcagatgatttaaagattggctttttcagcacagaccatgccactcaaactgattccagtgaaatactgtcagtaaaagaattgagttcatctacgcaaaagttagcacagatgatgaaatccctccaggtagattttgggttcctcaaacaattgcttcagttgaagtttgaggaccgactgaaagaggaatctttgagtctcttcaccattctgcatgacaggatcctagaaattgaaaagcattatcaacagaatgaggataagatgagaaaatccttcaatcagcagttagctgatgccatagctgttatcaaaggaatgtaccagccactgtgaaaccaaacattgagatactctggatgtgctgaaggtagcaaggtggaaagataagaagcagaggggtccttggtaatgtcatggagccatgaaagtaaccctggacttgccctgcctctggcctcttattcatgagataacaacccctcagtgtctaagccactgttagttggcttttcagttacttgcagctgaaaacatcccaggacagattgctctgctaacgatctctgtgactctgtgccaaactgtgtttccaaaggcatctgtgacactgtctcccacttacctgctcttgtgcaatgtttctctcccatcaagaggtggaatctgattcccctcccttgaatcagggctgcccttagtgacttgctgataaacacagaatgtggaggaagtgaagctgcgtgacttttaagttaacgtcaaaagaagtcttgcaagttcatccttattcactctgaatgtttcccctctacattgtccctccctgaattgagctaccatgctgacaaaagcccatgccatatggaagatctacatgtaggtactactgggtctccaggctcatctgagcccagcctttgagtcaccccagcccaggagtcaaaaatatgagtggagaagcgtccagatgactccagctgccagccatgtagactctttttatgtgaggtcacaggtcttacagaggagagataggccatccctgctgtgcttctactaattcccgactcattgaatttgttttttttttttctttgttttgctttttatttttgggtctttttttttttttttttttttttagagacagggatctcactgtctcccaggctggaatgtagggtgtgctcatagctcactgtagccttaaacttctggactcaagtgatcctctggcctcagcctcctgagtagctgggactacaggcatgtaccagcacacccagttaatttaaatatatatatatatatgacatgggatcttgctatgttatccaggctggtcttgaactcctgtcctcaagtaatcctcctgccttagcattccagagtgctaagattacaaccatgagccactgtgctggcctaattaatatttaatggaagaagacggaaggaagaaagagaaagagggaaggagggaaaatgagcattatctgtagcagttttatatatattgattttgtaaccaaaaatcttgctaaattcttgtgtttattttaataagttttctatagactctttggggctttctatgtaaacagttatgcaactgagaataaatattttttgtcacttcatttttcatccataaaccatgtaatcatttcagcagtggcctgtctggagcagctgctgcaaagatgccggctgcagcaggggagatatggccagggctgtacactctactaagctggcaggagccaggaacaagcaggagtggtgctcaccttctgagttggtgatgggggagctccacgctcctagaggcagctgcagctgcccagccatggctgcagacccaggcatccctgtgctcttgggggcctaggaagcccccctgctcccacaggctcggaagtgcctactcctgctgcctggcctctcctcactcctggcacccactctgattttgaagcaaagttgtggccaagcccaggcgctgttatgacccagccaggtgtgtgtgtgcttgggatggtgctgacacaccagccctctgctgccttggccccctccagagtttgggtgccaacaagcatgggagggaggccaagggggcactgagggtggcacagcacaggcctgcaggtgtcccttggcatgaacagcctgggcaccatgaacagcagcaggaagcgacaggctcccgagtggaaagggatgtgtcgctggtgaagctccaccttcaacccaggggtggcctgaagcctgggggccaggctgccagttccacagactggagtgagaacttatggtgcttttttcaggcccacctatggctgcccattgaccaatcagcatgagcttcctcccctctgaagcccataaaaaccctagactcagccagactctggcagaagtggggatgacctgcctgcagagaggagttattcgctgtggggtcttctctcagctaagagctgaacagatatcaggatgacctgcctgcagaaaggagctacccactgtgggtcttctcttagctgggagctgagcagatgctgggatgacctgcttgcagaaaggagctacccacttcagatctcctgcaagctgtactgttgctcaataaagcacctctttgcctt

SEQ ID NO: 8146 - protein, 185 aa, Homo sapiens
MMALVRDRRAHYVMSIVIRWVHCFSSSLRGTFGTRWEAMKAKATELRVCCARRKREAREFKPPQMRGSTRLNISDDLKIGFFSTDHATQTDSSEILSVKELSSSTQKLAQMMKSLQVDFGFLKQLLQLKFEDRLKEESLSLFTILHDRILEIEKHYQQNEDKMRKSFNQQLADAIAVIKGMYQPL

SEQ ID NO: 8147 - DNA, 1050 bp, Homo sapiens
ttccggccctcctctgtctcaggcgagtcgccccagttcgccattgcagccccggacgtgcgcctcccgcggagccgctcgctctcctgagtcggagtcgggaacccggcgtccgttgccatggcgactcccaggcttccccacaagactcccacagcctggaggctgctgcgataccccagaggaaagctgcacccccgtaaataacccttcagcctcccgccgtgcccctggaccctgctcgcttcctcctctacccaggcgcggagctcagcctacctcgtggacccgcgcatttgcgggggcttgaattcccgagcttctcgcttcctacgcgcgcagcagacccgcagctcggtggccttggctttcatggcctcccagcgtgtgccaaaggtccccctcaaggaggaggaaaagcagtgaacccatctaataactatgctcatgacataatgagccctgcgatcccggaccaaggccatcataagaggagagcaggctgcctaataagctgtctccacctgccacaaacgtaggcgttcctggacaaaatatttccttgcagagattaaacagatttctatttaatgaggtcagaatgtgaggcgttaagtcttaaactataccatctagtgtggaattcaattttaccaggtttctacaataataagagttaatagtgaaactgttgtcatccttagttttaaattatgtatcactcattgtcaactaataggagacacctattctaatatcagtatgtcattgtttttctgtaaacgactggctaaatttatttttaaaatgtcattgtctggtttagaactgtctatactacatctgcatttcaatatattatctacagaaaaataagttttttctcctctctcttattattattattattattttttggagccggagtctcgctctgtcgcccaggctggggtgcagtggcgcgatctgggctcactgcaacctccgcctcccgggttcaagcaattctcctgcttcagcctcccgagcagctgggactacaggcacaca

SEQ ID NO: 8148 - protein, 37 aa, Homo sapiens
MSLFFCKRLAKFIFKMSLSGLELSILHLHFNILSTEK

SEQ ID NO: 8149 - DNA, 2685 bp, Homo sapiens
atgtgcctactggagtctctggactgtttcttgaccgtcacacccatctctccctttcttcctggaggagcacttgacaaagagaggacccctccacctaccttgagtaatggccacaggaaacaagatttctctttatttgttatgcttgagtttcagagaaccctggtaaagctgcattcaactctgcagttaggctggagaaatgagacagaacaccagctaatgaaagagttaagcgtgaagtgcttcatgcacagagcaacagatgctcaacaaatcagtgatgaaatccaaggatgggccctaagtgatactgcatttggtattctgagaaagcttgtttataaaagcctaaaaggcttccttgctttcccccaagccagatatttgccaaatggcataggtcagaggtgcaaagttggttttgtcttagcaaggcaagagaatccactagcggactcacccttaccggagctgctgcggcccgactgccccgagcccgcgggcttggacgcgacacgggaggggcccgatcggaacttccgactgagcgagcaccgccaggccctggccgccgccaagcaccgaggccccgcggcgaccccggggagccccgatcccggccccggtccgtggggcgaagagcacttggcggagaggggccccaggggctgggagaggggcggcgatcgctgcgacgcgcccggtggggacgcggcgcggaggcccgacccagaggccgaggcaccccccgccgggagcatcgaggccgccccgagtagtgcggcggagccggtgatcgtctccaggtcggatcccagagacgagaagctggccctatacctggccgaggtggagaagcaggacaagtatctgcggcagaggaataagtaccgattccacatcattccagacggcaactgcctctaccgagctgtcagcaagacggtgtatggggaccagagcctgcaccgggagttgagggagcagacggtgcactacatcgccgaccatctcgaccacttcagccccctgattgagggcgacgtgggggagtttatcatcgctgctgcccaagacggggcatgggccgggtacccggagttgctggccatggggcagatgctgaatgtgaatatccatttaactactggagggaggctggagagtcccacggtgtctaccatgattcattatttgggcccagaggattccctgaggcctagtatttggctcagttggctcagtaacggacactatgatgctgtatttgatcactcctatcctaacccagagtacgacaactggtgcaaacaaactcaagtgcaaaggaaacgcgacgaagaacttgccaaatctatggccatatccttgtctaaaatgtatattgaacaaaatgcatgctcttgaaatgtctcaaaaccttacaccctgggaataattgcatatataacttgtgtttggagaatcacatgaactttaatcagggtaatagcactttcaaacttgctagtagattttactgtaggtgtaatgccttaatcatctttttgaatgttttctcagagctggaggttgctgggcacctaaatgatgtttcatgatagctttgggtgattttactgctatttataatttgctgtataaagtgagcattacttaatttgcaagctgatttctcacagtgtaaatttgttcattcctggtagtctattttctataaaaatgtatttttgcacaacatttttaaaaactggtgtaccttcatctatgacgtgttccattttgacaaacagctttcaggcgtaaatccagagaagtgctttatatgaaatgtattattttgaacagagtttgtgatttggtagttattttatgttgttgaaatttgaatttcacaattcttagataattatttcaaatggatattgatgcattcttgttaccagatgtttggcccattccattttgatgaaacagagctgttgttttggaagtcattatttttctagaaatggcgaatcttttaaagaaaattacttaatggaaggttgtgggaaggtgtttttttgtgttttttttttggtttttgttttgtttttcctcttttaagggatagtagcaggtcttacttgaatgaaagtctgatatttgctgatggcagaatgattattctgtaccctggttgatgtgtagagtagattgtctggtgctctcagttgtttttatttacatttgtcacgttgttgtaagagaatgttaacatggtataaaactctgtgacaagataagcctcctgctttatataacttcttgaatccagctaagagatttataaactaatggcataaatgtctggagccaaccttggcagttatagcaggagaacactgtcttaatatttctttacattctttcaaaaggcaaaataggattgccctgtattgatgtagaaatgtctgtaaacagagcttgtatggtttgctgggtcaaacaatgtttccaacttaaaatcaatctcattgccactttaactacttttagtcatatttattaagtaatgcagtttgtactttttttattttgtaacattttgtgatttttttgtacaaaactgtatttgtacaatagagcaattcccagctgatggaatgaatgaataaaatgcaaaattatactttt

SEQ ID NO: 8150 - protein, 470 aa, Homo sapiens
MCLLESLDCFLTVTPISPFLPGGALDKERTPPPTLSNGHRKQDFSLFVMLEFQRTLVKLHSTLQLGWRNETEHQLMKELSVKCFMHRATDAQQISDEIQGWALSDTAFGILRKLVYKSLKGFLAFPQARYLPNGIGQRCKVGFVLARQENPLADSPLPELLRPDCPEPAGLDATREGPDRNFRLSEHRQALAAAKHRGPAATPGSPDPGPGPWGEEHLAERGPRGWERGGDRCDAPGGDAARRPDPEAEAPPAGSIEAAPSSAAEPVIVSRSDPRDEKLALYLAEVEKQDKYLRQRNKYRFHIIPDGNCLYRAVSKTVYGDQSLHRELREQTVHYIADHLDHFSPLIEGDVGEFIIAAAQDGAWAGYPELLAMGQMLNVNIHLTTGGRLESPTVSTMIHYLGPEDSLRPSIWLSWLSNGHYDAVFDHSYPNPEYDNWCKQTQVQRKRDEELAKSMAISLSKMYIEQNACS

SEQ ID NO: 8151 - DNA, 2889 bp, Homo sapiens
atgtgcctactggagtctctggactgtttcttgaccgtcacacccatctctccctttcttcctggaggagcacttgacaaagagaggacccctccacctaccttgagtaatggccacaggaaacaagatttctctttatttgttatgcttgagtttcagagaaccctggtaaagctgcattcaactctgcagttaggctggagaaatgagacagaacaccagctaatgaaagagttaagcgtgaagtgcttcatgcacagagcaacagatgctcaacaaatcagtgatgaaatccaaggatgggccctaagtgatactgcatttggtattctgagaaagcttgtttataaaagcctaaaaggcttccttgctttcccccaagccagatatttgccaaatggcataggtcagaggtgcaaagttggttttgtcttagcaaggcaagagaatccactagcggactcacccttaccggagctgctgcggcccgactgccccgagcccgcgggcttggacgcgacacgggaggggcccgatcggaacttccgactgagcgagcaccgccaggccctggccgccgccaagcaccgaggccccgcggcgaccccggggagccccgatcccggccccggtccgtggggcgaagagcacttggcggagaggggccccaggggctgggagaggggcggcgatcgctgcgacgcgcccggtggggacgcggcgcggaggcccgacccagaggccgaggcaccccccgccgggagcatcgaggccgccccgagtagtgcggcggagccggtgatcgtctccaggtcggatcccagagacgagaagctggccctatacctggccgaggtggagaagcaggacaagtatctgcggcagaggaataagtaccgattccacatcattccagacggcaactgcctctaccgagctgtcagcaagacggtgtatggggaccagagcctgcaccgggagttgagggagcagacggtgcactacatcgccgaccatctcgaccacttcagccccctgattgagggcgacgtgggggagtttatcatcgctgctgcccaagacggggcatgggccgggtacccggagttgctggccatggggcagatgctgaatgtgaatatccatttaactactggagggaggctggagagtcccacggtgtctaccatgattcattatttgggcccagaggattccctgaggcctagtatttggctcagttggctcagtaacggacactatgatgctgtatttgatcactcctatcctaacccagagtacgacaactggtgcaaacaaactcaagtgcaaaggaaacgcgacgaagaacttgccaaatctatggccatatccttgtctaaaatgtatattgaacaaaatgcatgctcttgaaatgtctcaaaaccttacaccctgggaataattgcatatataacttgtgtttggagaatcacatgaactttaatcagggtaatagcactttcaaacttgctagtagattttactgtaggtgtaatgccttaatcatctttttgaatgttttctcagagctggaggttgctgggcacctaaatgatgtttcatgatagctttgggtgattttactgctatttataatttgctgtataaagtgagcattacttaatttgcaagctgatttctcacagtgtaaatttgttcattcctggtagtctattttctataaaaatgtatttttgcacaacatttttaaaaactggtgtaccttcatctatgacgtgttccattttgacaaacagctttcaggcgtaaatccagagaagtgctttatatgaaatgtattattttgaacagagtttgtgatttggtagttattttatgttgttgaaatttgaatttcacaattcttagataattatttcaaatggatattgatgcattcttgttaccagatgtttggcccattccattttgatgaaacagagctgttgttttggaagtcattatttttctagaaatggcgaatcttttaaagaaaattacttaatggaaggttgtgggaaggtgtttttttgtgttttttttttggtttttgttttgtttttcctcttttaagggatagtagcaggtcttacttgaatgaaagtctgatatttgctgatggcagaatgattattctgtaccctggttgatgtgtagagtagattgtctggtgctctcagttgtttttatttacatttgtcacgttgttgtaagagaatgttaacatggtataaaactctgtgacaagataagcctcctgctttatataacttcttgaatccagctaagagatttataaactaatggcataaatgtctggagccaaccttggcagttatagcaggagaacactgtcttaatatttctttacattctttcaaaaggcaaaataggattgccctgtattgatgtagaaatgtctgtaaacagagcttgtatggtttgctgggtcaaacaatgtttccaacttaaaatcaatctcattgccactttaactacttttagtcatatttattaagtaatgcagtttgtactttttttattttgtaacattttgtgatttttttgtacaaaactgtatttgtacaatagagcaattcccagctgatggaatgaatgaataaaatgcaaaattatacttttacaatgcctttttggatagagtggtttttaaattgtgatgtttgtaggaaactttcttgcatgtatgcatgtacacaattttttttttccataaagatgccacagcaatagagaggtttcctaaattatcacatgaagaggataggctaatcatgagtaatttcaaaggataagtctgaataaaatataatttaaaagtggagt

SEQ ID NO: 8152 - protein, 470 aa, Homo sapiens; identical to SEQ ID NO: 8150

SEQ ID NO: 8153 - DNA, 465 bp, Homo sapiens
ttccggatgccaaagaggcaaatgtggaatgatgttaggatatcacctgtcataatattatacggattcagctcaaagcagaacctttctgcaaacacgtagggatatgaggaccaaccttagtttgtgaaagagaattaagcttttccaaccttgaaagccttcagattactggatccccagatgctatggatggccagctccataaaaagaatttttatctcatttaaaaaaacttcattaagctttacctcaagttacagaaacatgataaagcacaatgcagtggaaacagcgtggagctggaggatgccagacgacattccagccctgattccactgctcatcaccaatgtcaccctgggcaaggtactccagccctgctgctcagtttgctccactgtaaaatatgaagataatatcttccatgtaagatagttgtgggattaaatgagatcatgtatg

SEQ ID NO: 8154 - protein, 84 aa, Homo sapiens
MLWMASSIKRIFISFKKTSLSFTSSYRNMIKHNAVETAWSWRMPDDIPALIPLLITNVTLGKVLQPCCSVCSTVKYEDNIFHVR

SEQ ID NO: 8155 - DNA, 3342 bp, Homo sapiens
cctccatcaatagagcgtttgagagaaacaagaaaaaatgcaaagattatttcaagcagagatgaccaaggtgctgcaaaacccttcacagaagaagattttcaagaaatgattaaatctgcacagataatggaaagtcaatatggtcatctttttgacaaaattataataaatgatgacctcactgtggcattcaatgagctcaaaacaacttttgacaaattagagacagagacccattgggtgccagtgagctggttacattcataactaagagaaatttccataattgtctttttctatagagtgcatgatgaaatcaattacagttttggtagtagggtttttaaatctatatcactgtcatagatgtacaatcttggttcaagttgaatgctggttttgtttgtatctttttacagccttatttcaaacgccatgtgttagtataagatccgaaatcaaaatatgcacagtactgtattctaagcaaaacctcaaaccttctcgttgtcttcaataccgctctatctccaagatgaggctgaaattttcagagagacttagctagaggcttagtatgtatgggagttcagcgcttctgctggtctcaggtgtggctgctgctgtcgagtttgaatgttagctgttgaaggtatcaattcagcagccatgagcagctccagacagacaggtgagctctgctgtttctgggtggatcatcacagatttagccgggcaggcagtaaggtgtcctcttactattcaaaaagtgtagactttcttacatattcgcaatacgttcacagtgtgtgcattttaaaataattcttaaaggagtaactgaaattttaccttgagtgaatggccttcataatatagcttgagaagtccttttgagtacctgtcagtgactcaacaacatttaataagggaaagtagacttttaacagttattatatatgtaacgaaaagcctttcctttgggattaatataagtaagaatggtagccttgtggcaagaaatgattacaaaggatatttttatttgtaattcctcagaagacaatttatgaagtcacccaaaatgttattttagctggttttggatttttccaataaattagaagaaggatttctattctaaaacatgtaaaacctgttttacatattactgatacaattaaagattatttttcatctatgtgcaatagatcacccctctttaaattgctctaagatttattttagaaaacttttcatgtgatgttatttctttgtcatcaaaatgcttgttaacactgtccagacaccatcctaaccttgccattgttaaagaagtttaggaaagactcttatattgtaaatatttagatgggttctctcacttttctttgatactactgattttcagcaagtgaattatataattcaaaatgctagaaatgtctatccgttctataagagagcatatcctgccgttcttgcatgcagtgaagccctgcccgtcgaaaatcattgcatctgtgactttcaaagtggaaaaaaaaatgttatttttttgttgatttgtaaagagagtttaaatgtcatgtgaaaaaaaatagaatgtagtaaaattctatatatttatgaaatattttaaaggcatatttttttaaatatcaaacggggctattcataaaataaactgattgtatgtcaagatgtcctaatttaaaagagtagttttataaatcatggtcaacattccatgtaaatatttgagctttacaaagatagatccaagtgtgcgatctgtgcactgcacatttgatagcattattcactggttttccttcatacttgtcaagttcatattagaagcagagacaaaaaccactccaatggccttgacacatagtcacaccaaaatagataatcagactaagtattatataacaacgtgatccagacagtgagttctaagtgtattaattaaatagcaaaaaattttgtttttaaaaaatgaaagagggagggttgccaacctgaagtcttaagtagattgtttgggtagcatatttccttctttgaacattgtctgaaattttctataaatcaagacttcttgtacaaagaatgatgggacatatgtaataattcaggcaatcacctgagtaatttaggcagtccaaattctttaccctgaaatacccacattttaaaaaaattgcagataattgcttcagttatttactttggggacagagatatagtgtaaagtgggagaaactgagtccttttttggtggtggtaataataagatgttataaaaatataacattttaaaaaagaaaggtccagaccttaagcgcagagctagaacaatattttttaaataatggggggaaaagggggcactttggtaattttagaaatcaggtagtatacttttttttttttttttgagacagggtcttgccatgttgctcaggctggtcttgaactcctgggctcaagcaatcctcctgccttggcctcccaaagtgctgggattacaggcatgatccaccgtgcccagccggtagacgtggtcttaaaaacagtgtttacatggccatcttgatgcttagaaagataattgattaaaatttaataaggcagggccaactccgagagttcattgacaacggcagcaaaaaggccctgaattctgtactttcttcccccagcctccttctccagcaaggagaatagcactcctccctccagaagccagctccctaagttggagccactatgtaagagaagaggaacgttcactttttaaaattcatatatttaaaaatcaagaccaaaaagtaaattctgtactcctattattgactgtagtcaatcaaacataaaaaggtgaaagtaaaatttaattttttacccttattttactgaccaatatggaagttcttggtatctttaaggctgaccttcctggtattgtgtaatgattgaatgtatctaaactgtaataatttgaaactgacaaacataaccttctcagacttacaaaactatgttctttctaaagatacagatttttattattttattttgactaggaaggatttataaataaatgtaatgaaaaatctttgatcttaataaagtaccttcaaacagtgtgtgtacttacttgaaaattgtttttgcacttggatattctattttattatactactattgtgatctattccattatactatttcccatggtagaacaaattatattttctactgtgatatgaagtgatgtaattgaacttgccatgtctaaaattaaatttcatatttttttcaatcaaa

SEQ ID NO: 8156 - protein, 86 aa, Homo sapiens
MMKSITVLVVGFLNLYHCHRCTILVQVECWFCLYLFTALFQTPCVSIRSEIKICTVLYSKQNLKPSRCLQYRSISKMRLKFSERLS

SEQ ID NO: 8157 - DNA, 539 bp, Homo sapiens
ggctcagtctcagggagcaattacatttaagattatacccggcagcaaagaggagacaccatcaaaagaaggcaagatgtttatcaaagccctctttgactataatcctaatgaggataaggcaattccatgtaaggaagctgggctttctttcaaaaagggagatattcttcagattatgagccaagatgatgcaacttggtggcaagcgaaacacgaagctgatgccaaccccagggcaggcttgatcccctcaaagcatttccaggaaaggagattggctttgagacgaccagaaatattggttcagcccctgaaagtttccaacaggaaatcatcctaatcttctgtcagcttttctttatttcccaccacccagctcttcaagtctgcatcccataaattccctgttccacctcgcctagatgtttcatggttctaggtattttaagaggaaaaaaccaaccctttgtttttagcatagaaactgtacattaaacagcgaaatgaccaaataaatggccctggaattttacacc

SEQ ID NO: 8158 - protein, 88 aa, Homo sapiens
MFIKALFDYNPNEDKAIPCKEAGLSFKKGDILQIMSQDDATWWQAKHEADANPRAGLIPSKHFQERRLALRRPEILVQPLKVSNRKSS

SEQ ID NO: 8159 - DNA, 6021 bp, Homo sapiens
gaagtcacttcccatcccggttcgcttggggggaaaccaggcgtccctggaagggaagggaagggagtccgggctgcgcgggtcagcccgtcgcctttctgaccgcgtccctacggtttcccggcatccgcctccctctccccaccacacctgaggaaaacttttccctcgcccctcaattcaaattcagcagtgcccacggttgccgcaaaccgcccggtccctagcaacaaggttccggccgtagagcgagagcctctaggtgtaaggaaggtgatgtcgtaaagccgggagtgtcgtaaaccagttttcagtttaaattctcaactggcaattggccgaaaactcccatctgaagacatgatcatccaaatgtcattttgtgatttggctactgtctgcttgacataggaaagcactatcaagaaagactaatggagtgactatcaaaaggaagtcaatgatttcttaagaatttacaacaaaaccctgtcaaagcagcattcttacgtgagaatttcacttacgggagagttcttacaggatttcaagaaggaaagccctgaagagggacactgatttcctcaactgaatttaaaattgttacatgcagacatttttaaaggacaaccttaaacttccaccacaagaggaatataaagaggtccctcctgcaccaagaaagatctgcagatctttttcagtgttcttggaggtgtggggtgtgagaacttgatcagtttgtgtcagccaccttgttctctaaagttacaaattataatactgtggtagaaacaaattcagattcagatgatgaagacaaactgcatattgtggaagaagaaagtgttacagatgcagctgactgtgaaggtgtaccagaggatgacctgccaacagaccagacagtgttaccagggaggagcagtgaaagagaagggaatgctaagaactgctgggaggatgacagaaaggaagggcaagaaatcctggggcctgaagctcaggcagatgaagcaggatgtacagtaaaagatgatgaatgcgagtcagatgcagaaaatgagcaaaaccatgatcctaatgttgaagagtttctacaacaacaagacactgctgtcatttttcctgaggcacctgaagaggaccagaggcagggcacaccagaagccagtggtcatgatgaaaatggaacaccagatgcattttcacaattactcacctgtccatattgtgatagaggctataaacgctttacctctctgaaagaacacattaaatatcgtcatgaaaagaatgaagataactttagttgctccctgtgcagttacacctttgcatacagaacccaacttgaacgtcacatgacatcacataaatcaggaagagatcaaagacatgtgacgcagtctgggtgtaatcgtaaattcaaatgcactgagtgtggaaaagctttcaaatacaaacatcacctaaaagagcacttaagaattcacagtggagagaagccatatgaatgcccaaactgcaagaaacgcttttcccattctggctcctatagctcacacataagcagtaagaaatgtatcagcttgatacctgtgaatgggcgaccaagaacaggactcaagacatctcagtgttcttcaccgtctctttcagcatcaccaggcagtcccacacgaccacagatacggcaaaagatagagaataaaccccttcaagaacaactttctgttaaccaaattaaaactgaacctgtggattatgaattcaaacccatagtggttgcttcaggaatcaactgttcaacccctttacaaaatggggttttcactggtggtggcccattacaggcaaccagttctcctcagggcatggtgcaagctgttgttctgccaacagttggtttggtgtctcccataagtatcaatttaagtgatattcagaatgtacttaaagtggcggtagatggtaatgtaataaggcaagtgttggagaataatcaagccaatcttgcatccaaagaacaagaaacaatcaatgcttcacccatacaacaaggtggccattctgttatttcagccatcagtcttcctttggttgatcaagatggaacaaccaaaattatcatcaactacagtcttgagcagcctagccaacttcaagttgttcctcaaaatttaaaaaaagaaaatccagtcgctacaaacagttgtaaaagtgaaaagttaccagaagatcttactgttaagtctgagaaggacaaaagctttgaagggggggtgaatgatagcacttgtcttctgtgtgatgattgtccaggagatattaatgcacttccagaattaaagcactatgacctaaagcagcctactcagcctcctccactccctgcagcagaagctgagaagcctgagtcctctgtttcatcagctactggagatggcaatttgtctcctagtcagccacctttaaagaacctcttgtctctcctaaaagcatattatgctttgaatgcacaaccaagtgcagaagagctctcaaaaattgctgattcagtaaacctaccactggatgtagtaaaaaagtggtttgaaaagatgcaagctggacagatttcagtgcagtcttctgaaccatcttctcctgaaccaggcaaagtaaatatccctgccaagaacaatgatcagcctcaatctgcaaatgcaaatgaaccccaggacagcacagtaaatctacaaagtcctttgaagatgactaactccccagttttaccagtgggatcaaccaccaatggttccagaagtagtacaccatccccatcacctctaaacctttcctcatccagaaatacacagggttacttgtacacagctgagggtgcacaagaagagccacaagtagaacctcttgatctttcactaccaaagcaacagggagaattattagaaaggtcaactatcactagtgtttaccagaacagtgtttattctgtccaggaagaacccttgaacttgtcttgcgcaaaaaaggagccacaaaaggacagttgtgttacagactcagaaccagttgtaaatgtaatcccaccaagtgccaaccccataaatatcgctatacctacagtcactgcccagttacccacaatcgtggccattgctgaccagaacagtgttccatgcttaagagcgctagctgccaataagcaaacgattctgattccccaggtggcatacacctactcaactacggtcagccctgcagtccaagaaccacccttgaaagtgatccagccaaatggaaatcaggatgaaagacaagatactagctcagaaggagtatcaaatgtagaggatcagaatgactctgattctacaccgcccaaaaagaaaatgcggaagacagaaaatggaatgtatgcttgtgatttgtgtgacaagatattccaaaagagtagttcattattgagacataaatatgaacacacaggtaaaagacctcatgagtgtggaatctgtaaaaaggcatttaaacacaaacatcatttgattgaacacatgcgattacattctggagaaaagccctatcaatgtgacaaatgtggaaagcgcttctcacactctgggtcttattctcaacacatgaatcatcgctactcctactgtaagagagaagcggaagaacgtgacagcacagagcaggaagaggcagggcctgaaatcctctcgaatgagcacgtgggtgccagggcgtctccctcacagggcgactcggacgagagagagagtttgacaagggaagaggatgaagacagtgaaaaagaggaagaggaggaggataaagagatggaagaattgcaggaagaaaaagaatgtgaaaaaccacaaggggatgaggaagaggaggaggaggaggaagaagtggaagaagaagaggtagaagaggcagagaatgagggagaagaagcaaaaactgaaggtctgatgaaggatgacagggctgaaagtcaagcaagcagcttaggacaaaaagtaggcgagagtagtgagcaagtgtctgaagaaaagacaaatgaagcctaatcgtttttctagaaggaaaataaattctaattgataatgaatttcgttcaatattatccttgcttttcatggaaacacagtaacctgtatgctgtgattcctgttcactactgtgtaaagtaaaaactaaaaaaatacaaaatacaaaacacacacacacacacacacacacacacacacacacacacaaaataaatccgggtgtgcctgaacctcagacctagtaatttttcatgcagttttcaaagttaggaacaagtttgtaacatgcagcagattagaaaaccttaatgactcagagagcaacaatacaagaggttaaaggaagctgattaattagatatgcatctggcattgttttatcttatcagtattatcactcttatgttggtttattcttaagctgtacaattgggagaaattttataattttttattggtaaacatatgctaaatccgcttcagtattttattatgttttttaaaatgtgagaacttctgcactacaaaattcccttcacagagaagtataatgtagttccaacccgtgctaactaccttttataaattcagtctagaaggtagtaatttctaatatttagatgtcttagtagagcgtattatcatttaaagtgtattgttagccttaagaaagcagctgatagaagaactgaagtttcttactcacgtggtttaaaatggagttcaaaagattgccattgagttctgattgcagggactaacaatgttaatctgataaggacagcaaaatcatcagaatcagtgtttgtgattgtgtttgaatatgtggtaacatatgaaggatatgacatgaagctttgtatctcctttggccttaagcaagacctgtgtgctgtaagtgccatttctcagtattttcaaggctctaacccgccttcatccaatgtgtggcctacaataactagcatttgttgatttgtctcttgtatcaaaattcccaaataaaacttaaaaccactgactctgtcagagaaactgaaacactgggacatttcatccttcaattcctcggtattgattttatgttgattgattttcagaatttctctacagaaacgaaagggaaattttctaatctgctttatccatgtacttgcatttcagacatggacatgctattgttatttggctcataactgtttccaaatgttagttattatggacccaatttattaacaacattagctgatttttacctatcagtattattttatttcttttagtttatagatctgtgcaacatttttgtactgtatgtcttcaaacctggcagtattaatacccttcttactgacatatgtacttttagttttagaaaacttttatatttatgtgtcttatttttatatttctttatttattacacagtgtagtgtataatactgtagtttgtattaatacaataatatattttagtatgaaaatttggaaagttgataagatttaaagtagagatgcaattggttctcctgcattgagatttgatttaacagtgttatgttaacatttatacttgccttggactgtagaacagaacttaaatgggaatgtattagttttacaactacaatcaagtcattttacctttacccagtttttaatataaaacttaaattttgaaattcactgtgtgactaatagcatgatgctctgcagttttattaagaaatcagcctaaccatacaactctcatttccttagtaagccaaattaggattaacttctataaacagtgttgggaacaatgtttaacattttgtgccaatttgttcctgtattcatgtatgtaagttacagatctgactcttcatttttaagttccttgttacatcatggtcattttctagttttttaccagactcccatctcacaataaaatgcatcaacaagcctg

SEQ ID NO: 8160 - protein, 906 aa, Homo sapiens
MTSHKSGRDQRHVTQSGCNRKFKCTECGKAFKYKHHLKEHLRIHSGEKPYECPNCKKRFSHSGSYSSHISSKKCISLIPVNGRPRTGLKTSQCSSPSLSASPGSPTRPQIRQKIENKPLQEQLSVNQIKTEPVDYEFKPIVVASGINCSTPLQNGVFTGGGPLQATSSPQGMVQAVVLPTVGLVSPISINLSDIQNVLKVAVDGNVIRQVLENNQANLASKEQETINASPIQQGGHSVISAISLPLVDQDGTTKIIINYSLEQPSQLQVVPQNLKKENPVATNSCKSEKLPEDLTVKSEKDKSFEGGVNDSTCLLCDDCPGDINALPELKHYDLKQPTQPPPLPAAEAEKPESSVSSATGDGNLSPSQPPLKNLLSLLKAYYALNAQPSAEELSKIADSVNLPLDVVKKWFEKMQAGQISVQSSEPSSPEPGKVNIPAKNNDQPQSANANEPQDSTVNLQSPLKMTNSPVLPVGSTTNGSRSSTPSPSPLNLSSSRNTQGYLYTAEGAQEEPQVEPLDLSLPKQQGELLERSTITSVYQNSVYSVQEEPLNLSCAKKEPQKDSCVTDSEPVVNVIPPSANPINIAIPTVTAQLPTIVAIADQNSVPCLRALAANKQTILIPQVAYTYSTTVSPAVQEPPLKVIQPNGNQDERQDTSSEGVSNVEDQNDSDSTPPKKKMRKTENGMYACDLCDKIFQKSSSLLRHKYEHTGKRPHECGICKKAFKHKHHLIEHMRLHSGEKPYQCDKCGKRFSHSGSYSQHMNHRYSYCKREAEERDSTEQEEAGPEILSNEHVGARASPSQGDSDERESLTREEDEDSEKEEEEEDKEMEELQEEKECEKPQGDEEEEEEEEEVEEEEVEEAENEGEEAKTEGLMKDDRAESQASSLGQKVGESSEQVSEEKTNEA

SEQ ID NO: 8161 - DNA, 1510 bp, Homo sapiens
ggtgactcgagcatttagacacaagcgagaggatcatggcggatggccccaggtgtaagcgcagaaagcaggcgaacccgcggcgcaataacgttacaaattataatactgtggtagaaacaaattcagattcagatgatgaagacaaactgcatattgtggaagaagaaagtgttacagatgcagctgactgtgaaggtgtaccagaggatgacctgccaacagaccagacagtgttaccagggaggagcagtgaaagagaagggaatgctaagaactgctgggaggatgacagaaaggaagggcaagaaatcctggggcctgaagctcaggcagatgaagcaggatgtacagtaaaagatgatgaatgcgagtcagatgcagaaaatgagcaaaaccatgatcctaatgttgaagagtttctacaacaacaagacactgctgtcatttttcctgaggcacctgaagaggaccagaggcagggcacaccagaagccagtggtcatgatgaaaatggaacaccagatgcattttcacaattactcacctgtccatattgtgatagaggctataaacgctttacctctctgaaagaacacattaaatatcgtcatgaaaagaatgaagataactttagttgctccctgtgcagttacacctttgcatacagaacccaacttgaacgtcacatgacatcacataaatcaggaagagatcaaagacatgtgacgcagtctgggtgtaatcgtaaattcaaatgcactgagtgtggaaaagctttcaaatacaaacatcacctaaaagagcacttaagaattcacagtggagagaagccatatgaatgcccaaactgcaagaaacgcttttcccattctggctcctatagctcacacataagcagtaagaaatgtatcagcttgatacctgtgaatgggcgaccaagaacaggactcaagacatctcagtgttcttcaccgtctctttcagcatcaccaggcagtcccacacgaccacagatacggcaaaagatagagaataaaccccttcaagaacaactttctgttaaccaaattaaaactgaacctgtggattatgaattcaaacccatagtggttgcttcaggaatcaactgttcaacccctttacaaaatggggttttcactggtggtggcccattacaggcaaccagttctcctcagggcatggtgcaagctgttgttctgccaacagttggtttggtgtctcccataagtatcaatttaagtgatattcagaatgtacttaaagtggcggtagatggtaatgtaataaggcaagtgttggagaataatcaagccaatcttgcatccaaagaacaagaaacaatcaatgcttcacccatacaacaaggtggccattctgttatttcagccatcagtcttcctttggttgatcaagatggaacaaccaaaattatcatcaactacagtcttgagcagcctagccaacttcaagttgttcctcaaaattt

SEQ ID NO: 8162 - protein, 490 aa, Homo sapiens
MADGPRCKRRKQANPRRNNVTNYNTVVETNSDSDDEDKLHIVEEESVTDAADCEGVPEDDLPTDQTVLPGRSSEREGNAKNCWEDDRKEGQEILGPEAQADEAGCTVKDDECESDAENEQNHDPNVEEFLQQQDTAVIFPEAPEEDQRQGTPEASGHDENGTPDAFSQLLTCPYCDRGYKRFTSLKEHIKYRHEKNEDNFSCSLCSYTFAYRTQLERHMTSHKSGRDQRHVTQSGCNRKFKCTECGKAFKYKHHLKEHLRIHSGEKPYECPNCKKRFSHSGSYSSHISSKKCISLIPVNGRPRTGLKTSQCSSPSLSASPGSPTRPQIRQKIENKPLQEQLSVNQIKTEPVDYEFKPIVVASGINCSTPLQNGVFTGGGPLQATSSPQGMVQAVVLPTVGLVSPISINLSDIQNVLKVAVDGNVIRQVLENNQANLASKEQETINASPIQQGGHSVISAISLPLVDQDGTTKIIINYSLEQPSQLQVVPQ

SEQ ID NO: 8163 - DNA, 3186 bp, Homo sapiens
ggtgactcgagcatttagacacaagcgagaggatcatggcggatggccccaggtgtaagcgcagaaagcaggcgaacccgcggcgcaataacgttacaaattataatactgtggtagaaacaaattcagattcagatgatgaagacaaactgcatattgtggaagaagaaagtgttacagatgcagctgactgtgaaggtgtaccagaggatgacctgccaacagaccagacagtgttaccagggaggagcagtgaaagagaagggaatgctaagaactgctgggaggatgacagaaaggaagggcaagaaatcctggggcctgaagctcaggcagatgaagcaggatgtacagtaaaagatgatgaatgcgagtcagatgcagaaaatgagcaaaaccatgatcctaatgttgaagagtttctacaacaacaagacactgctgtcatttttcctgaggcacctgaagaggaccagaggcagggcacaccagaagccagtggtcatgatgaaaatggaacaccagatgcattttcacaattactcacctgtccatattgtgatagaggctataaacgctttacctctctgaaagaacacattaaatatcgtcatgaaaagaatgaagataactttagttgctccctgtgcagttacacctttgcatacagaacccaacttgaacgtcacatgacatcacataaatcaggaagagatcaaagacatgtgacgcagtctgggtgtaatcgtaaattcaaatgcactgagtgtggaaaagctttcaaatacaaacatcacctaaaagagcacttaagaattcacagtggagagaagccatatgaatgcccaaactgcaagaaacgcttttcccattctggctcctatagctcacacataagcagtaagaaatgtatcagcttgatacctgtgaatgggcgaccaagaacaggactcaagacatctcagtgttcttcaccgtctctttcagcatcaccaggcagtcccacacgaccacagatacggcaaaagatagagaataaaccccttcaagaacaactttctgttaaccaaattaaaactgaacctgtggattatgaattcaaacccatagtggttgcttcaggaatcaactgttcaacccctttacaaaatggggttttcactggtggtggcccattacaggcaaccagttctcctcagggcatggtgcaagctgttgttctgccaacagttggtttggtgtctcccataagtatcaatttaagtgatattcagaatgtacttaaagtggcggtagatggtaatgtaataaggcaagtgttggagaataatcaagccaatcttgcatccaaagaacaagaaacaatcaatgcttcacccatacaacaaggtggccattctgttatttcagccatcagtcttcctttggttgatcaagatggaacaaccaaaattatcatcaactacagtcttgagcagcctagccaacttcaagttgttcctcaaaatttaaaaaaagaaaatccagtcgctacaaacagttgtaaaagtgaaaagttaccagaagatcttactgttaagtctgagaaggacaaaagctttgaagggggggtgaatgatagcacttgtcttctgtgtgatgattgtccaggagatattaatgcacttccagaattaaagcactatgacctaaagcagcctactcagcctcctccactccctgcagcagaagctgagaagcctgagtcctctgtttcatcagctactggagatggcaatttgtctcctagtcagccacctttaaagaacctcttgtctctcctaaaagcatattatgctttgaatgcacaaccaagtgcagaagagctctcaaaaattgctgattcagtaaacctaccactggatgtagtaaaaaagtggtttgaaaagatgcaagctggacagatttcagtgcagtcttctgaaccatcttctcctgaaccaggcaaagtaaatatccctgccaagaacaatgatcagcctcaatctgcaaatgcaaatgaaccccaggacagcacagtaaatctacaaagtcctttgaagatgactaactccccagttttaccagtgggatcaaccaccaatggttccagaagtagtacaccatccccatcacctctaaacctttcctcatccagaaatacacagggttacttgtacacagctgagggtgcacaagaagagccacaagtagaacctcttgatctttcactaccaaagcaacagggagaattattagaaaggtcaactatcactagtgtttaccagaacagtgtttattctgtccaggaagaacccttgaacttgtcttgcgcaaaaaaggagccacaaaaggacagttgtgttacagactcagaaccagttgtaaatgtaatcccaccaagtgccaaccccataaatatcgctatacctacagtcactgcccagttacccacaatcgtggccattgctgaccagaacagtgttccatgcttaagagcgctagctgccaataagcaaacgattctgattccccaggtggcatacacctactcaactacggtcagccctgcagtccaagaaccacccttgaaagtgatccagccaaatggaaatcaggatgaaagacaagatactagctcagaaggagtatcaaatgtagaggatcagaatgactctgattctacaccgcccaaaaagaaaatgcggaagacagaaaatggaatgtatgcttgtgatttgtgtgacaagatattccaaaagagtagttcattattgagacataaatatgaacacacaggtaaaagacctcatgagtgtggaatctgtaaaaaggcatttaaacacaaacatcatttgattgaacacatgcgattacattctggagaaaagccctatcaatgtgacaaatgtggaaagcgcttctcacactctgggtcttattctcaacacatgaatcatcgctactcctactgtaagagagaagcggaagaacgtgacagcacagagcaggaagaggcagggcctgaaatcctctcgaatgagcacgtgggtgccagggcgtctccctcacagggcgactcggacgagagagagagtttgacaagggaagaggatgaagacagtgaaaaagaggaagaggaggaggataaagagatggaagaattgc

SEQ ID NO: 8164 - protein, 1049 aa, Homo sapiens
MADGPRCKRRKQANPRRNNVTNYNTVVETNSDSDDEDKLHIVEEESVTDAADCEGVPEDDLPTDQTVLPGRSSEREGNAKNCWEDDRKEGQEILGPEAQADEAGCTVKDDECESDAENEQNHDPNVEEFLQQQDTAVIFPEAPEEDQRQGTPEASGHDENGTPDAFSQLLTCPYCDRGYKRFTSLKEHIKYRHEKNEDNFSCSLCSYTFAYRTQLERHMTSHKSGRDQRHVTQSGCNRKFKCTECGKAFKYKHHLKEHLRIHSGEKPYECPNCKKRFSHSGSYSSHISSKKCISLIPVNGRPRTGLKTSQCSSPSLSASPGSPTRPQIRQKIENKPLQEQLSVNQIKTEPVDYEFKPIVVASGINCSTPLQNGVFTGGGPLQATSSPQGMVQAVVLPTVGLVSPISINLSDIQNVLKVAVDGNVIRQVLENNQANLASKEQETINASPIQQGGHSVISAISLPLVDQDGTTKIIINYSLEQPSQLQVVPQNLKKENPVATNSCKSEKLPEDLTVKSEKDKSFEGGVNDSTCLLCDDCPGDINALPELKHYDLKQPTQPPPLPAAEAEKPESSVSSATGDGNLSPSQPPLKNLLSLLKAYYALNAQPSAEELSKIADSVNLPLDVVKKWFEKMQAGQISVQSSEPSSPEPGKVNIPAKNNDQPQSANANEPQDSTVNLQSPLKMTNSPVLPVGSTTNGSRSSTPSPSPLNLSSSRNTQGYLYTAEGAQEEPQVEPLDLSLPKQQGELLERSTITSVYQNSVYSVQEEPLNLSCAKKEPQKDSCVTDSEPVVNVIPPSANPINIAIPTVTAQLPTIVAIADQNSVPCLRALAANKQTILIPQVAYTYSTTVSPAVQEPPLKVIQPNGNQDERQDTSSEGVSNVEDQNDSDSTPPKKKMRKTENGMYACDLCDKIFQKSSSLLRHKYEHTGKRPHECGICKKAFKHKHHLIEHMRLHSGEKPYQCDKCGKRFSHSGSYSQHMNHRYSYCKREAEERDSTEQEEAGPEILSNEHVGARASPSQGDSDERESLTREEDEDSEKEEEEEDKEMEE

SEQ ID NO: 8165 - DNA, 5346 bp, Homo sapiens
ggtgactcgagcatttagacacaagcgagaggatcatggcggatggccccaggtgtaagcgcagaaagcaggcgaacccgcggcgcaataacgttacaaattataatactgtggtagaaacaaattcagattcagatgatgaagacaaactgcatattgtggaagaagaaagtgttacagatgcagctgactgtgaaggtgtaccagaggatgacctgccaacagaccagacagtgttaccagggaggagcagtgaaagagaagggaatgctaagaactgctgggaggatgacagaaaggaagggcaagaaatcctggggcctgaagctcaggcagatgaagcaggatgtacagtaaaagatgatgaatgcgagtcagatgcagaaaatgagcaaaaccatgatcctaatgttgaagagtttctacaacaacaagacactgctgtcatttttcctgaggcacctgaagaggaccagaggcagggcacaccagaagccagtggtcatgatgaaaatggaacaccagatgcattttcacaattactcacctgtccatattgtgatagaggctataaacgctttacctctctgaaagaacacattaaatatcgtcatgaaaagaatgaagataactttagttgctccctgtgcagttacacctttgcatacagaacccaacttgaacgtcacatgacatcacataaatcaggaagagatcaaagacatgtgacgcagtctgggtgtaatcgtaaattcaaatgcactgagtgtggaaaagctttcaaatacaaacatcacctaaaagagcacttaagaattcacagtggagagaagccatatgaatgcccaaactgcaagaaacgcttttcccattctggctcctatagctcacacataagcagtaagaaatgtatcagcttgatacctgtgaatgggcgaccaagaacaggactcaagacatctcagtgttcttcaccgtctctttcagcatcaccaggcagtcccacacgaccacagatacggcaaaagatagagaataaaccccttcaagaacaactttctgttaaccaaattaaaactgaacctgtggattatgaattcaaacccatagtggttgcttcaggaatcaactgttcaacccctttacaaaatggggttttcactggtggtggcccattacaggcaaccagttctcctcagggcatggtgcaagctgttgttctgccaacagttggtttggtgtctcccataagtatcaatttaagtgatattcagaatgtacttaaagtggcggtagatggtaatgtaataaggcaagtgttggagaataatcaagccaatcttgcatccaaagaacaagaaacaatcaatgcttcacccatacaacaaggtggccattctgttatttcagccatcagtcttcctttggttgatcaagatggaacaaccaaaattatcatcaactacagtcttgagcagcctagccaacttcaagttgttcctcaaaatttaaaaaaagaaaatccagtcgctacaaacagttgtaaaagtgaaaagttaccagaagatcttactgttaagtctgagaaggacaaaagctttgaagggggggtgaatgatagcacttgtcttctgtgtgatgattgtccaggagatattaatgcacttccagaattaaagcactatgacctaaagcagcctactcagcctcctccactccctgcagcagaagctgagaagcctgagtcctctgtttcatcagctactggagatggcaatttgtctcctagtcagccacctttaaagaacctcttgtctctcctaaaagcatattatgctttgaatgcacaaccaagtgcagaagagctctcaaaaattgctgattcagtaaacctaccactggatgtagtaaaaaagtggtttgaaaagatgcaagctggacagatttcagtgcagtcttctgaaccatcttctcctgaaccaggcaaagtaaatatccctgccaagaacaatgatcagcctcaatctgcaaatgcaaatgaaccccaggacagcacagtaaatctacaaagtcctttgaagatgactaactccccagttttaccagtgggatcaaccaccaatggttccagaagtagtacaccatccccatcacctctaaacctttcctcatccagaaatacacagggttacttgtacacagctgagggtgcacaagaagagccacaagtagaacctcttgatctttcactaccaaagcaacagggagaattattagaaaggtcaactatcactagtgtttaccagaacagtgtttattctgtccaggaagaacccttgaacttgtcttgcgcaaaaaaggagccacaaaaggacagttgtgttacagactcagaaccagttgtaaatgtaatcccaccaagtgccaaccccataaatatcgctatacctacagtcactgcccagttacccacaatcgtggccattgctgaccagaacagtgttccatgcttaagagcgctagctgccaataagcaaacgattctgattccccaggtggcatacacctactcaactacggtcagccctgcagtccaagaaccacccttgaaagtgatccagccaaatggaaatcaggatgaaagacaagatactagctcagaaggagtatcaaatgtagaggatcagaatgactctgattctacaccgcccaaaaagaaaatgcggaagacagaaaatggaatgtatgcttgtgatttgtgtgacaagatattccaaaagagtagttcattattgagacataaatatgaacacacaggtaaaagacctcatgagtgtggaatctgtaaaaaggcatttaaacacaaacatcatttgattgaacacatgcgattacattctggagaaaagccctatcaatgtgacaaatgtggaaagcgcttctcacactctgggtcttattctcaacacatgaatcatcgctactcctactgtaagagagaagcggaagaacgtgacagcacagagcaggaagaggcagggcctgaaatcctctcgaatgagcacgtgggtgccagggcgtctccctcacagggcgactcggacgagagagagagtttgacaagggaagaggatgaagacagtgaaaaagaggaagaggaggaggataaagagatggaagaattgcaggaagaaaaagaatgtgaaaaaccacaaggggatgaggaagaggaggaggaggaggaagaagtggaagaagaagaggtagaagaggcagagaatgagggagaagaagcaaaaactgaaggtctgatgaaggatgacagggctgaaagtcaagcaagcagcttaggacaaaaagtaggcgagagtagtgagcaagtgtctgaagaaaagacaaatgaagcctaatcgtttttctagaaggaaaataaattctaattgataatgaatttcgttcaatattatccttgcttttcatggaaacacagtaacctgtatgctgtgattcctgttcactactgtgtaaagtaaaaactaaaaaaatacaaaatacaaaacacacacacacacacacacacacacacacacacacacacaaaataaatccgggtgtgcctgaacctcagacctagtaatttttcatgcagttttcaaagttaggaacaagtttgtaacatgcagcagattagaaaaccttaatgactcagagagcaacaatacaagaggttaaaggaagctgattaattagatatgcatctggcattgttttatcttatcagtattatcactcttatgttggtttattcttaagctgtacaattgggagaaattttataattttttattggtaaacatatgctaaatccgcttcagtattttattatgttttttaaaatgtgagaacttctgcactacaaaattcccttcacagagaagtataatgtagttccaacccgtgctaactaccttttataaattcagtctagaaggtagtaatttctaatatttagatgtcttagtagagcgtattatcatttaaagtgtattgttagccttaagaaagcagctgatagaagaactgaagtttcttactcacgtggtttaaaatggagttcaaaagattgccattgagttctgattgcagggactaacaatgttaatctgataaggacagcaaaatcatcagaatcagtgtttgtgattgtgtttgaatatgtggtaacatatgaaggatatgacatgaagctttgtatctcctttggccttaagcaagacctgtgtgctgtaagtgccatttctcagtattttcaaggctctaacccgccttcatccaatgtgtggcctacaataactagcatttgttgatttgtctcttgtatcaaaattcccaaataaaacttaaaaccactgactctgtcagagaaactgaaacactgggacatttcatccttcaattcctcggtattgattttatgttgattgattttcagaatttctctacagaaacgaaagggaaattttctaatctgctttatccatgtacttgcatttcagacatggacatgctattgttatttggctcataactgtttccaaatgttagttattatggacccaatttattaacaacattagctgatttttacctatcagtattattttatttcttttagtttatagatctgtgcaacatttttgtactgtatgtcttcaaacctggcagtattaatacccttcttactgacatatgtacttttagttttagaaaacttttatatttatgtgtcttatttttatatttctttatttattacacagtgtagtgtataatactgtagtttgtattaatacaataatatattttagtatgaaaatttggaaagttgataagatttaaagtagagatgcaattggttctcctgcattgagatttgatttaacagtgttatgttaacatttatacttgccttggactgtagaacagaacttaaatgggaatgtattagttttacaactacaatcaagtcattttacctttacccagtttttaatataaaacttaaattttgaaattcactgtgtgactaatagcatgatgctctgcagttttattaagaaatcagcctaaccatacaactctcatttccttagtaagccaaattaggattaacttctataaacagtgttgggaacaatgtttaacattttgtgccaatttgttcctgtattcatgtatgtaagttacagatctgactcttcatttttaagttccttgttacatcatggtcattttctagttttttaccagactcccatctcacaataaaatgcatcaacaagcctg

SEQ ID NO: 8166 - protein, 1124 aa, Homo sapiens
MADGPRCKRRKQANPRRNNVTNYNTVVETNSDSDDEDKLHIVEEESVTDAADCEGVPEDDLPTDQTVLPGRSSEREGNAKNCWEDDRKEGQEILGPEAQADEAGCTVKDDECESDAENEQNHDPNVEEFLQQQDTAVIFPEAPEEDQRQGTPEASGHDENGTPDAFSQLLTCPYCDRGYKRFTSLKEHIKYRHEKNEDNFSCSLCSYTFAYRTQLERHMTSHKSGRDQRHVTQSGCNRKFKCTECGKAFKYKHHLKEHLRIHSGEKPYECPNCKKRFSHSGSYSSHISSKKCISLIPVNGRPRTGLKTSQCSSPSLSASPGSPTRPQIRQKIENKPLQEQLSVNQIKTEPVDYEFKPIVVASGINCSTPLQNGVFTGGGPLQATSSPQGMVQAVVLPTVGLVSPISINLSDIQNVLKVAVDGNVIRQVLENNQANLASKEQETINASPIQQGGHSVISAISLPLVDQDGTTKIIINYSLEQPSQLQVVPQNLKKENPVATNSCKSEKLPEDLTVKSEKDKSFEGGVNDSTCLLCDDCPGDINALPELKHYDLKQPTQPPPLPAAEAEKPESSVSSATGDGNLSPSQPPLKNLLSLLKAYYALNAQPSAEELSKIADSVNLPLDVVKKWFEKMQAGQISVQSSEPSSPEPGKVNIPAKNNDQPQSANANEPQDSTVNLQSPLKMTNSPVLPVGSTTNGSRSSTPSPSPLNLSSSRNTQGYLYTAEGAQEEPQVEPLDLSLPKQQGELLERSTITSVYQNSVYSVQEEPLNLSCAKKEPQKDSCVTDSEPVVNVIPPSANPINIAIPTVTAQLPTIVAIADQNSVPCLRALAANKQTILIPQVAYTYSTTVSPAVQEPPLKVIQPNGNQDERQDTSSEGVSNVEDQNDSDSTPPKKKMRKTENGMYACDLCDKIFQKSSSLLRHKYEHTGKRPHECGICKKAFKHKHHLIEHMRLHSGEKPYQCDKCGKRFSHSGSYSQHMNHRYSYCKREAEERDSTEQEEAGPEILSNEHVGARASPSQGDSDERESLTREEDEDSEKEEEEEDKEMEELQEEKECEKPQGDEEEEEEEEEVEEEEVEEAENEGEEAKTEGLMKDDRAESQASSLGQKVGESSEQVSEEKTNEA

SEQ ID NO: 8167 - DNA, 5959 bp, Homo sapiens
ggtgactcgagcatttagacacaagcgagaggatcatggcggatggccccaggtgtaagcgcagaaagcaggcgaacccgcggcgcaataacgttacaaattataatactgtggtagaaacaaattcagattcagatgatgaagacaaactgcatattgtggaagaagaaagtgttacagatgcagctgactgtgaaggtgtaccagaggatgacctgccaacagaccagacagtgttaccagggaggagcagtgaaagagaagggaatgctaagaactgctgggaggatgacagaaaggaagggcaagaaatcctggggcctgaagctcaggcagatgaagcaggatgtacagtaaaagatgatgaatgcgagtcagatgcagaaaatgagcaaaaccatgatcctaatgttgaagagtttctacaacaacaagacactgctgtcatttttcctgaggcacctgaagaggaccagaggcagggcacaccagaagccagtggtcatgatgaaaatggaacaccagatgcattttcacaattactcacctgtccatattgtgatagaggctataaacgctttacctctctgaaagaacacattaaatatcgtcatgaaaagaatgaagataactttagttgctccctgtgcagttacacctttgcatacagaacccaacttgaacgtcacatgacatcacataaatcaggaagagatcaaagacatgtgacgcagtctgggtgtaatcgtaaattcaaatgcactgagtgtggaaaagctttcaaatacaaacatcacctaaaagagcacttaagaattcacagtggagagaagccatatgaatgcccaaactgcaagaaacgcttttcccattctggctcctatagctcacacataagcagtaagaaatgtatcagcttgatacctgtgaatgggcgaccaagaacaggactcaagacatctcagtgttcttcaccgtctctttcagcatcaccaggcagtcccacacgaccacagatacggcaaaagatagagaataaaccccttcaagaacaactttctgttaaccaaattaaaactgaacctgtggattatgaattcaaacccatagtggttgcttcaggaatcaactgttcaacccctttacaaaatggggttttcactggtggtggcccattacaggcaaccagttctcctcagggcatggtgcaagctgttgttctgccaacagttggtttggtgtctcccataagtatcaatttaagtgatattcagaatgtacttaaagtggcggtagatggtaatgtaataaggcaagtgttggagaataatcaagccaatcttgcatccaaagaacaagaaacaatcaatgcttcacccatacaacaaggtggccattctgttatttcagccatcagtcttcctttggttgatcaagatggaacaaccaaaattatcatcaactacagtcttgagcagcctagccaacttcaagttgttcctcaaaatttaaaaaaagaaaatccagtcgctacaaacagttgtaaaagtgaaaagttaccagaagatcttactgttaagtctgagaaggacaaaagctttgaagggggggtgaatgatagcacttgtcttctgtgtgatgattgtccaggagatattaatgcacttccagaattaaagcactatgacctaaagcagcctactcagcctcctccactccctgcagcagaagctgagaagcctgagtcctctgtttcatcagctactggagatggcaatttgtctcctagtcagccacctttaaagaacctcttgtctctcctaaaagcatattatgctttgaatgcacaaccaagtgcagaagagctctcaaaaattgctgattcagtaaacctaccactggatgtagtaaaaaagtggtttgaaaagatgcaagctggacagatttcagtgcagtcttctgaaccatcttctcctgaaccaggcaaagtaaatatccctgccaagaacaatgatcagcctcaatctgcaaatgcaaatgaaccccaggacagcacagtaaatctacaaagtcctttgaagatgactaactccccagttttaccagtgggatcaaccaccaatggttccagaagtagtacaccatccccatcacctctaaacctttcctcatccagaaatacacagggttacttgtacacagctgagggtgcacaagaagagccacaagtagaacctcttgatctttcactaccaaagcaacagggagaattattagaaaggtcaactatcactagtgtttaccagaacagtgtttattctgtccaggaagaacccttgaacttgtcttgcgcaaaaaaggagccacaaaaggacagttgtgttacagactcagaaccagttgtaaatgtaatcccaccaagtgccaaccccataaatatcgctatacctacagtcactgcccagttacccacaatcgtggccattgctgaccagaacagtgttccatgcttaagagcgctagctgccaataagcaaacgattctgattccccaggtggcatacacctactcaactacggtcagccctgcagtccaagaaccacccttgaaagtgatccagccaaatggaaatcaggatgaaagacaagatactagctcagaaggagtatcaaatgtagaggatcagaatgactctgattctacaccgcccaaaaagaaaatgcggaagacagaaaatggaatgtatgcttgtgatttgtgtgacaagatattccaaaagagtagttcattattgagacataaatatgaacacacaggtaaaagacctcatgagtgtggaatctgtaaaaaggcatttaaacacaaacatcatttgattgaacacatgcgattacattctggagaaaagccctatcaatgtgacaaatgtggaaagcgcttctcacactctgggtcttattctcaacacatgaatcatcgctactcctactgtaagagagaagcggaagaacgtgacagcacagagcaggaagaggcagggcctgaaatcctctcgaatgagcacgtgggtgccagggcgtctccctcacagggcgactcggacgagagagagagtttgacaagggaagaggatgaagacagtgaaaaagaggaagaggaggaggataaagagatggaagaattgcaggaagaaaaagaatgtgaaaaaccacaaggggatgaggaagaggaggaggaggaggaagaagtggaagaagaagaggtagaagaggcagagaatgagggagaagaagcaaaaactgaaggtctgatgaaggatgacagggctgaaagtcaagcaagcagcttaggacaaaaagtaggcgagagtagtgagcaagtgtctgaagaaaagacaaatgaagcctaatcgtttttctagaaggaaaataaattctaattgataatgaatttcgttcaatattatccttgcttttcatggaaacacagtaacctgtatgctgtgattcctgttcactactgtgtaaagtaaaaactaaaaaaatacaaaatacaaaacacacacacacacacacacacacacacacacacacacacaaaataaatccgggtgtgcctgaacctcagacctagtaatttttcatgcagttttcaaagttaggaacaagtttgtaacatgcagcagattagaaaaccttaatgactcagagagcaacaatacaagaggttaaaggaagctgattaattagatatgcatctggcattgttttatcttatcagtattatcactcttatgttggtttattcttaagctgtacaattgggagaaattttataattttttattggtaaacatatgctaaatccgcttcagtattttattatgttttttaaaatgtgagaacttctgcactacaaaattcccttcacagagaagtataatgtagttccaacccgtgctaactaccttttataaattcagtctagaaggtagtaatttctaatatttagatgtcttagtagagcgtattatcatttaaagtgtattgttagccttaagaaagcagctgatagaagaactgaagtttcttactcacgtggtttaaaatggagttcaaaagattgccattgagttctgattgcagggactaacaatgttaatctgataaggacagcaaaatcatcagaatcagtgtttgtgattgtgtttgaatatgtggtaacatatgaaggatatgacatgaagctttgtatctcctttggccttaagcaagacctgtgtgctgtaagtgccatttctcagtattttcaaggctctaacccgccttcatccaatgtgtggcctacaataactagcatttgttgatttgtctcttgtatcaaaattcccaaataaaacttaaaaccactgactctgtcagagaaactgaaacactgggacatttcatccttcaattcctcggtattgattttatgttgattgattttcagaatttctctacagaaacgaaagggaaattttctaatctgctttatccatgtacttgcatttcagacatggacatgctattgttatttggctcataactgtttccaaatgttagttattatggacccaatttattaacaacattagctgatttttacctatcagtattattttatttcttttagtttatagatctgtgcaacatttttgtactgtatgtcttcaaacctggcagtattaatacccttcttactgacatatgtacttttagttttagaaaacttttatatttatgtgtcttatttttatatttctttatttattacacagtgtagtgtataatactgtagtttgtattaatacaataatatattttagtatgaaaatttggaaagttgataagatttaaagtagagatgcaattggttctcctgcattgagatttgatttaacagtgttatgttaacatttatacttgccttggactgtagaacagaacttaaatgggaatgtattagttttacaactacaatcaagtcattttacctttacccagtttttaatataaaacttaaattttgaaattcactgtgtgactaatagcatgatgctctgcagttttattaagaaatcagcctaaccatacaactctcatttccttagtaagccaaattaggattaacttctataaacagtgttgggaacaatgtttaacattttgtgccaatttgttcctgtattcatgtatgtaagttacagatctgactcttcatttttaagttccttgttacatcatggtcattttctagttttttaccagactcccatctcacaataaaatgcatcaacaagcctgaactgctgtcattcttttcatcattatcagtattttctttggaaaactgtgaaatggggtacattgtcatcctgcatttgattcatcttgagctgaatttgggtaacactaaatgttttagacattctccactaaattatggattttcttgtggctaaatgtttctggagaggtcagagttgacaaaacctcttcacaggttgctccttcttcctgaaatccttaatcctccgcatttcatgcttcaggtcatttcagggaagcctgggtttagatgcctttctgactctcagctcctgcacttctgtcatcatacctctgatactattatttatattccttccccactaggaacaggaaccacatttgtcatagtcactctcacattcctcactgcctaacagggtgcctggcataagttgggacaacagatatttgttgaataaaaatataatttgcatgtttatggagctcagctatgttctcactttttttgcttctaattccagaatatatgttaaatgatctaataatttgattattttcttataagtcttattaaacactagtcataatagacacaataaattatgccttctttttctattgcctt

SEQ ID NO: 8168 - protein, 1124 aa, Homo sapiens; identical to SEQ ID NO: 8166

SEQ ID NO: 8169 - DNA, 5274 bp, Homo sapiens
atttagacacaagcgagaggatcatggcggatggccccaggtgtaagcgcagaaagcaggcgaacccgcggcgcaataacgttacaaattataatactgtggtagaaacaaattcagattcagatgatgaagacaaactgcatattgtggaagaagaaagtgttacagatgcagctgactgtgaaggtgtaccagaggatgacctgccaacagaccagacagtgttaccagggaggagcagtgaaagagaagggaatgctaagaactgctgggaggatgacataaaagatgatgaatgcgagtcagatgcagaaaatgagcaaaaccatgatcctaatgttgaagagtttctacaacaacaagacactgctgtcatttttcctgaggcacctgaagaggaccagaggcagggcacaccagaagccagtggtcatgatgaaaatggaacaccagatgcattttcacaattactcacctgtccatattgtgatagaggctataaacgctttacctctctgaaagaacacattaaatatcgtcatgaaaagaatgaagataactttagttgctccctgtgcagttacacctttgcatacagaacccaacttgaacgtcacatgacatcacataaatcaggaagagatcaaagacatgtgacgcagtctgggtgtaatcgtaaattcaaatgcactgagtgtggaaaagctttcaaatacaaacatcacctaaaagagcacttaagaattcacagtggagagaagccatatgaatgcccaaactgcaagaaacgcttttcccattctggctcctatagctcacacataagcagtaagaaatgtatcagcttgatacctgtgaatgggcgaccaagaacaggactcaagacatctcagtgttcttcaccgtctctttcagcatcaccaggcagtcccacacgaccacagatacggcaaaagatagagaataaaccccttcaagaacaactttctgttaaccaaattaaaactgaacctgtggattatgaattcaaacccatagtggttgcttcaggaatcaactgttcaacccctttacaaaatggggttttcactggtggtggcccattacaggcaaccagttctcctcagggcatggtgcaagctgttgttctgccaacagttggtttggtgtctcccataagtatcaatttaagtgatattcagaatgtacttaaagtggcggtagatggtaatgtaataaggcaagtgttggagaataatcaagccaatcttgcatccaaagaacaagaaacaatcaatgcttcacccatacaacaaggtggccattctgttatttcagccatcagtcttcctttggttgatcaagatggaacaaccaaaattatcatcaactacagtcttgagcagcctagccaacttcaagttgttcctcaaaatttaaaaaaagaaaatccagtcgctacaaacagttgtaaaagtgaaaagttaccagaagatcttactgttaagtctgagaaggacaaaagctttgaagggggggtgaatgatagcacttgtcttctgtgtgatgattgtccaggagatattaatgcacttccagaattaaagcactatgacctaaagcagcctactcagcctcctccactccctgcagcagaagctgagaagcctgagtcctctgtttcatcagctactggagatggcaatttgtctcctagtcagccacctttaaagaacctcttgtctctcctaaaagcatattatgctttgaatgcacaaccaagtgcagaagagctctcaaaaattgctgattcagtaaacctaccactggatgtagtaaaaaagtggtttgaaaagatgcaagctggacagatttcagtgcagtcttctgaaccatcttctcctgaaccaggcaaagtaaatatccctgccaagaacaatgatcagcctcaatctgcaaatgcaaatgaaccccaggacagcacagtaaatctacaaagtcctttgaagatgactaactccccagttttaccagtgggatcaaccaccaatggttccagaagtagtacaccatccccatcacctctaaacctttcctcatccagaaatacacagggttacttgtacacagctgagggtgcacaagaagagccacaagtagaacctcttgatctttcactaccaaagcaacagggagaattattagaaaggtcaactatcactagtgtttaccagaacagtgtttattctgtccaggaagaacccttgaacttgtcttgcgcaaaaaaggagccacaaaaggacagttgtgttacagactcagaaccagttgtaaatgtaatcccaccaagtgccaaccccataaatatcgctatacctacagtcactgcccagttacccacaatcgtggccattgctgaccagaacagtgttccatgcttaagagcgctagctgccaataagcaaacgattctgattccccaggtggcatacacctactcaactacggtcagccctgcagtccaagaaccacccttgaaagtgatccagccaaatggaaatcaggatgaaagacaagatactagctcagaaggagtatcaaatgtagaggatcagaatgactctgattctacaccgcccaaaaagaaaatgcggaagacagaaaatggaatgtatgcttgtgatttgtgtgacaagatattccaaaagagtagttcattattgagacataaatatgaacacacaggtaaaagacctcatgagtgtggaatctgtaaaaaggcatttaaacacaaacatcatttgattgaacacatgcgattacattctggagaaaagccctatcaatgtgacaaatgtggaaagcgcttctcacactctgggtcttattctcaacacatgaatcatcgctactcctactgtaagagagaagcggaagaacgtgacagcacagagcaggaagaggcagggcctgaaatcctctcgaatgagcacgtgggtgccagggcgtctccctcacagggcgactcggacgagagagagagtttgacaagggaagaggatgaagacagtgaaaaagaggaagaggaggaggataaagagatggaagaattgcaggaagaaaaagaatgtgaaaaaccacaaggggatgaggaagaggaggaggaggaggaagaagtggaagaagaagaggtagaagaggcagagaatgagggagaagaagcaaaaactgaaggtctgatgaaggatgacagggctgaaagtcaagcaagcagcttaggacaaaaagtaggcgagagtagtgagcaagtgtctgaagaaaagacaaatgaagcctaatcgtttttctagaaggaaaataaattctaattgataatgaatttcgttcaatattatccttgcttttcatggaaacacagtaacctgtatgctgtgattcctgttcactactgtgtaaagtaaaaactaaaaaaatacaaaatacaaaacacacacacacacacacacacacacacacacacacacacaaaataaatccgggtgtgcctgaacctcagacctagtaatttttcatgcagttttcaaagttaggaacaagtttgtaacatgcagcagattagaaaaccttaatgactcagagagcaacaatacaagaggttaaaggaagctgattaattagatatgcatctggcattgttttatcttatcagtattatcactcttatgttggtttattcttaagctgtacaattgggagaaattttataattttttattggtaaacatatgctaaatccgcttcagtattttattatgttttttaaaatgtgagaacttctgcactacaaaattcccttcacagagaagtataatgtagttccaacccgtgctaactaccttttataaattcagtctagaaggtagtaatttctaatatttagatgtcttagtagagcgtattatcatttaaagtgtattgttagccttaagaaagcagctgatagaagaactgaagtttcttactcacgtggtttaaaatggagttcaaaagattgccattgagttctgattgcagggactaacaatgttaatctgataaggacagcaaaatcatcagaatcagtgtttgtgattgtgtttgaatatgtggtaacatatgaaggatatgacatgaagctttgtatctcctttggccttaagcaagacctgtgtgctgtaagtgccatttctcagtattttcaaggctctaacccgccttcatccaatgtgtggcctacaataactagcatttgttgatttgtctcttgtatcaaaattcccaaataaaacttaaaaccactgactctgtcagagaaactgaaacactgggacatttcatccttcaattcctcggtattgattttatgttgattgattttcagaatttctctacagaaacgaaagggaaattttctaatctgctttatccatgtacttgcatttcagacatggacatgctattgttatttggctcataactgtttccaaatgttagttattatggacccaatttattaacaacattagctgatttttacctatcagtattattttatttcttttagtttatagatctgtgcaacatttttgtactgtatgtcttcaaacctggcagtattaatacccttcttactgacatatgtacttttagttttagaaaacttttatatttatgtgtcttatttttatatttctttatttattacacagtgtagtgtataatactgtagtttgtattaatacaataatatattttagtatgaaaatttggaaagttgataagatttaaagtagagatgcaattggttctcctgcattgagatttgatttaacagtgttatgttaacatttatacttgccttggactgtagaacagaacttaaatgggaatgtattagttttacaactacaatcaagtcattttacctttacccagtttttaatataaaacttaaattttgaaattcactgtgtgactaatagcatgatgctctgcagttttattaagaaatcagcctaaccatacaactctcatttccttagtaagccaaattaggattaacttctataaacagtgttgggaacaatgtttaacattttgtgccaatttgttcctgtattcatgtatgtaagttacagatctgactcttcatttttaagttccttgttacatcatggtcattttctagttttttaccagactcccatctcacaataaaatgcatcaacaagcctg

SEQ ID NO: 8170 - protein, 1104 aa, Homo sapiens
MADGPRCKRRKQANPRRNNVTNYNTVVETNSDSDDEDKLHIVEEESVTDAADCEGVPEDDLPTDQTVLPGRSSEREGNAKNCWEDDIKDDECESDAENEQNHDPNVEEFLQQQDTAVIFPEAPEEDQRQGTPEASGHDENGTPDAFSQLLTCPYCDRGYKRFTSLKEHIKYRHEKNEDNFSCSLCSYTFAYRTQLERHMTSHKSGRDQRHVTQSGCNRKFKCTECGKAFKYKHHLKEHLRIHSGEKPYECPNCKKRFSHSGSYSSHISSKKCISLIPVNGRPRTGLKTSQCSSPSLSASPGSPTRPQIRQKIENKPLQEQLSVNQIKTEPVDYEFKPIVVASGINCSTPLQNGVFTGGGPLQATSSPQGMVQAVVLPTVGLVSPISINLSDIQNVLKVAVDGNVIRQVLENNQANLASKEQETINASPIQQGGHSVISAISLPLVDQDGTTKIIINYSLEQPSQLQVVPQNLKKENPVATNSCKSEKLPEDLTVKSEKDKSFEGGVNDSTCLLCDDCPGDINALPELKHYDLKQPTQPPPLPAAEAEKPESSVSSATGDGNLSPSQPPLKNLLSLLKAYYALNAQPSAEELSKIADSVNLPLDVVKKWFEKMQAGQISVQSSEPSSPEPGKVNIPAKNNDQPQSANANEPQDSTVNLQSPLKMTNSPVLPVGSTTNGSRSSTPSPSPLNLSSSRNTQGYLYTAEGAQEEPQVEPLDLSLPKQQGELLERSTITSVYQNSVYSVQEEPLNLSCAKKEPQKDSCVTDSEPVVNVIPPSANPINIAIPTVTAQLPTIVAIADQNSVPCLRALAANKQTILIPQVAYTYSTTVSPAVQEPPLKVIQPNGNQDERQDTSSEGVSNVEDQNDSDSTPPKKKMRKTENGMYACDLCDKIFQKSSSLLRHKYEHTGKRPHECGICKKAFKHKHHLIEHMRLHSGEKPYQCDKCGKRFSHSGSYSQHMNHRYSYCKREAEERDSTEQEEAGPEILSNEHVGARASPSQGDSDERESLTREEDEDSEKEEEEEDKEMEELQEEKECEKPQGDEEEEEEEEEVEEEEVEEAENEGEEAKTEGLMKDDRAESQASSLGQKVGESSEQVSEEKTNEA

SEQ ID NO: 8171 - DNA, 5887 bp, Homo sapiens
atttagacacaagcgagaggatcatggcggatggccccaggtgtaagcgcagaaagcaggcgaacccgcggcgcaataacgttacaaattataatactgtggtagaaacaaattcagattcagatgatgaagacaaactgcatattgtggaagaagaaagtgttacagatgcagctgactgtgaaggtgtaccagaggatgacctgccaacagaccagacagtgttaccagggaggagcagtgaaagagaagggaatgctaagaactgctgggaggatgacataaaagatgatgaatgcgagtcagatgcagaaaatgagcaaaaccatgatcctaatgttgaagagtttctacaacaacaagacactgctgtcatttttcctgaggcacctgaagaggaccagaggcagggcacaccagaagccagtggtcatgatgaaaatggaacaccagatgcattttcacaattactcacctgtccatattgtgatagaggctataaacgctttacctctctgaaagaacacattaaatatcgtcatgaaaagaatgaagataactttagttgctccctgtgcagttacacctttgcatacagaacccaacttgaacgtcacatgacatcacataaatcaggaagagatcaaagacatgtgacgcagtctgggtgtaatcgtaaattcaaatgcactgagtgtggaaaagctttcaaatacaaacatcacctaaaagagcacttaagaattcacagtggagagaagccatatgaatgcccaaactgcaagaaacgcttttcccattctggctcctatagctcacacataagcagtaagaaatgtatcagcttgatacctgtgaatgggcgaccaagaacaggactcaagacatctcagtgttcttcaccgtctctttcagcatcaccaggcagtcccacacgaccacagatacggcaaaagatagagaataaaccccttcaagaacaactttctgttaaccaaattaaaactgaacctgtggattatgaattcaaacccatagtggttgcttcaggaatcaactgttcaacccctttacaaaatggggttttcactggtggtggcccattacaggcaaccagttctcctcagggcatggtgcaagctgttgttctgccaacagttggtttggtgtctcccataagtatcaatttaagtgatattcagaatgtacttaaagtggcggtagatggtaatgtaataaggcaagtgttggagaataatcaagccaatcttgcatccaaagaacaagaaacaatcaatgcttcacccatacaacaaggtggccattctgttatttcagccatcagtcttcctttggttgatcaagatggaacaaccaaaattatcatcaactacagtcttgagcagcctagccaacttcaagttgttcctcaaaatttaaaaaaagaaaatccagtcgctacaaacagttgtaaaagtgaaaagttaccagaagatcttactgttaagtctgagaaggacaaaagctttgaagggggggtgaatgatagcacttgtcttctgtgtgatgattgtccaggagatattaatgcacttccagaattaaagcactatgacctaaagcagcctactcagcctcctccactccctgcagcagaagctgagaagcctgagtcctctgtttcatcagctactggagatggcaatttgtctcctagtcagccacctttaaagaacctcttgtctctcctaaaagcatattatgctttgaatgcacaaccaagtgcagaagagctctcaaaaattgctgattcagtaaacctaccactggatgtagtaaaaaagtggtttgaaaagatgcaagctggacagatttcagtgcagtcttctgaaccatcttctcctgaaccaggcaaagtaaatatccctgccaagaacaatgatcagcctcaatctgcaaatgcaaatgaaccccaggacagcacagtaaatctacaaagtcctttgaagatgactaactccccagttttaccagtgggatcaaccaccaatggttccagaagtagtacaccatccccatcacctctaaacctttcctcatccagaaatacacagggttacttgtacacagctgagggtgcacaagaagagccacaagtagaacctcttgatctttcactaccaaagcaacagggagaattattagaaaggtcaactatcactagtgtttaccagaacagtgtttattctgtccaggaagaacccttgaacttgtcttgcgcaaaaaaggagccacaaaaggacagttgtgttacagactcagaaccagttgtaaatgtaatcccaccaagtgccaaccccataaatatcgctatacctacagtcactgcccagttacccacaatcgtggccattgctgaccagaacagtgttccatgcttaagagcgctagctgccaataagcaaacgattctgattccccaggtggcatacacctactcaactacggtcagccctgcagtccaagaaccacccttgaaagtgatccagccaaatggaaatcaggatgaaagacaagatactagctcagaaggagtatcaaatgtagaggatcagaatgactctgattctacaccgcccaaaaagaaaatgcggaagacagaaaatggaatgtatgcttgtgatttgtgtgacaagatattccaaaagagtagttcattattgagacataaatatgaacacacaggtaaaagacctcatgagtgtggaatctgtaaaaaggcatttaaacacaaacatcatttgattgaacacatgcgattacattctggagaaaagccctatcaatgtgacaaatgtggaaagcgcttctcacactctgggtcttattctcaacacatgaatcatcgctactcctactgtaagagagaagcggaagaacgtgacagcacagagcaggaagaggcagggcctgaaatcctctcgaatgagcacgtgggtgccagggcgtctccctcacagggcgactcggacgagagagagagtttgacaagggaagaggatgaagacagtgaaaaagaggaagaggaggaggataaagagatggaagaattgcaggaagaaaaagaatgtgaaaaaccacaaggggatgaggaagaggaggaggaggaggaagaagtggaagaagaagaggtagaagaggcagagaatgagggagaagaagcaaaaactgaaggtctgatgaaggatgacagggctgaaagtcaagcaagcagcttaggacaaaaagtaggcgagagtagtgagcaagtgtctgaagaaaagacaaatgaagcctaatcgtttttctagaaggaaaataaattctaattgataatgaatttcgttcaatattatccttgcttttcatggaaacacagtaacctgtatgctgtgattcctgttcactactgtgtaaagtaaaaactaaaaaaatacaaaatacaaaacacacacacacacacacacacacacacacacacacacacaaaataaatccgggtgtgcctgaacctcagacctagtaatttttcatgcagttttcaaagttaggaacaagtttgtaacatgcagcagattagaaaaccttaatgactcagagagcaacaatacaagaggttaaaggaagctgattaattagatatgcatctggcattgttttatcttatcagtattatcactcttatgttggtttattcttaagctgtacaattgggagaaattttataattttttattggtaaacatatgctaaatccgcttcagtattttattatgttttttaaaatgtgagaacttctgcactacaaaattcccttcacagagaagtataatgtagttccaacccgtgctaactaccttttataaattcagtctagaaggtagtaatttctaatatttagatgtcttagtagagcgtattatcatttaaagtgtattgttagccttaagaaagcagctgatagaagaactgaagtttcttactcacgtggtttaaaatggagttcaaaagattgccattgagttctgattgcagggactaacaatgttaatctgataaggacagcaaaatcatcagaatcagtgtttgtgattgtgtttgaatatgtggtaacatatgaaggatatgacatgaagctttgtatctcctttggccttaagcaagacctgtgtgctgtaagtgccatttctcagtattttcaaggctctaacccgccttcatccaatgtgtggcctacaataactagcatttgttgatttgtctcttgtatcaaaattcccaaataaaacttaaaaccactgactctgtcagagaaactgaaacactgggacatttcatccttcaattcctcggtattgattttatgttgattgattttcagaatttctctacagaaacgaaagggaaattttctaatctgctttatccatgtacttgcatttcagacatggacatgctattgttatttggctcataactgtttccaaatgttagttattatggacccaatttattaacaacattagctgatttttacctatcagtattattttatttcttttagtttatagatctgtgcaacatttttgtactgtatgtcttcaaacctggcagtattaatacccttcttactgacatatgtacttttagttttagaaaacttttatatttatgtgtcttatttttatatttctttatttattacacagtgtagtgtataatactgtagtttgtattaatacaataatatattttagtatgaaaatttggaaagttgataagatttaaagtagagatgcaattggttctcctgcattgagatttgatttaacagtgttatgttaacatttatacttgccttggactgtagaacagaacttaaatgggaatgtattagttttacaactacaatcaagtcattttacctttacccagtttttaatataaaacttaaattttgaaattcactgtgtgactaatagcatgatgctctgcagttttattaagaaatcagcctaaccatacaactctcatttccttagtaagccaaattaggattaacttctataaacagtgttgggaacaatgtttaacattttgtgccaatttgttcctgtattcatgtatgtaagttacagatctgactcttcatttttaagttccttgttacatcatggtcattttctagttttttaccagactcccatctcacaataaaatgcatcaacaagcctgaactgctgtcattcttttcatcattatcagtattttctttggaaaactgtgaaatggggtacattgtcatcctgcatttgattcatcttgagctgaatttgggtaacactaaatgttttagacattctccactaaattatggattttcttgtggctaaatgtttctggagaggtcagagttgacaaaacctcttcacaggttgctccttcttcctgaaatccttaatcctccgcatttcatgcttcaggtcatttcagggaagcctgggtttagatgcctttctgactctcagctcctgcacttctgtcatcatacctctgatactattatttatattccttccccactaggaacaggaaccacatttgtcatagtcactctcacattcctcactgcctaacagggtgcctggcataagttgggacaacagatatttgttgaataaaaatataatttgcatgtttatggagctcagctatgttctcactttttttgcttctaattccagaatatatgttaaatgatctaataatttgattattttcttataagtcttattaaacactagtcataatagacacaataaattatgccttctttttctattgcctt

SEQ ID NO: 8172 - protein, 1104 aa, Homo sapiens; identical to SEQ ID NO: 8170

SEQ ID NO: 8173 - DNA, 5629 bp, Homo sapiens
agacacaagcgagaggatcatggcggatggccccaggtgtaagcgcagaaagcaggcgaacccgcggcgcaataacgttttcagtttaaattctcaactggcaattggccgaaaactcccatctgaagacatgatcatccaaatgtcattttgtgatttggctactgtctgcttgacataggaaagcactatcaagaaagactaatggagtgactatcaaaaggaagtcaatggacaaccttaaacttccaccacaagaggaatataaagaggtccctcctgcaccaagaaagatctgcagatctttttcagtgttcttggaggtgtggggtgtgagaacttgatcagtttgtgtcagccaccttgttctctaaagttacaaattataatactgtggtagaaacaaattcagattcagatgatgaagacaaactgcatattgtggaagaagaaagtgttacagatgcagctgactgtgaaggtgtaccagaggatgacctgccaacagaccagacagtgttaccagggaggagcagtgaaagagaagggaatgctaagaactgctgggaggatgacagaaaggaagggcaagaaatcctggggcctgaagctcaggcagatgaagcaggatgtacagtaaaagatgatgaatgcgagtcagatgcagaaaatgagcaaaaccatgatcctaatgttgaagagtttctacaacaacaagacactgctgtcatttttcctgaggcacctgaagaggaccagaggcagggcacaccagaagccagtggtcatgatgaaaatggaacaccagatgcattttcacaattactcacctgtccatattgtgatagaggctataaacgctttacctctctgaaagaacacattaaatatcgtcatgaaaagaatgaagataactttagttgctccctgtgcagttacacctttgcatacagaacccaacttgaacgtcacatgacatcacataaatcaggaagagatcaaagacatgtgacgcagtctgggtgtaatcgtaaattcaaatgcactgagtgtggaaaagctttcaaatacaaacatcacctaaaagagcacttaagaattcacagtggagagaagccatatgaatgcccaaactgcaagaaacgcttttcccattctggctcctatagctcacacataagcagtaagaaatgtatcagcttgatacctgtgaatgggcgaccaagaacaggactcaagacatctcagtgttcttcaccgtctctttcagcatcaccaggcagtcccacacgaccacagatacggcaaaagatagagaataaaccccttcaagaacaactttctgttaaccaaattaaaactgaacctgtggattatgaattcaaacccatagtggttgcttcaggaatcaactgttcaacccctttacaaaatggggttttcactggtggtggcccattacaggcaaccagttctcctcagggcatggtgcaagctgttgttctgccaacagttggtttggtgtctcccataagtatcaatttaagtgatattcagaatgtacttaaagtggcggtagatggtaatgtaataaggcaagtgttggagaataatcaagccaatcttgcatccaaagaacaagaaacaatcaatgcttcacccatacaacaaggtggccattctgttatttcagccatcagtcttcctttggttgatcaagatggaacaaccaaaattatcatcaactacagtcttgagcagcctagccaacttcaagttgttcctcaaaatttaaaaaaagaaaatccagtcgctacaaacagttgtaaaagtgaaaagttaccagaagatcttactgttaagtctgagaaggacaaaagctttgaagggggggtgaatgatagcacttgtcttctgtgtgatgattgtccaggagatattaatgcacttccagaattaaagcactatgacctaaagcagcctactcagcctcctccactccctgcagcagaagctgagaagcctgagtcctctgtttcatcagctactggagatggcaatttgtctcctagtcagccacctttaaagaacctcttgtctctcctaaaagcatattatgctttgaatgcacaaccaagtgcagaagagctctcaaaaattgctgattcagtaaacctaccactggatgtagtaaaaaagtggtttgaaaagatgcaagctggacagatttcagtgcagtcttctgaaccatcttctcctgaaccaggcaaagtaaatatccctgccaagaacaatgatcagcctcaatctgcaaatgcaaatgaaccccaggacagcacagtaaatctacaaagtcctttgaagatgactaactccccagttttaccagtgggatcaaccaccaatggttccagaagtagtacaccatccccatcacctctaaacctttcctcatccagaaatacacagggttacttgtacacagctgagggtgcacaagaagagccacaagtagaacctcttgatctttcactaccaaagcaacagggagaattattagaaaggtcaactatcactagtgtttaccagaacagtgtttattctgtccaggaagaacccttgaacttgtcttgcgcaaaaaaggagccacaaaaggacagttgtgttacagactcagaaccagttgtaaatgtaatcccaccaagtgccaaccccataaatatcgctatacctacagtcactgcccagttacccacaatcgtggccattgctgaccagaacagtgttccatgcttaagagcgctagctgccaataagcaaacgattctgattccccaggtggcatacacctactcaactacggtcagccctgcagtccaagaaccacccttgaaagtgatccagccaaatggaaatcaggatgaaagacaagatactagctcagaaggagtatcaaatgtagaggatcagaatgactctgattctacaccgcccaaaaagaaaatgcggaagacagaaaatggaatgtatgcttgtgatttgtgtgacaagatattccaaaagagtagttcattattgagacataaatatgaacacacaggtaaaagacctcatgagtgtggaatctgtaaaaaggcatttaaacacaaacatcatttgattgaacacatgcgattacattctggagaaaagccctatcaatgtgacaaatgtggaaagcgcttctcacactctgggtcttattctcaacacatgaatcatcgctactcctactgtaagagagaagcggaagaacgtgacagcacagagcaggaagaggcagggcctgaaatcctctcgaatgagcacgtgggtgccagggcgtctccctcacagggcgactcggacgagagagagagtttgacaagggaagaggatgaagacagtgaaaaagaggaagaggaggaggataaagagatggaagaattgcaggaagaaaaagaatgtgaaaaaccacaaggggatgaggaagaggaggaggaggaggaagaagtggaagaagaagaggtagaagaggcagagaatgagggagaagaagcaaaaactgaaggtctgatgaaggatgacagggctgaaagtcaagcaagcagcttaggacaaaaagtaggcgagagtagtgagcaagtgtctgaagaaaagacaaatgaagcctaatcgtttttctagaaggaaaataaattctaattgataatgaatttcgttcaatattatccttgcttttcatggaaacacagtaacctgtatgctgtgattcctgttcactactgtgtaaagtaaaaactaaaaaaatacaaaatacaaaacacacacacacacacacacacacacacacacacacacacaaaataaatccgggtgtgcctgaacctcagacctagtaatttttcatgcagttttcaaagttaggaacaagtttgtaacatgcagcagattagaaaaccttaatgactcagagagcaacaatacaagaggttaaaggaagctgattaattagatatgcatctggcattgttttatcttatcagtattatcactcttatgttggtttattcttaagctgtacaattgggagaaattttataattttttattggtaaacatatgctaaatccgcttcagtattttattatgttttttaaaatgtgagaacttctgcactacaaaattcccttcacagagaagtataatgtagttccaacccgtgctaactaccttttataaattcagtctagaaggtagtaatttctaatatttagatgtcttagtagagcgtattatcatttaaagtgtattgttagccttaagaaagcagctgatagaagaactgaagtttcttactcacgtggtttaaaatggagttcaaaagattgccattgagttctgattgcagggactaacaatgttaatctgataaggacagcaaaatcatcagaatcagtgtttgtgattgtgtttgaatatgtggtaacatatgaaggatatgacatgaagctttgtatctcctttggccttaagcaagacctgtgtgctgtaagtgccatttctcagtattttcaaggctctaacccgccttcatccaatgtgtggcctacaataactagcatttgttgatttgtctcttgtatcaaaattcccaaataaaacttaaaaccactgactctgtcagagaaactgaaacactgggacatttcatccttcaattcctcggtattgattttatgttgattgattttcagaatttctctacagaaacgaaagggaaattttctaatctgctttatccatgtacttgcatttcagacatggacatgctattgttatttggctcataactgtttccaaatgttagttattatggacccaatttattaacaacattagctgatttttacctatcagtattattttatttcttttagtttatagatctgtgcaacatttttgtactgtatgtcttcaaacctggcagtattaatacccttcttactgacatatgtacttttagttttagaaaacttttatatttatgtgtcttatttttatatttctttatttattacacagtgtagtgtataatactgtagtttgtattaatacaataatatattttagtatgaaaatttggaaagttgataagatttaaagtagagatgcaattggttctcctgcattgagatttgatttaacagtgttatgttaacatttatacttgccttggactgtagaacagaacttaaatgggaatgtattagttttacaactacaatcaagtcattttacctttacccagtttttaatataaaacttaaattttgaaattcactgtgtgactaatagcatgatgctctgcagttttattaagaaatcagcctaaccatacaactctcatttccttagtaagccaaattaggattaacttctataaacagtgttgggaacaatgtttaacattttgtgccaatttgttcctgtattcatgtatgtaagttacagatctgactcttcatttttaagttccttgttacatcatggtcattttctagttttttaccagactcccatctcacaataaaatgcatcaacaagcctg

SEQ ID NO: 8174 - protein, 906 aa, Homo sapiens; identical to SEQ ID NO: 8160

SEQ ID NO: 8175 - DNA, 3295 bp, Homo sapiens
ggacaaaagctttgaagggggggtgaatgatagcacttgtcttctgtgtgatgattgtccaggagatattaatgcacttccagaattaaagcactatgacctaaagcagcctactcagcctcctccactccctgcagcagaagctgagaagcctgagtcctctgtttcatcagctactggagatggcaatttgtctcctagtcagccacctttaaagaacctcttgtctctcctaaaagcatattatgctttgaatgcacaaccaagtgcagaagagctctcaaaaattgctgattcagtaaacctaccactggatgtagtaaaaaagtggtttgaaaagatgcaagctggacagatttcagtgcagtcttctgaaccatcttctcctgaaccaggcaaagtaaatatccctgccaagaacaatgatcagcctcaatctgcaaatgcaaatgaaccccaggacagcacagtaaatctacaaagtcctttgaagatgactaactccccagttttaccagtgggatcaaccaccaatggttccagaagtagtacaccatccccatcacctctaaacctttcctcatccagaaatacacagggttacttgtacacagctgagggtgcacaagaagagccacaagtagaacctcttgatctttcactaccaaagcaacagggagaattattagaaaggtcaactatcactagtgtttaccagaacagtgtttattctgtccaggaagaacccttgaacttgtcttgcgcaaaaaaggagccacaaaaggacagttgtgttacagactcagaaccagttgtaaatgtaatcccaccaagtgccaaccccataaatatcgctatacctacagtcactgcccagttacccacaatcgtggccattgctgaccagaacagtgttccatgcttaagagcgctagctgccaataagcaaacgattctgattccccaggtggcatacacctactcaactacggtcagccctgcagtccaagaaccacccttgaaagtgatccagccaaatggaaatcaggatgaaagacaagatactagctcagaaggagtatcaaatgtagaggatcagaatgactctgattctacaccgcccaaaaagaaaatgcggaagaaaaagaatgtgaaaaaccacaaggggatgaggaagaggaggaggaggaggaagaagtggaagaagaagaggtagaagaggcagagaatgagggagaagaagcaaaaactgaaggtctgatgaaggatgacagggctgaaagtcaagcaagcagcttaggacaaaaagtaggcgagagtagtgagcaagtgtctgaagaaaagacaaatgaagcctaatcgtttttctagaaggaaaataaattctaattgataatgaatttcgttcaatattatccttgcttttcatggaaacacagtaacctgtatgctgtgattcctgttcactactgtgtaaagtaaaaactaaaaaaatacaaaatacaaaacacacacacacacacacacacacacacacacacacacacaaaataaatccgggtgtgcctgaacctcagacctagtaatttttcatgcagttttcaaagttaggaacaagtttgtaacatgcagcagattagaaaaccttaatgactcagagagcaacaatacaagaggttaaaggaagctgattaattagatatgcatctggcattgttttatcttatcagtattatcactcttatgttggtttattcttaagctgtacaattgggagaaattttataattttttattggtaaacatatgctaaatccgcttcagtattttattatgttttttaaaatgtgagaacttctgcactacaaaattcccttcacagagaagtataatgtagttccaacccgtgctaactaccttttataaattcagtctagaaggtagtaatttctaatatttagatgtcttagtagagcgtattatcatttaaagtgtattgttagccttaagaaagcagctgatagaagaactgaagtttcttactcacgtggtttaaaatggagttcaaaagattgccattgagttctgattgcagggactaacaatgttaatctgataaggacagcaaaatcatcagaatcagtgtttgtgattgtgtttgaatatgtggtaacatatgaaggatatgacatgaagctttgtatctcctttggccttaagcaagacctgtgtgctgtaagtgccatttctcagtattttcaaggctctaacccgccttcatccaatgtgtggcctacaataactagcatttgttgatttgtctcttgtatcaaaattcccaaataaaacttaaaaccactgactctgtcagagaaactgaaacactgggacatttcatccttcaattcctcggtattgattttatgttgattgattttcagaatttctctacagaaacgaaagggaaattttctaatctgctttatccatgtacttgcatttcagacatggacatgctattgttatttggctcataactgtttccaaatgttagttattatggacccaatttattaacaacattagctgatttttacctatcagtattattttatttcttttagtttatagatctgtgcaacatttttgtactgtatgtcttcaaacctggcagtattaatacccttcttactgacatatgtacttttagttttagaaaacttttatatttatgtgtcttatttttatatttctttatttattacacagtgtagtgtataatactgtagtttgtattaatacaataatatattttagtatgaaaatttggaaagttgataagatttaaagtagagatgcaattggttctcctgcattgagatttgatttaacagtgttatgttaacatttatacttgccttggactgtagaacagaacttaaatgggaatgtattagttttacaactacaatcaagtcattttacctttacccagtttttaatataaaacttaaattttgaaattcactgtgtgactaatagcatgatgctctgcagttttattaagaaatcagcctaaccatacaactctcatttccttagtaagccaaattaggattaacttctataaacagtgttgggaacaatgtttaacattttgtgccaatttgttcctgtattcatgtatgtaagttacagatctgactcttcatttttaagttccttgttacatcatggtcattttctagttttttaccagactcccatctcacaataaaatgcatcaacaagcctg

SEQ ID NO: 8176 - protein, 291 aa, Homo sapiens
MQAGQISVQSSEPSSPEPGKVNIPAKNNDQPQSANANEPQDSTVNLQSPLKMTNSPVLPVGSTTNGSRSSTPSPSPLNLSSSRNTQGYLYTAEGAQEEPQVEPLDLSLPKQQGELLERSTITSVYQNSVYSVQEEPLNLSCAKKEPQKDSCVTDSEPVVNVIPPSANPINIAIPTVTAQLPTIVAIADQNSVPCLRALAANKQTILIPQVAYTYSTTVSPAVQEPPLKVIQPNGNQDERQDTSSEGVSNVEDQNDSDSTPPKKKMRKKKNVKNHKGMRKRRRRRKKWKKKR

SEQ ID NO: 8177 - DNA, 3908 bp, Homo sapiens
ggacaaaagctttgaagggggggtgaatgatagcacttgtcttctgtgtgatgattgtccaggagatattaatgcacttccagaattaaagcactatgacctaaagcagcctactcagcctcctccactccctgcagcagaagctgagaagcctgagtcctctgtttcatcagctactggagatggcaatttgtctcctagtcagccacctttaaagaacctcttgtctctcctaaaagcatattatgctttgaatgcacaaccaagtgcagaagagctctcaaaaattgctgattcagtaaacctaccactggatgtagtaaaaaagtggtttgaaaagatgcaagctggacagatttcagtgcagtcttctgaaccatcttctcctgaaccaggcaaagtaaatatccctgccaagaacaatgatcagcctcaatctgcaaatgcaaatgaaccccaggacagcacagtaaatctacaaagtcctttgaagatgactaactccccagttttaccagtgggatcaaccaccaatggttccagaagtagtacaccatccccatcacctctaaacctttcctcatccagaaatacacagggttacttgtacacagctgagggtgcacaagaagagccacaagtagaacctcttgatctttcactaccaaagcaacagggagaattattagaaaggtcaactatcactagtgtttaccagaacagtgtttattctgtccaggaagaacccttgaacttgtcttgcgcaaaaaaggagccacaaaaggacagttgtgttacagactcagaaccagttgtaaatgtaatcccaccaagtgccaaccccataaatatcgctatacctacagtcactgcccagttacccacaatcgtggccattgctgaccagaacagtgttccatgcttaagagcgctagctgccaataagcaaacgattctgattccccaggtggcatacacctactcaactacggtcagccctgcagtccaagaaccacccttgaaagtgatccagccaaatggaaatcaggatgaaagacaagatactagctcagaaggagtatcaaatgtagaggatcagaatgactctgattctacaccgcccaaaaagaaaatgcggaagaaaaagaatgtgaaaaaccacaaggggatgaggaagaggaggaggaggaggaagaagtggaagaagaagaggtagaagaggcagagaatgagggagaagaagcaaaaactgaaggtctgatgaaggatgacagggctgaaagtcaagcaagcagcttaggacaaaaagtaggcgagagtagtgagcaagtgtctgaagaaaagacaaatgaagcctaatcgtttttctagaaggaaaataaattctaattgataatgaatttcgttcaatattatccttgcttttcatggaaacacagtaacctgtatgctgtgattcctgttcactactgtgtaaagtaaaaactaaaaaaatacaaaatacaaaacacacacacacacacacacacacacacacacacacacacaaaataaatccgggtgtgcctgaacctcagacctagtaatttttcatgcagttttcaaagttaggaacaagtttgtaacatgcagcagattagaaaaccttaatgactcagagagcaacaatacaagaggttaaaggaagctgattaattagatatgcatctggcattgttttatcttatcagtattatcactcttatgttggtttattcttaagctgtacaattgggagaaattttataattttttattggtaaacatatgctaaatccgcttcagtattttattatgttttttaaaatgtgagaacttctgcactacaaaattcccttcacagagaagtataatgtagttccaacccgtgctaactaccttttataaattcagtctagaaggtagtaatttctaatatttagatgtcttagtagagcgtattatcatttaaagtgtattgttagccttaagaaagcagctgatagaagaactgaagtttcttactcacgtggtttaaaatggagttcaaaagattgccattgagttctgattgcagggactaacaatgttaatctgataaggacagcaaaatcatcagaatcagtgtttgtgattgtgtttgaatatgtggtaacatatgaaggatatgacatgaagctttgtatctcctttggccttaagcaagacctgtgtgctgtaagtgccatttctcagtattttcaaggctctaacccgccttcatccaatgtgtggcctacaataactagcatttgttgatttgtctcttgtatcaaaattcccaaataaaacttaaaaccactgactctgtcagagaaactgaaacactgggacatttcatccttcaattcctcggtattgattttatgttgattgattttcagaatttctctacagaaacgaaagggaaattttctaatctgctttatccatgtacttgcatttcagacatggacatgctattgttatttggctcataactgtttccaaatgttagttattatggacccaatttattaacaacattagctgatttttacctatcagtattattttatttcttttagtttatagatctgtgcaacatttttgtactgtatgtcttcaaacctggcagtattaatacccttcttactgacatatgtacttttagttttagaaaacttttatatttatgtgtcttatttttatatttctttatttattacacagtgtagtgtataatactgtagtttgtattaatacaataatatattttagtatgaaaatttggaaagttgataagatttaaagtagagatgcaattggttctcctgcattgagatttgatttaacagtgttatgttaacatttatacttgccttggactgtagaacagaacttaaatgggaatgtattagttttacaactacaatcaagtcattttacctttacccagtttttaatataaaacttaaattttgaaattcactgtgtgactaatagcatgatgctctgcagttttattaagaaatcagcctaaccatacaactctcatttccttagtaagccaaattaggattaacttctataaacagtgttgggaacaatgtttaacattttgtgccaatttgttcctgtattcatgtatgtaagttacagatctgactcttcatttttaagttccttgttacatcatggtcattttctagttttttaccagactcccatctcacaataaaatgcatcaacaagcctgaactgctgtcattcttttcatcattatcagtattttctttggaaaactgtgaaatggggtacattgtcatcctgcatttgattcatcttgagctgaatttgggtaacactaaatgttttagacattctccactaaattatggattttcttgtggctaaatgtttctggagaggtcagagttgacaaaacctcttcacaggttgctccttcttcctgaaatccttaatcctccgcatttcatgcttcaggtcatttcagggaagcctgggtttagatgcctttctgactctcagctcctgcacttctgtcatcatacctctgatactattatttatattccttccccactaggaacaggaaccacatttgtcatagtcactctcacattcctcactgcctaacagggtgcctggcataagttgggacaacagatatttgttgaataaaaatataatttgcatgtttatggagctcagctatgttctcactttttttgcttctaattccagaatatatgttaaatgatctaataatttgattattttcttataagtcttattaaacactagtcataatagacacaataaattatgccttctttttctattgcctt

SEQ ID NO: 8178 - protein, 291 aa, Homo sapiens; identical to SEQ ID NO: 8176

SEQ ID NO: 8179 - DNA, 840 bp, Homo sapiens
atgggaaagattttatttaaagcccctggtcattcttgcctttccgcccgcccaccacgacccctcaagccagatgccgtctctagttcgggagcgttggatgaggatgccaggcactctgcttttcctaaacaacttccaagaaccccggaacatttcttaaagtgtctggaacgaagctttaacctcgcctgctccatcagcctgggacggaaaagacgcgaggggcgaagaagaggtggggcacggggagcccgggccgttcggctcagcggcagagtcagtccatccaataggcaggagcccaaaagactgtccacggacagctgtcctctcgcccaggagagtggggctgcacacagcagcaggcccaggaggaaatcgtgctttgatagccccaggcatcgtatttcatcgtatttcacaactgctccatttcctgtggtctattcttgcacagttaggtctacaagccaggttcaaggccaccaactgaggcacctgtcccgagacaggaccattctaatctgccctgaaaaggacatcccattgatcatactaaatttgtggatggatacctatctgttgaccagaccctccctcttcaatgaaaactgcctctccttccactccatctgtgaggcacccttggatgctgacatgtgcttacataggacttcctgtccacagccagaattagccagaattcactgacccatggttggactcctaaaatactcaagatgagagacatgttacttttctttactatagtaactatcaaatgcatcccataaccttatgttgtaaatgtcaaatatgcacaataaaatttatttg

SEQ ID NO: 8180 - protein, 237 aa, Homo sapiens
MGKILFKAPGHSCLSARPPRPLKPDAVSSSGALDEDARHSAFPKQLPRTPEHFLKCLERSFNLACSISLGRKRREGRRRGGARGARAVRLSGRVSPSNRQEPKRLSTDSCPLAQESGAAHSSRPRRKSCFDSPRHRISSYFTTAPFPVVYSCTVRSTSQVQGHQLRHLSRDRTILICPEKDIPLIILNLWMDTYLLTRPSLFNENCLSFHSICEAPLDADMCLHRTSCPQPELARIH

SEQ ID NO: 8181 - DNA, 1292 bp, Homo sapiens
aagggcaggaacatctgtctttttcaacaatgcatttttggggcataatgctaagtaaatgatcctcaatataaatgtgctgaatgaaagaattaatggatgaatgaataaaagtgaattgtgactacctaggaactatggaaaagatgaaaagagagttcaggcagttggcttaagttgctgaatacctgaaaattctcctgtgataaagacccagccagcatcctcgagtgtggaccacgttaagggaaagcttgaaggaaaagagagactttgcggaccccaattaaatagtttaccctagaagaatagaacctatttggggtggggtgagtggctgcaagagggacgtttccccaggacatcatgcacaaaaggggcttcaaatgtagtcttttgacttatctccaaatgaagatttctatgttggatgcatgtagaaagctttcatattgaagcagagttttcagtgaagttggaaaaagaagaacaaaggtgaagatatccacttagcaactctcatcatttgtgtgtcaccatggcttcagagacagggatacacatttagtatgaaaaggaggcttggaggttagcggagagttggtggtggtatagagtaagaagaccttttcaaagtttgctttcttgaagagcactagcttccctggcatggccaatggggtgtttgctgttcagtagctataacttaaagtgcttaaaaccacaagatttactgctcctaaaggtaccgaatacagctattcagtatgcatgcacatttgtttacagttcttcagtgctgaggttataaaacaatatggaccctcaaatctcatggaaaaaccagtctaataccatgttagagaaaaaagagagtggatgcaaatggttaaattaggtactcttgagggaccaagtgtcctatcacacatgtatgaatctatgctgtcaattactctcattgtttcttcactaaaacctccctttcagaagtttatgaaagaggaatttaagattcaactttggagtaagattacatgactcttaagatccatttcagggccgggtgcggtggctcatgcctgtaatcccagcactttgggtgaccgaggtgggtggatcatgaggtcacacgtttgagactagcctgaccaacatggtgaaacctcatctctaccaaaaatacaaaaattagccggtcgtggtggcacgtgcctatcatttcagctactcaggaggctgaggcaggagaatcgcttgaacctgggaggcggaggttgcagtgagccgag

SEQ ID NO: 8182 - protein, 53 aa, Homo sapiens [sequence omitted]

SEQ ID NO: 8183 - DNA, 4526 bp, Homo sapiens
agagccgccctggccttcggcgagaactcaggcgagcgcggcgcacgctgctccggagtcccaccgcggaagttgaggccgcggattccgagggcggggtggagaggaatctggaaggacctggacccggtggaacgcactgcgcggacggcgcctgcgtccgcactcagctgttcagccctctttcttcaggctctcccctgaaagccgtccccatgccggtctcttttttctgccttcttgtttccctccggcgagtcagcgcgactgtgaatttccgtttccggcggtgtccatgctgacctgaggagtcgcggctgcgagcaggttagagttacttgttattggtaaatagccactatggaggctaaggaccagaagaaacacagaaagaaaaacagtggacccaaagctgcaaagaaaaagaagcggcttctgcaggatctccagctaggagacgaagaagatgcccggaagagaaatcccaaagcttttgcagttcagtctgctgtgcggatggctcgatcctttcacaggactcaggatttgaagacaaaaaagcatcatattccagtggttgatcgaactccactagagcccccaccaatagtggtagtggtgatgggacctccaaaagttggaaagagcactttgatacaatgcctcattcggaactttacccggcagaagttgactgagatcagaggccctgtgacgattgtgtcaggtaaaaagcgcagactcaccattattgaatgtgggtgtgacattaacatgatgattgatctggctaaagtagcagatctggtactgatgcttatagatgccagctttgggtttgaaatggaaacgtttgagtttctaaacatctgtcaagtacatggctttcctaaaattatgggagttctcacccacctcgactccttcaagcataataagcaactgaagaagacaaagaagcgattaaaacacaggttctggacggaagtttacccgggtgccaagctgttctacctttctggaatggtgcatggagaatatcaaaaccaagaaatccacaatctgggccgttttattacagttatgaagtttaggcctctcacatggcaaacttctcacccttatatcctggcagacaggatggaagatttgacaaacccagaggatatccgaacaaacatcaaatgtgaccggaaggtgtcactttatggttatttaagaggagcacacttgaaaaataaaagccaaattcacatgccaggggtaggagattttgccgtgagtgacatcagtttcctcccagacccttgcgctcttcctgaacaacaaaagaagcgctgtttaaatgagaaggagaagctggtttatgcgcctctttctggagttgggggtgtgctgtatgacaaagacgctgtctatgttgaccttggtggcagccacgtttttcaggatgaagtggggcccacccatgagctggtccagagtctcatctctacccactccaccattgatgccaagatggcttcaagtcgagtgacgctgttttctgattccaagccacttgggtcagaggatatagataatcaagggctaatgatgccaaaggaggaaaaacaaatggacttgaacactggtcgaatgcgtcggaaagccattttcggagatgaagatgaatctggagatagtgatgatgaagaagatgatgaaatgtctgaagatgacgggttggaaaacggctctagtgatgaggaagcagaagaggaggaaaatgctgagatgactgatcagtatatggctgttaagggcatcaaacgacggaaacttgagttggaagaagacagtgaaatggatttgccagcatttgctgacagtgacgatgaccttgagaggagctcagcggaagaaggggaagcggaggaagctgatgaaagcagtgaagaagaggactgcactgcaggagagaagggcatttcaggatcaaaggctgctggagaaggtagtaaagcagggctgtcaccagctaattgccagagtgaccgtgtgaatctggagaagtctttgctgatgaagaaagcagctctccccactttcgattctgggcattgcacagctgaagaggtgtttgcatctgaagatgaatctgaagaaagctcctcactcagtgcagaggaagaagactcagaaaatgaagaggctattagaaaaaagctttcaaagccttctcaagtgagcagtggtcagaaactggggccacagaacttcattgatgagaccagtgatatagaaaatttactcaaagaggaagaagattacaaggaagaaaataatgattccaaagaaacgtcaggtgccctcaagtggaaggaagacctttccagaaaggcagctgaggcctttctgaggcagcagcaagcagctccaaacctccgaaagcttatttatgggacagtgacagaagataatgaagaagaagatgatgatactctagaagagcttggagggttgtttcgtgtcaaccagcctgacagagagtgtaagcacaaggctgactctttggactgctccagatttcttgtggaggccccccatgactgggatttagaggaggttatgaacagtatcagagattgcttcgtgactggaaagtgggaagatgataaagatgcagccaaggtcttagcagaagatgaggagctctacggtgactttgaagacttggaaacaggggacgtgcacaagggaaaatcaggccccaatactcagaatgaagatatagagaaagaagttaaggaagaaattgaccccgacgaagaagaaagtgccaagaaaaagcatttggataagaagagaaaattgaaggagatgtttgatgcagaatatgatgaaggagaaagcacatattttgatgatcttaaaggagaaatgcagaaacaagcacagctgaatcgcgcagaatttgaagatcaagatgatgaagccagagttcagtatgagggttttcgacctgggatgtacgtccgcattgagattgaaaatgttccctgtgaatttgtgcagaactttgacccccattaccccattatcctgggtggcttgggcaacagtgagggaaatgttggctacgtgcagatgcgtctgaagaaacatcgctggtataagaaaatcctcaagtcccgagatccaatcatattttctgtagggtggaggaggtttcagaccatcccactgtattatatcgaagaccacaatggaagacaaaggcttctaaagtataccccacagcacatgcattgcggagcagccttttggggccctatcactccacagggaactggtttcttggcaatacagtctgtcagtggcataatgcctgattttcggatagctgctacaggagttgtccttgatctggataaatccataaaaattgtgaagaaattaaagctaactggttttccatataaaattttcaagaacacttcatttattaagggaatgtttaattctgccttggaagtggccaaatttgaaggtgctgtgattcgaacagtcagtgggataagggggcagatcaagaaagcactccgagctccagaaggagctttcagggccagctttgaggataagctgctgatgagcgatattgtcttcatgcgaacttggtatcctgtttccatcccagcgttctataacccagtaacatctttgttgaaaccagtgggtgagaaagacacctggtcaggaatgcggaccacgggccaactcaggctcgcccatggcgtcagactaaaggcgaacaaggactctctgtataagccaatcctgaggcaaaagaaacattttaattcactgcacattccaaaagccttgcagaaggccctgccatttaagaacaagcccaagacccaagcaaaggcaggcaaggtgccaaaggacaggcggagaccggccgtcatacgcgagcctcatgaaagaaagatccttgcactgctggatgctctgagtacggtgcatagtcagaagatgaagaaggccaaggagcagcggcacctgcacaataaagagcacttcagagccaagcagaaggaggaggaggagaagctgaagcggcagaaggacctcaggaagaagctcttcagaattcaggggcagaaggaaagaagaaaccagaagtccagtttgaagggggctgagggccaattgcagtgagcctttggactggagggactgtccctggatctgcggaggtagacagtttcaaacatcacagtttgaatgcctgtgaatgacaagtcagtgggaaagagctcaagagatgtctctactcaaactgtgcctgcaggaggaggaacagagaagcctgggctgctgggactgggttcattctcatgacttggggctgtcgagatttaaagtgatgtaagctgtggttatgtggattctcttactttcctctgcctgcctcagtttaattattttgtcctacagaaatatcattaaaatatttttttgttacttttggctta

SEQ ID NO: 8184 - protein, 1282 aa, Homo sapiens
MEAKDQKKHRKKNSGPKAAKKKKRLLQDLQLGDEEDARKRNPKAFAVQSAVRMARSFHRTQDLKTKKHHIPVVDRTPLEPPPIVVVVMGPPKVGKSTLIQCLIRNFTRQKLTEIRGPVTIVSGKKRRLTIIECGCDINMMIDLAKVADLVLMLIDASFGFEMETFEFLNICQVHGFPKIMGVLTHLDSFKHNKQLKKTKKRLKHRFWTEVYPGAKLFYLSGMVHGEYQNQEIHNLGRFITVMKFRPLTWQTSHPYILADRMEDLTNPEDIRTNIKCDRKVSLYGYLRGAHLKNKSQIHMPGVGDFAVSDISFLPDPCALPEQQKKRCLNEKEKLVYAPLSGVGGVLYDKDAVYVDLGGSHVFQDEVGPTHELVQSLISTHSTIDAKMASSRVTLFSDSKPLGSEDIDNQGLMMPKEEKQMDLNTGRMRRKAIFGDEDESGDSDDEEDDEMSEDDGLENGSSDEEAEEEENAEMTDQYMAVKGIKRRKLELEEDSEMDLPAFADSDDDLERSSAEEGEAEEADESSEEEDCTAGEKGISGSKAAGEGSKAGLSPANCQSDRVNLEKSLLMKKAALPTFDSGHCTAEEVFASEDESEESSSLSAEEEDSENEEAIRKKLSKPSQVSSGQKLGPQNFIDETSDIENLLKEEEDYKEENNDSKETSGALKWKEDLSRKAAEAFLRQQQAAPNLRKLIYGTVTEDNEEEDDDTLEELGGLFRVNQPDRECKHKADSLDCSRFLVEAPHDWDLEEVMNSIRDCFVTGKWEDDKDAAKVLAEDEELYGDFEDLETGDVHKGKSGPNTQNEDIEKEVKEEIDPDEEESAKKKHLDKKRKLKEMFDAEYDEGESTYFDDLKGEMQKQAQLNRAEFEDQDDEARVQYEGFRPGMYVRIEIENVPCEFVQNFDPHYPIILGGLGNSEGNVGYVQMRLKKHRWYKKILKSRDPIIFSVGWRRFQTIPLYYIEDHNGRQRLLKYTPQHMHCGAAFWGPITPQGTGFLAIQSVSGIMPDFRIAATGVVLDLDKSIKIVKKLKLTGFPYKIFKNTSFIKGMFNSALEVAKFEGAVIRTVSGIRGQIKKALRAPEGAFRASFEDKLLMSDIVFMRTWYPVSIPAFYNPVTSLLKPVGEKDTWSGMRTTGQLRLAHGVRLKANKDSLYKPILRQKKHFNSLHIPKALQKALPFKNKPKTQAKAGKVPKDRRRPAVIREPHERKILALLDALSTVHSQKMKKAKEQRHLHNKEHFRAKQKEEEEKLKRQKDLRKKLFRIQGQKERRNQKSSLKGAEGQLQ

SEQ ID NO: 8185 - DNA, 4389 bp, Homo sapiens
gaggagtcgcggctgcgagcaggttcggtgctgcgggttggggtaggcggcggtggggtccctggttctggggcactgggaagatcgcgagtcgtgcgtgtgggaaggtcctcccccggtcctccgggtcatctttgctcccgaggagcggcatatttctcatctggcggaggtgtcctggggtagttgggttagagttacttgttattggtaaatagccactatggaggctaaggaccagaagaaacacagaaagaaaaacagtggacccaaagctgcaaagaaaaagaagcggcttctgcaggatctccagctaggagacgaagaagatgcccggaagagaaatcccaaagcttttgcagttcagtctgctgtgcggatggctcgatcctttcacaggactcaggatttgaagacaaaaaagcatcatattccagtggttgatcgaactccactagagcccccaccaatagtggtagtggtgatgggacctccaaaagttggaaagagcactttgatacaatgcctcattcggaactttacccggcagaagttgactgagatcagaggccctgtgacgattgtgtcaggtaaaaagcgcagactcaccattattgaatgtgggtgtgacattaacatgatgattgatctggctaaagtagcagatctggtactgatgcttatagatgccagctttgggtttgaaatggaaacgtttgagtttctaaacatctgtcaagtacatggctttcctaaaattatgggagttctcacccacctcgactccttcaagcataataagcaactgaagaagacaaagaagcgattaaaacacaggttctggacggaagtttacccgggtgccaagctgttctacctttctggaatggtgcatggagaatatcaaaaccaagaaatccacaatctgggccgttttattacagttatgaagtttaggcctctcacatggcaaacttctcacccttatatcctggcagacaggatggaagatttgacaaacccagaggatatccgaacaaacatcaaatgtgaccggaaggtgtcactttatggttatttaagaggagcacacttgaaaaataaaagccaaattcacatgccaggggtaggagattttgccgtgagtgacatcagtttcctcccagacccttgcgctcttcctgaacaacaaaagaagcgctgtttaaatgagaaggagaagctggtttatgcgcctctttctggagttgggggtgtgctgtatgacaaagacgctgtctatgttgaccttggtggcagccacgtttttcaggatgaagtggggcccacccatgagctggtccagagtctcatctctacccactccaccattgatgccaagatggcttcaagtcgagtgacgctgttttctgattccaagccacttgggtcagaggatatagataatcaagggctaatgatgccaaaggaggaaaaacaaatggacttgaacactggtcgaatgcgtcggaaagccattttcggagatgaagatgaatctggagatagtgatgatgaagaagatgatgaaatgtctgaagatgacgggttggaaaacggctctagtgatgaggaagcagaagaggaggaaaatgctgagatgactgatcagtatatggctgttaagggcatcaaacgacggaaacttgagttggaagaagacagtgaaatggatttgccagcatttgctgacagtgacgatgaccttgagaggagctcagcggaagaaggggaagcggaggaagctgatgaaagcagtgaagaagaggactgcactgcaggagagaagggcatttcaggatcaaaggctgctggagaaggtagtaaagcagggctgtcaccagctaattgccagagtgaccgtgtgaatctggagaagtctttgctgatgaagaaagcagctctccccactttcgattctgggcattgcacagctgaagaggtgtttgcatctgaagatgaatctgaagaaagctcctcactcagtgcagaggaagaagactcagaaaatgaagaggctattagaaaaaagctttcaaagccttctcaagtgagcagtggtcagaaactggggccacagaacttcattgatgagaccagtgatatagaaaatttactcaaagaggaagaagattacaaggaagaaaataatgattccaaagaaacgtcaggtgccctcaagtggaaggaagacctttccagaaaggcagctgaggcctttctgaggcagcagcaagcagctccaaacctccgaaagcttatttatgggacagtgacagaagataatgaagaagaagatgatgatactctagaagagcttggagggttgtttcgtgtcaaccagcctgacagagagtgtaagcacaaggctgactctttggactgctccagatttcttgtggaggccccccatgactgggatttagaggaggttatgaacagtatcagagattgcttcgtgactggaaagtgggaagatgataaagatgcagccaaggtcttagcagaagatgaggagctctacggtgactttgaagacttggaaacaggggacgtgcacaagggaaaatcaggccccaatactcagaatgaagatatagagaaagaagttaaggaagaaattgaccccgacgaagaagaaagtgccaagaaaaagcatttggataagaagagaaaattgaaggagatgtttgatgcagaatatgatgaaggagaaagcacatattttgatgatcttaaaggagaaatgcagaaacaagcacagctgaatcgcgcagaatttgaagatcaagatgatgaagccagagttcagtatgagggttttcgacctgggatgtacgtccgcattgagattgaaaatgttccctgtgaatttgtgcagaactttgacccccattaccccattatcctgggtggcttgggcaacagtgagggaaatgttggctacgtgcagatgcgtctgaagaaacatcgctggtataagaaaatcctcaagtcccgagatccaatcatattttctgtagggtggaggaggtttcagaccatcccactgtattatatcgaagaccacaatggaagacaaaggcttctaaagtataccccacagcacatgcattgcggagcagccttttggggccctatcactccacagggaactggtttcttggcaatacagtctgtcagtggcataatgcctgattttcggatagctgctacaggagttgtccttgatctggataaatccataaaaattgtgaagaaattaaagctaactggttttccatataaaattttcaagaacacttcatttattaagggaatgtttaattctgccttggaagtggccaaatttgaaggtgctgtgattcgaacagtcagtgggataagggggcagatcaagaaagcactccgagctccagaaggagctttcagggccagctttgaggataagctgctgatgagcgatattgtcttcatgcgaacttggtatcctgtttccatcccagcgttctataacccagtaacatctttgttgaaaccagtgggtgagaaagacacctggtcaggaatgcggaccacgggccaactcaggctcgcccatggcgtcagactaaaggcgaacaaggactctctgtataagccaatcctgaggcaaaagaaacattttaattcactgcacattccaaaagccttgcagaaggccctgccatttaagaacaagcccaagacccaagcaaaggcaggcaaggtgccaaaggacaggcggagaccggccgtcatacgcgagcctcatgaaagaaagatccttgcactgctggatgctctgagtacggtgcatagtcagaagatgaagaaggccaaggagcagcggcacctgcacaataaagagcacttcagagccaagcagaaggaggaggaggagaagctgaagcggcagaaggacctcaggaagaagctcttcagaattcaggggcagaaggaaagaagaaaccagaagtccagtttgaagggggctgagggccaattgcagtgagcctttggactggagggactgtccctggatctgcggaggtagacagtttcaaacatcacagtttgaatgcctgtgaatgacaagtcagtgggaaagagctcaagagatgtctctactcaaactgtgcctgcaggaggaggaacagagaagcctgggctgctgggactgggttcattctcatgacttggggctgtcgagatttaaagtgatgtaagctgtggttatgtggattctcttactttcctctgcctgcctcagtttaattattttgtcctacagaaatatcattaaaatatttttttgttacttttggctta

SEQ ID NO: 8186 - protein, 1282 aa, Homo sapiens; identical to SEQ ID NO: 8184

SEQ ID NO: 8187 - DNA, 4806 bp, Homo sapiens
ggcgacgtcgtttcctggcgacgtggtcccggtaggagacttagacctgagctggatctgttgaccccaaattgtgcttttcccaccaagaagaaagacagggagagaaacattagtacaagtgctgaactaaaatatagcagagaagaaacataatctctgaaatcacacagctattcggtttcaaagcgttcctagcgcccagctctcctaactcctggccagtgttcttgacattatggtaatacataaagactttgtttccgctggtgtgtgtctgtgggaagcctctgactcacctccgtgctccagtagcaccctgtgcagccttccaatgtcgcccttattgcgtggcgcggaagataatagtttggatttcctctgcaagtcagataatagctgtatccacttactggcacagtgcctagcacatcgtagacagacacaaatatttattcaacggaatgaatacagtaccttaattgaatgaaatggcatcctgctccgctttttttttttaatcaagctgtcagattttatgcagcccgatttcctaaaataactcactaattcagtgattgccaatttattagccacagattcccaggttagagttacttgttattggtaaatagccactatggaggctaaggaccagaagaaacacagaaagaaaaacagtggacccaaagctgcaaagaaaaagaagcggcttctgcaggatctccagctaggagacgaagaagatgcccggaagagaaatcccaaagcttttgcagttcagtctgctgtgcggatggctcgatcctttcacaggactcaggatttgaagacaaaaaagcatcatattccagtggttgatcgaactccactagagcccccaccaatagtggtagtggtgatgggacctccaaaagttggaaagagcactttgatacaatgcctcattcggaactttacccggcagaagttgactgagatcagaggccctgtgacgattgtgtcaggtaaaaagcgcagactcaccattattgaatgtgggtgtgacattaacatgatgattgatctggctaaagtagcagatctggtactgatgcttatagatgccagctttgggtttgaaatggaaacgtttgagtttctaaacatctgtcaagtacatggctttcctaaaattatgggagttctcacccacctcgactccttcaagcataataagcaactgaagaagacaaagaagcgattaaaacacaggttctggacggaagtttacccgggtgccaagctgttctacctttctggaatggtgcatggagaatatcaaaaccaagaaatccacaatctgggccgttttattacagttatgaagtttaggcctctcacatggcaaacttctcacccttatatcctggcagacaggatggaagatttgacaaacccagaggatatccgaacaaacatcaaatgtgaccggaaggtgtcactttatggttatttaagaggagcacacttgaaaaataaaagccaaattcacatgccaggggtaggagattttgccgtgagtgacatcagtttcctcccagacccttgcgctcttcctgaacaacaaaagaagcgctgtttaaatgagaaggagaagctggtttatgcgcctctttctggagttgggggtgtgctgtatgacaaagacgctgtctatgttgaccttggtggcagccacgtttttcaggatgaagtggggcccacccatgagctggtccagagtctcatctctacccactccaccattgatgccaagatggcttcaagtcgagtgacgctgttttctgattccaagccacttgggtcagaggatatagataatcaagggctaatgatgccaaaggaggaaaaacaaatggacttgaacactggtcgaatgcgtcggaaagccattttcggagatgaagatgaatctggagatagtgatgatgaagaagatgatgaaatgtctgaagatgacgggttggaaaacggctctagtgatgaggaagcagaagaggaggaaaatgctgagatgactgatcagtatatggctgttaagggcatcaaacgacggaaacttgagttggaagaagacagtgaaatggatttgccagcatttgctgacagtgacgatgaccttgagaggagctcagcggaagaaggggaagcggaggaagctgatgaaagcagtgaagaagaggactgcactgcaggagagaagggcatttcaggatcaaaggctgctggagaaggtagtaaagcagggctgtcaccagctaattgccagagtgaccgtgtgaatctggagaagtctttgctgatgaagaaagcagctctccccactttcgattctgggcattgcacagctgaagaggtgtttgcatctgaagatgaatctgaagaaagctcctcactcagtgcagaggaagaagactcagaaaatgaagaggctattagaaaaaagctttcaaagccttctcaagtgagcagtggtcagaaactggggccacagaacttcattgatgagaccagtgatatagaaaatttactcaaagaggaagaagattacaaggaagaaaataatgattccaaagaaacgtcaggtgccctcaagtggaaggaagacctttccagaaaggcagctgaggcctttctgaggcagcagcaagcagctccaaacctccgaaagcttatttatgggacagtgacagaagataatgaagaagaagatgatgatactctagaagagcttggagggttgtttcgtgtcaaccagcctgacagagagtgtaagcacaaggctgactctttggactgctccagatttcttgtggaggccccccatgactgggatttagaggaggttatgaacagtatcagagattgcttcgtgactggaaagtgggaagatgataaagatgcagccaaggtcttagcagaagatgaggagctctacggtgactttgaagacttggaaacaggggacgtgcacaagggaaaatcaggccccaatactcagaatgaagatatagagaaagaagttaaggaagaaattgaccccgacgaagaagaaagtgccaagaaaaagcatttggataagaagagaaaattgaaggagatgtttgatgcagaatatgatgaaggagaaagcacatattttgatgatcttaaaggagaaatgcagaaacaagcacagctgaatcgcgcagaatttgaagatcaagatgatgaagccagagttcagtatgagggttttcgacctgggatgtacgtccgcattgagattgaaaatgttccctgtgaatttgtgcagaactttgacccccattaccccattatcctgggtggcttgggcaacagtgagggaaatgttggctacgtgcagatgcgtctgaagaaacatcgctggtataagaaaatcctcaagtcccgagatccaatcatattttctgtagggtggaggaggtttcagaccatcccactgtattatatcgaagaccacaatggaagacaaaggcttctaaagtataccccacagcacatgcattgcggagcagccttttggggccctatcactccacagggaactggtttcttggcaatacagtctgtcagtggcataatgcctgattttcggatagctgctacaggagttgtccttgatctggataaatccataaaaattgtgaagaaattaaagctaactggttttccatataaaattttcaagaacacttcatttattaagggaatgtttaattctgccttggaagtggccaaatttgaaggtgctgtgattcgaacagtcagtgggataagggggcagatcaagaaagcactccgagctccagaaggagctttcagggccagctttgaggataagctgctgatgagcgatattgtcttcatgcgaacttggtatcctgtttccatcccagcgttctataacccagtaacatctttgttgaaaccagtgggtgagaaagacacctggtcaggaatgcggaccacgggccaactcaggctcgcccatggcgtcagactaaaggcgaacaaggactctctgtataagccaatcctgaggcaaaagaaacattttaattcactgcacattccaaaagccttgcagaaggccctgccatttaagaacaagcccaagacccaagcaaaggcaggcaaggtgccaaaggacaggcggagaccggccgtcatacgcgagcctcatgaaagaaagatccttgcactgctggatgctctgagtacggtgcatagtcagaagatgaagaaggccaaggagcagcggcacctgcacaataaagagcacttcagagccaagcagaaggaggaggaggagaagctgaagcggcagaaggacctcaggaagaagctcttcagaattcaggggcagaaggaaagaagaaaccagaagtccagtttgaagggggctgagggccaattgcagtgagcctttggactggagggactgtccctggatctgcggaggtagacagtttcaaacatcacagtttgaatgcctgtgaatgacaagtcagtgggaaagagctcaagagatgtctctactcaaactgtgcctgcaggaggaggaacagagaagcctgggctgctgggactgggttcattctcatgacttggggctgtcgagatttaaagtgatgtaagctgtggttatgtggattctcttactttcctctgcctgcctcagtttaattattttgtcctacagaaatatcattaaaatatttttttgttacttttggctta

SEQ ID NO: 8188 - protein, 1282 aa, Homo sapiens; identical to SEQ ID NO: 8184

SEQ ID NO: 8189 - DNA, 1151 bp, Homo sapiens
atcacccttcagtgagttgtttttgttctttaatcaaggatgtatgtttgaagtaagaagtaaagcataaagtatatgattttgtgtgtgtgtgtttttatcttgctatacctgtagggaatgtttaattctgccttggaagtggccaaatttgaaggtgctgtgattcgaacagtcagtgggataagggggcagatcaagaaagcactccgagctccagaaggagctttcagggccagctttgaggataagctgctgatgagcgatattgtcttcatgcgaacttggtatcctgtttccatcccagcgttctataacccagtaacatctttgttgaaaccagtgggtgagaaagacacctggtcaggaatgcggaccacgggccaactcaggctcgcccatggcgtcagactaaaggcgaacaaggactctctgtataagccaatcctgaggcaaaagaaacattttaattcactgcacattccaaaagccttgcagaaggccctgccatttaagaacaagcccaagacccaagcaaaggcaggcaaggtgccaaaggacaggcggagaccggccgtcatacgcgagcctcatgaaagaaagatccttgcactgctggatgctctgagtacggtgcatagtcagaagatgaagaaggccaaggagcagcggcacctgcacaataaagagcacttcagagccaagcagaaggaggaggaggagaagctgaagcggcagaaggacctcaggaagaagctcttcagaattcaggggcagaaggaaagaagaaaccagaagtccagtttgaagggggctgagggccaattgcagtgagcctttggactggagggactgtccctggatctgcggaggtagacagtttcaaacatcacagtttgaatgcctgtgaatgacaagtcagtgggaaagagctcaagagatgtctctactcaaactgtgcctgcaggaggaggaacagagaagcctgggctgctgggactgggttcattctcatgacttggggctgtcgagatttaaagtgatgtaagctgtggttatgtggattctcttactttcctctgcctgcctcagtttaattattttgtcctacagaaatatcattaaaatatttttttgttacttttggctta

SEQ ID NO: 8190 - protein, 237 aa, Homo sapiens [sequence omitted]

SEQ ID NO: 8191 - DNA, 1712 bp, Homo sapiens
ttttctcaagacttcagctgctttgttggcagccaggcctggctctcagcagctctgcaggctggaagggcccaagagacccttcacccacccggtgtctccagcagcagggaggggtccggggcacagcctattgctgctctgctctcctcccttcttgggtgtcctgcaggtttctgtgagcagagcagacagaaaggagatgcccagtgacgccagctgtcccccgcagagcttcctggagcctgggctctaggctgagggtccttgaacagacgtcatctccctggcttcagcagaatcacccacaaacccaccctgtgcccaccctcccatcacagagagcagctgctggagaacaaggcatgagactttggagacctggaggagcaggagacacaggagacaatggccagggtggtcatggtggcacggctatgccatcactgatttctgcccacccgccccctaagtctcacttgctgctactctcaatttcctacttaatgcttcggagagcaccagtcctgagatgagaggcgggatgttcactctctgggagttgagatggaacccaggcagttagaaaaaagtgccacaaccacgtgccggacctactacttgccaggagcttcgtgagtcatccaattcctaaaacaattgtgctgcgtatgctccaccacgcctgggcgactcggggaaatggggctgcgggaggctcagtgacctgccctgggtgacacggatagcgtggatgccctgtccatgcatggggctgtgctaggaggacaggaccatccccggaagctggtcctgtgtccactgctcacggtggcagctgcttgggctgacaaccgcccctccctcctgctggtgagtccttggatgtattcaggcacatggcagcaaggtctcctgtgtcccagaggcgactaggacccacaagtgagcagcaggtgccccactccttcatgctaaggctcatcacgggacgaaacccaaggtggtattggagccaggggctgtggccatgacagccacccactccagacgatatccacattcggaatagttcagagtggcctgccttgatgacatcacgaacttctccatggaaatgtgtcacagaaccagaacttaagggcatttggatgaggttgaggtgagatcaggtcacagaagaacgttctcaagttaggtgggaaacagctggagactctgggatgtcctcaggacctttatctaagcaaacacatgataaggtctttcccaagaaataagcgtggctttttgtcctggttgaggagggttgttgtggatcttttcccccttttaccttggcttccaggaagctcagtgccaagttttatgctccacccaggcctactatccttggactggtcctcaggtgcagcccttggtctctcctttctttatcgcatgagcccgcttggtttctgtacattttgtccgctggtgctgacggctggacaccctttcctgaaggagatggggcatagagtgagtggatgatgatgggctgtgacagggcccactaccaaggatgtgggctacgaggtgtgggctgggaaggaggaggaggaccctgcacctcagggggcaaccaggagcacattctggggagcacacacctgcggtgttatcacggccactgcccatgtcttggacactggaataaacaggatgtggcg

SEQ ID NO: 8192 - protein, 92 aa, Homo sapiens
MIRSFPRNKRGFLSWLRRVVVDLFPLLPWLPGSSVPSFMLHPGLLSLDWSSGAALGLSFLYRMSPLGFCTFCPLVLTAGHPFLKEMGHRVSG

SEQ ID NO: 8193 - DNA, 498 bp, Homo sapiens
tgaggtcagacgggcccttgggctcccgggcaggagcacccggcctcccagctccagaagctgcgcctcctccagctcgcctgcccccacgctgcccagtgactctcaggaggagaggagctgatgttcctgcacccatgatgaggaaatcaagactcggaatgtcctggtccctttccacaaggcctcgccttatccgctcccacaaagggcttacctcttcaggaggatctggccccatggtcagagaagtgagtgaatatcagctgtggggcacccagagcagttgccatcttctgctctgtctagcctgggagtcctggaaggagactgcagcctgagtgcctcccgagccagctcctctccaggacatcaccttggcccctgggtgtcccaacagacagtcagcacacaaaggttacctgatgcccaggtaggaactgcagctatttttaaactgagatttcctacaaattaaaattgctttgagtatgtgtg

SEQ ID NO: 8194 - protein, 67 aa, Homo sapiens
MMRKSRLGMSWSLSTRPRLIRSHKGLTSSGGSGPMVREVSEYQLWGTQSSCHLLLCLAWESWKETAA

SEQ ID NO: 8195 - DNA, 1577 bp, Homo sapiens
gccccgcaagcttccttgggcgcccggcgcgagggactctgagagcccagccgctgcctcggagcccccattcacgtcccctcctcccgctcccccgccaccgcgcctccgactcttctcccccgcgccgcggcgcccaccgcgtctcaggtttaatcccgggttggacctgctggtttgctctccccgctctgagcctcacagccagcccagagaagtggaatctgcactgaaactctgggtggctggagccggcggactgggcatgctcagaagccagggctggctttggtctcaagtaggaagctttggcactcgggaggcagcggcgactttggggaaagttgatcggagaggggaggaagcctcaagacgcggagcagcggcaggaaggagcccccggcagcccggaggagcatgggcaccttgcgggatttacagtacgcgctccaggagaagatcgaggagctgaggcagcgggatgctctcatcgacgagctggagctggagttggatcagaaggacgaactgatccagaagctgcagaacgagctggacaagtaccgctcggtgatccgaccagccacccagcaggcgcagaagcagagcgcgagcaccttgcagggcgagccgcgcaccaagcggcaggcgatctccgccgagcccaccgccttcgacatccaggatctcagccatgtgaccctgcccttctaccccaagagcccacagtccaaggatcttataaaggaagctatccttgacaatgactttatgaagaacttggagctgtcgcagatccaggagattgtggattgtatgtacccggtggagtatggcaaggacagttgcatcatcaaagaaggagacgtggggtcactggtgtatgtcatggaagatggtaaggttgaagttacaaaagaaggtgtgaagttgtgtaccatgggtccaggaaaagtgtttggggaattggctattctttacaactgtacccggacagcgaccgtcaagactcttgtaaatgtaaaactctgggccattgatcgacaatgttttcaaacaataatgatgaggacaggactcatcaagcataccgagtatatggaatttttaaaaagcgttccaacattccagagccttcctgaagagatcctcagcaagcttgctgatgtccttgaagagacccactatgaaaatggagaatatattatcaggcaaggtgcaagaggggacaccttctttatcatcagcaaaggaacggtaaatgtcactcgtgaagactcaccgagtgaagacccagtctttcttagaactttaggaaaaggagactggtttggagagaaagccttgcaggggtaagtagatcatgtgttatacaggtttttgtttgagtgctacataaatttctgtctgaaattttgagctcctagcacaataggctttttatttagtgcttatctcaatatcaaatatggacccttgatgataaatacatttttatttattttcagctggacttggaatctgtttgaatacgttgtggaataaattccttaatttctaataaatcagtgttatat

SEQ ID NO: 8196 - protein, 312 aa, Homo sapiens
MGTLRDLQYALQEKIEELRQRDALIDELELELDQKDELIQKLQNELDKYRSVIRPATQQAQKQSASTLQGEPRTKRQAISAEPTAFDIQDLSHVTLPFYPKSPQSKDLIKEAILDNDFMKNLELSQIQEIVDCMYPVEYGKDSCIIKEGDVGSLVYVMEDGKVEVTKEGVKLCTMGPGKVFGELAILYNCTRTATVKTLVNVKLWAIDRQCFQTIMMRTGLIKHTEYMEFLKSVPTFQSLPEEILSKLADVLEETHYENGEYIIRQGARGDTFFIISKGTVNVTREDSPSEDPVFLRTLGKGDWFGEKALQG

SEQ ID NO: 8197 - DNA, 4261 bp, Homo sapiens
gccccgcaagcttccttgggcgcccggcgcgagggactctgagagcccagccgctgcctcggagcccccattcacgtcccctcctcccgctcccccgccaccgcgcctccgactcttctcccccgcgccgcggcgcccaccgcgtctcaggtttaatcccgggttggacctgctggtttgctctccccgctctgagcctcacagccagcccagagaagtggaatctgcactgaaactctgggtggctggagccggcggactgggcatgctcagaagccagggctggctttggtctcaagtaggaagctttggcactcgggaggcagcggcgactttggggaaagttgatcggagaggggaggaagcctcaagacgcggagcagcggcaggaaggagcccccggcagcccggaggagcatgggcaccttgcgggatttacagtacgcgctccaggagaagatcgaggagctgaggcagcgggatgctctcatcgacgagctggagctggagttggatcagaaggacgaactgatccagaagctgcagaacgagctggacaagtaccgctcggtgatccgaccagccacccagcaggcgcagaagcagagcgcgagcaccttgcagggcgagccgcgcaccaagcggcaggcgatctccgccgagcccaccgccttcgacatccaggatctcagccatgtgaccctgcccttctaccccaagagcccacagtccaaggatcttataaaggaagctatccttgacaatgactttatgaagaacttggagctgtcgcagatccaggagattgtggattgtatgtacccggtggagtatggcaaggacagttgcatcatcaaagaaggagacgtggggtcactggtgtatgtcatggaagatggtaaggttgaagttacaaaagaaggtgtgaagttgtgtaccatgggtccaggaaaagtgtttggggaattggctattctttacaactgtacccggacagcgaccgtcaagactcttgtaaatgtaaaactctgggccattgatcgacaatgttttcaaacaataatgatgaggacaggactcatcaagcataccgagtatatggaatttttaaaaagcgttccaacattccagagccttcctgaagagatcctcagcaagcttgctgatgtccttgaagagacccactatgaaaatggagaatatattatcaggcaaggtgcaagaggggacaccttctttatcatcagcaaaggaacggtaaatgtcactcgtgaagactcaccgagtgaagacccagtctttcttagaactttaggaaaaggagactggtttggagagaaagccttgcagggggaagatgtgagaacagcaaacgtaattgctgcagaagctgtaacctgccttgtgattgacagagactcttttaaacatttgattggagggctggatgatgtttctaataaagcatatgaagatgcagaagctaaagcaaaatatgaagctgaagcggctttcttcgccaacctgaagctgtctgatttcaacatcattgatacccttggagttggaggtttcggacgagtagaactggtccagttgaaaagtgaagaatccaaaacgtttgcaatgaagattctcaagaaacgtcacattgtggacacaagacagcaggagcacatccgctcagagaagcagatcatgcagggggctcattccgatttcatagtgagactgtacagaacatttaaggacagcaaatatttgtatatgttgatggaagcttgtctaggtggagagctctggaccattctcagggatagaggttcgtttgaagattctacaaccagattttacacagcatgtgtggtagaagcttttgcctatctgcattccaaaggaatcatttacagggacctcaagccagaaaatctcatcctagatcaccgaggttatgccaaactggttgattttggctttgcaaagaaaataggatttggaaagaaaacatggactttttgtgggactccagagtatgtagccccagagatcatcctgaacaaaggccatgacatttcagccgactactggtcactgggaatcctaatgtatgaactcctgactggcagcccacctttctcaggcccagatcctatgaaaacctataacatcatattgagggggattgacatgatagaatttccaaagaagattgccaaaaatgctgctaatttaattaaaaaactatgcagggacaatccatcagaaagattagggaatttgaaaaatggagtaaaagacattcaaaagcacaaatggtttgagggctttaactgggaaggcttaagaaaaggtaccttgacacctcctataataccaagtgttgcatcacccacagacacaagtaattttgacagtttccctgaggacaacgatgaaccaccacctgatgacaactcaggatgggatatagacttctaatgtatttctcttacctgcttctgccttgctgaagacagctttttctgagacacagctgccagcaaacctgagggaaagagagaagattagtgctcggggtcaccatgatgcctttgatcgatgctgctccagtaactacagtggcattaggacttaccgcttagatgacaatagtgctctttacatgttttctgtttgaacctaaaatagcagttgacatggtggtcctgaagcaaagcctttcaccagtaaaagatgttttctattgttgcaatgaccttgctttgctctgattataatttgaaagactgtaggaaacacttcaatgtagtataagagtctgtaccttgctggaatattcaagaagatgaaagaataatatattgggtacaatagattactatggtacagaaactgggctattccctttcttcaagtgaaggctgtgggatctattactgcaggccggtgtatataccatacaaaagaggaccacacatctgttggtcacagagttcatgtcacaccagtgctagaagtttcatgattttatttcccagcagtgctgatgacaagactgaatgttaccttttctttctgacagattttaaaaattgatatgataaaagcacaactgctatagattctgctgagacctctcatagtaggtatatatgagttttcacagaagactgaaaaataatgcatgatatttgtttgttttttttgataaattggcatgacagagtggggaaaaaaagcaattcacaaaaccatttcatattttttaaaatattgtgcttaaagatggtcctggaagtaaatgactagcagccaattggttttacttaacataccctcaaactgaggcttaaagtattcccttttataaaaataaatgcttggggtagggtggagtggggagggattaaaacccatccaaaaaataaataaaaactatataggtgctatgtatatctttcatctgtaaatgtcagtgtctgaacagacaacacaaattcaaatcattatacgtgtagccagaaactcaagcattttcactaaagttattaaaccaaactcctgtccaatttcacttatacaacatagtcagtctagagttgagagacaaaggtaattataaacctatttgaactagcttcttgtcttaggcctgaaccaaaaaacaacaaacaaacaaaaaacaagaatgaaaaacagaaataaaagaagtagaaaagacaaagaaagaaagcccaaagtcaaagttgttaatatttacaggtttaccagatctggaacattacttatttgaggtcagagaacaaaacaagaacctggccaggtgttgattaccttttagtgaataagctgagtccatatacttgtctaactaagaaagcagtacagaggaaaacaggaacctgatttttttaaaataaattttaaataaaatagaattactacaattctgcaatttcatactacctaaaaaagactagatttgaaaatgtcaagctgatttactttattcacatggagaaaagaatccacaaattaaactgagtccttcactggcatgccagttgactattattagctgtcataagtaactcagccatttggaagcatttcctggacaaaattacattatacctgtgaagaaaaatatagaagctttcaagctgtcattctgttttggccctgtgtgaatttggtatattaaattgacgcttgctttttttttcagtagagttttctttttaatcaatcaaacgcctac

SEQ ID NO: 8198 - protein, 686 aa, Homo sapiens; identical to SEQ ID NO: 1176

SEQ ID NO: 8199 - DNA, 1346 bp, Homo sapiens
atcttgtgatgtatatctgggattgtccgaaaattatgaaatgaaagttgcatcacacttcatgaaacctcttgcggttgggctacttgaaagtgactttgaccttgtatagaaaggtatgtcatcaccaacccgccctatgagtttgagctcgtgccgacggacctgatcttctgcttaatgcagtttgaccacaatgccggccagtcccgggccagcctgtcccattcctcccactcgtcgcagtcctccagcaagaagagctcctctgttcactccatcccatccacagcaaaccgacagaaccggcccaagtccagggagtcccgggacaaacagaaaaaagaaatggtttacagatgaaccggataatgcctatcccagaaacattcaaatcaagcccatgagtacccacatggctaaccagatcaaccaatataaatccacaagcagcttgattccaccaatcagagaagttgaagatgaatgttgactcccaggagaccagaactatttttttaaagcctgacaaacttcataaatggtgatgtgacttttcttcttacatgctgaatcactggtggaaacgttaggataagcaagaattgccagaaaataaagtagacagatctttctctttgtctgccttgaatattgcttccatgtattttggaaaagaaaatgatttcatttataaatgaacatactaaaatagtcatgtatagcctctagcattttaaattatttttatttattagaaagaaaatatattttttcttttcattgtcaaatatcttccctatatctaaacaatgcaaaatctaaatgaataagtggtcagactccttaatgtgtttttctcttctttctctctttttctttgaggagaatgatggtcaccaccacaattaattgtaattaagggaaatgaattattaaaacaattttaaaatggccaatgatgtatacatgtattttagtaaatccagaaaagaagactaaggggacaggtgaatacctgctcctcgcctggatgggtgtgtattttgatctgcattgacaccagctcttaataaatggaaacttatttattttcacagttgaaagtcatatttttgtagttctagttttcattctgtagttctcacccctttgttcatatttttaaagggaagaccttctgctgcttttctacaattggcagatcaggtttgtctggccaactaaggacaccaggagggttgtgggcacacctgggatgtggaagctgaggaccagatgcacacaaggcattgctctgtttgctgttctagtggtggagactcctacgtgctgttatgcttctc

SEQ ID NO: 8200 - protein, 98 aa, Homo sapiens
MPASPGPACPIPPTRRSPPARRAPLFTPSHPQQTDRTGPSPGSPGTNRKKKWFTDEPDNAYPRNIQIKPMSTHMANQINQYKSTSSLIPPIREVEDEC

SEQ ID NO: 8201 - DNA, 2524 bp, Homo sapiens
actactttgttgttcttcacaattagttggagctttctttggtcaacagcagatgtgactaagaaaatcacgctgtttcacttagagcagtggtcaccaagtgtggtccttaggccacacaggtcagcatcacctaggaactaggaaatgcaagttcttaagcaatcccacccagacctactgaattggaagtgctgaggatggggtccagcaatctgtggttgaacaagctctgcaggcatccaggagcagagctgtggggcagcagaatctgtgatgacagagaatgatgatgtatttttgccagcagatgcttttgctcctgttttgataccccaatattcggatgcagaaaaggactctgagcattgctgacgggtgtgctctgcacacctatctcttcaggatctgaataatttggtggaaagacaatgccttttctggaaaagggtgtcaggtcagtcatattggaggatgcaaatttccttatgtgatgggagtgagggttggggtagggcacttcacggagcattcagcagtctgcaattaagcatcactccaaggctttctgcataggtgatggctgtttctgcatcatggggcaaaccaggtgctagaacttcaaatgccaattaccaaaggcgcttcctgcggaggaaacctctctacaactcacctgacccagaaggcacacatttttttctgggttaacataaatgctaaaattgaagaaatgaaacattctaaaggcaggatcatgtaggtgagatcctttgcctcctaagcttttgtcctgccagtcttttctgtgccttaccatgatacctgtgctagaagtcttctgggaagctcttgtatagaacctccaactctggcagggttagtcttcagggatgcttcaggcagagaccttctcaatatctatccttgcgtcacatgggcattgagtataagacagctgagttagggtcctgttcagagcctgggatcagggaacccgcatagtctaaggaatacaggagtccctcttcccactgccaaggacaagtttgcaaacctgactagcgaagcccttcttctgattaaggcaacgtggccccctggttatgagtacagatttccaaatccaattagtgtggcttttaatacctgctttgctatccaataggcacaacaatgaaaaagttgcctaacttttctctgccttgaattcctcatccatataacagagatgaaaaaacaaaacaaaacaaaaatttatagattagagttaaatgagaggatttgtgaaacttctgatagacaaagcatactcaaaaaatgggagtttataaaaagaaccatcaactagcaatgcaaccaatttagacaattccctctccgggtgtctcggcgttctgattctaatctctgagagctggctcagaacacaagggtggcccgcttggcctctaaagtttgatgattctcaggtcctgtaaaaggacactgaggaaaccatgaaatgccaggggagggaccaaggcactgtaacagggaaacctgagcccacagcgccatctagcccgcttggcccacgccccgctgtgcctgcaagtgtaacccgcccaagcatcctcctctttttatttttttaaagtataattaccggagcttatgtttcacagttaatgctgtcaagccttttaaactaattggtcttttatagaaaatttaactgaaaattaacacatcttttaataacattgccttaactttaatggctctctgcctttcgtttataattgctctaaaattgtcattttccatgtcatagctgccattttttatatttgctagttttcatggtgtagatttttatttttagtatttttctttcgtgagggatgaaaatgattggatttttttttccctaccccaggcctgcctggcctgatgtgacagcagtggtctgtcctgagtctagcaggacatacctccatgtacccgactgacaccactgctagctcctctgcctcgggacggccatgtgccctctgtctccgtgtgagcagttgaaatggaggctcttgagtggagtgtaagaaatagggttatggagcaataaattgtttatgtaactaaaatcacatggcattaggttagcttggactgatagagaactcaggcctctccataacaccaggttcaagggtttggcccttaatgaaagtacaggaaagacagtaaatcatgtgaacccacattccagacggtcacaccctccagtcttactgatataacttcgtttctggcaaacaggccagctctctgatattaaagatgagaacatggaatcatatcttctgggtaccccaactcatctacccactaagctcccaaatattatctaagatgtgtgttcatgaaagagagaaagagagaggataagtgcacacaaacacataaatatatatacatatatgtacatgcatatataccaaaaaaatctgcttctttgtaattacatgtgatcttaagaaat

SEQ ID NO: 8202 - protein, 45 aa, Homo sapiens [sequence omitted]

SEQ ID NO: 8203 - DNA, 771 bp, Homo sapiens
ctttctttggtcaacagcagatgtgactaagaaaatcacgctgtttcacttagagcagtggtcaccaagtgtggtccttaggccacacaggtcagcatcacctaggaactaggaaatgcaagttcttaagcaatcccacccagacctactgaattggaagtgctgaggatggggtccagcaatctgtggttgaacaagctctgcaggcatccaggagcagagctgtggggcagcagaatctgtgatgacagagaatgatgatgtatttttgccagcagatgcttttgctcctgttttgataccccaatattcggatgcagaaaaggactctgagcattgctgacgggtgtgctctgcacacctatctcttcaggatctgaataatttggtggaaagacaatgccttttctggaaaagggtgtcagtctccacaaagaacaatgttcttcccaacctgccaagacagccaaataacaaaagaaatacccgtggagcccacctgaagtgcacagatctggggacattgggaggaacagaggtagcttagtgactctactgtccctaccacccaacctgctattagccctgctggtccgctcgtgtttgaggtcatgagtcagtctacttaataaaatcatcagctggagcttacaaagcaatagtgcttaatagatacaagcatgctaatatattttttaagtgaatgctgatctttctgagctgtgtgtctaaaatcatcattgtgaataaaagaattgtaatttccaaccc

SEQ ID NO: 8204 - protein, 32 aa, Homo sapiens
MTENDDVFLPADAFAPVLIPQYSDAEKDSEHC

SEQ ID NO: 8205 - DNA, 477 bp, Homo sapiens
cagacattgcaatgcagacacataagattagaagcaaaacgcaggaggctggagttacctttcatggaagggtaagcaggaagcaactacaagatcatcatttcaaaacaatatgaaagcagaatgggaaatgccatggcatgctccctcttttcaggcaatatggacactttggggaagttatgaagcgtctcccattcccgcttgaggtactcaatagagcccacaaacacaatgtgcttgagctcatggtaatgaaagttgctggcacggagcggcatcaccaggttccggaggccgatcagggctgagctgacgtcgccaaagatgcagaccacgacatggccactcaggacggtcatggcagcttcacttcgagtctacaacagggagaagtgggtaagagtcagagagaagactgcatagggctgttgtaaggagtgaaataaatcatttgtgcaaagaatcaagcaaata

SEQ ID NO: 8206 - protein, 56 aa, Homo sapiens
MLPLFRQYGHFGEVMKRLPFPLEVLNRAHKHNVLELMVMKVAGTERHHQVPEADQG
